United States Patent Application Publication US 2024/0131193 A1 - sequence listing, part 4

SEQ ID NO: 3115 - DNA, 941 bp, Homo sapiens
  source 1..941: mol_type = genomic DNA
gagtccctgcttcgcagagcaccggacttggagtcagagagacctggctgcgaatcccggctccgccactttctagcgctgtgaccttggttttcaggtggcgaaactgactggtctggttagagcgcgtccaagccaagccgcagtgctgtttggatttttaaatttctccttctgagtgagaaaatagcaatcgagatggaaccatccgcacaacagctccagctggcagcatcacttcccgccaatttatccaacttctgccaaggctctgaaatgccaacaacgtcgaggcctgcacttgatgtcaagggtggcacctcacctgcgaaggaggatgccaaccaagagatgagctccgtggcctactccaaccttgcggtgaaagatcgcaaagcagtggccattctgcactaccctggggtagcctcaaatggaaccaaggccagtggggctcccactagttcctcgggatctccaataggctctcctacaaccacccctcccactaaacccccatccttcaacctgcaccccgcccctcacttgctggctagtatgcacctgcagaaacttaatagccagtatcaggggatggctgctgccactccaggccaacccggggaggcaggacccctgcaaaactgggactttggggcccaggcgggaggggcagaatcactctctccttctgctggtgcccagagccctgctatcatcgattcggacccagtggatgaggaagtgctgatgtcgctggtggtggaactggggttggaccgagccaatgagcttccggagctgtggctggggcagaatgagtttgacttcactgcggactttccatctagctgctaatgccaagtgtccctaaagatggaggaataaagccaccaattctgttgtaaataaaaataaagttacttacaaagagacgggcc

SEQ ID NO: 3116 - DNA, 761 bp, Homo sapiens
  source 1..761: mol_type = genomic DNA
attcacccagcgcattccgccgcccgcaggcttgcggggaaacttccttattattgtgacgccgaaaacggagaaaccccgggtccggcgagaggggctgtgacagtcggagtcccaagctgcggttcggctgctgccgagaactgcaaggtgtggaatatttctggcttctagtccaatgccaagtgtgtgacctgtgagttaattctgcattttagttttggccctacatttatttaaagcctgaatttggggagtatctgcaaagcactgaaggttttggacattgtcttttcctgctgttgaaagagaccctcttcatatatacaacattcaggctacatgattccctgaaagataagaacaatgttatgttggggatattggtctctgggccaacctggtatcagcaccaacctgcagggaattgtggctgagccccaggtgtgtgggttcatatctgacagaagtgtcaaggaagtggcctgtgggggaaaccactctgtgttcctgctggaagatggggaagtttacacatgtggtttgaacaccaaggggcaactgggccatgagagggaaggaaacaagccagaacaaattggagctctggcagatcagcatatcattcatgtggcatgtggcgagtcccacagtctggccctcagtgaccgaggccagctgttttcttggggtgcagggagtgatggtcagctaggactcatgactactgaggattctgtggcagtgcccaggttaataca

SEQ ID NO: 3117 - DNA, 4288 bp, Homo sapiens
  source 1..4288: mol_type = genomic DNA
atggaaggggcgctgactgcccgggacaaggtcggggttcaggattttgtgctattggacgcgtacaccagcgaatctgcctttgtcgacaacctccgcaagcgtttcagcgagaacctcatatacacatatattggcaccctccttgtgtctgtgaatccataccaggagctcggaatctacactgtgagccagatggaactttatcaaggggtcaatttctttgaactgccaccacatgtctacgctatagccgacaacgcttaccgaatgatgtgtgctgaactaaataaccatttcatcctcatttctggagagagtggggcagggaaaacagaggcctccaagaaaattctcgagtattttgcagtgacctgcccaatgacccagtcactacaaatagcccgtgacagactgctgttctccaacccagtgctggaggcttttggaaatgccagaacgctccggaatgacaactccagcagatttgggaaatacatggatatacaatttgattttcagggcattcccgtaggtgggcatatcatcagttacttgatagagaagtcccgagttgtctaccaaaacgaaggcgagcggaatttccacatcttctaccagctgctggcaggtggcgaagaggagcgcctgtcttacctgggactcgagcgagacccccagctgtataaatacctctcacagggtcattgtgccaaagagtcatccattagtgacaagaatgactggaaaactgtttccaacgccttttctgtcattgattttactgaagctgacctcgagaatctctttggaattattgccagtgtcttacacctggggaacattggttttgaagaagacgaccaaggctgtgccactatcccagacacccatgagatcaagtggatagccaagctcctgggggtccacccatcagtccttctggaagctctcacccacagaaaaattgaagccaaaactgaggaggtgatctgcccgttgacactagaactctctgtctacgctagagatgcaatggcaaaggctgtttatggacgaacgtttacttggctggtcaacaaaatcaattcctccttagttaacaaggttggtcaacgcattttggatcccttgctcttgctcacgtggaaaactgtaattggattactggacatctatgggtttgaagtctttgacaagaatggttttgaacagttctgtataaattactgcaatgagaaactccagcaactgttaattgagaggactctaaaagcagaacaggcagaatatgaaatggaaggcatagagtgggagccaattaaatatttcaacaacaagatcatctgtgatttggtagaagagagacataaaggaatcatatctattctggatgaagaatgcattcggcctggtcctgctacagacttgagtttcctggagaaattggaagagaaagtgggcaaacatgcacacttcgaaacccgtaagctggctggtccaaagggccgaaagaggattggctggatggagttccgactcctccactatgcaggagaggtcacatactgcaccaagggattcttggaaaaaaacaatgatcttctttacagacatctgaaagaagtgctgtgcaagtccaagaacattatcctgagggaatgcttcctgctggccgagttagaaaaccggaggaggcccccaacagtggggactcagtttaaaaacagtctgagcagccttctagaaaccctcatctctaaggagccctcctacatccgttgcatcaagcccaacgacaggaaagaacccagcaaatttgatgacttcctcataaggcatcagatcaaatacctggggctgatggagcacctgcgggtgagacgggctggttttgcataccgaaggaaatacgagcatttcttgcaaaggtacaagtccttatgcccagacacctggccgcactggcacgggcctccagcagagggcgtggaacggctgatcaagtacatcggctacaaacccgaggaatacaagttaggcaaaaccaaaatattcattcgtttccccagaactctgtttgctaccgaagatgcctttgaatttagtaaacatcaactagttgcaagaatccaagccacttacaaacgctgcctaggaaggagagaatacgtgaaaaaaagacaagcagccatcaaactggaagcccactggcgtggggccctggctcggaaggcaatccaaaggagaaagtgggccgtgcggattatcagaaagttcattaaaggattcatcagtcgcaacaaacccctctgtcctgacaacgaggaatttatcgtgtttgtgcggaagaattacatcttgaatctccggtatcaccttccaaagactgtcctggacaagagctggctgaggcctcctggcatcttggaaaatgcatcagatctgctcaggaaaatgtgcgtgaggaacctggtgcagaagtactgccgcgggatcacagctgagcggaaagcaatgatgcagcaaaaggtagttacaagtgaaatcttcaggggaaggaaagacggctacacagaaagtttaaatcaaccctttgtcaacagtcggatagatgaaggagacattaatccgaaagtgcttcagctaattagccatgagaaaatccagtatggtgtcccggtcattaaatatgacagaaaaggcttcaaagcacggcagcggcaactcattcttactcagaaagcagcttacgtggtggaacttgccaaaatcaagcagaaaatagagtactcagctctcaaaggtgtctccactagcaatctgagtgatggaatcttagtcattcatgtttcaccagaggacagcaagcaaaagggggatgccgttttgcagtgtggacacgtgtttgaagcagttactaaactcgtcatgctggttaagaaggagaacattgtcaatgttgttcaaggaagtttacagttttttattagtccgggaaaagaaggcacaatagttttcgacactggactggaagaacaagtctataaaaataaaaatggacaattaacagtggtgtcagtccggaggaagtcctgatagaggatgacgtctgacctctaccatcgccatttttgctccaactgaggaaactacaggggaagtggggattggatccagttagctacctcttcaaggtaccaggcccgcagcactaacagatcacatctgaagaaactgaggggcgttaggccaaagcctaatcccagctcctcagctgccccatggcaccttatttaaaatgtcaccttctggaagcagaccccaggtcacccgaaggcgcaattctaaacaccctcgacaggatctatgttcagtgcgcagtccaacgtgtcattagagggtgggcaagattctctacctctgtcaagctgccctgagacatgatgaaatactgtgtacagcaagttctcaaataacatttcgttatatgttgataagacatctgattcctgggcagggccactgtctgggtggagtctgtatgttctccccatgtctctgggtttcttctgggtgctctggtttcctcccacgtccccaaggtgtgtgtgtcaggtgcactggcgtgtctatgcggtcccagtctgagtgagtgtgggtgcgtgagccccgtgagaggaggacatcctgtccagggtgggtcccgccttctgccctgagctgctgggattgggctctggccatctgcaaccctgaacgtgcaggttggagaacgaatgaatacaaattttattgtaaaataaaaatgtatataaagcatatgagcacacaaatggacaataaatgccacagcgcaaaagcgtgtagcgagcctgccacgcttgtgactggggaggggctccgtataatctcacctttgcaagcgtttatttactgatgtatgcggccaccactgtgaccaccatcacttaccgattcaccaaaacttaggtaatatggtcttatttttgatttaattaaatatacgtgtagctcatgtatttcacagtttaatatgagaagtgctttggtctttatttagaaattgggtgatgtttttgtgcccagcaacatgctgtaggaatttaactcttgtttacatccattagcctcatggttttgcttcaagtctcagcttccaagaacctatcgatgacttactgtgcatggtctgagactaagtaaaggaaatttcctaaagctgtgaaatttgaattttgctttaaataaatggaactcacatgtg

SEQ ID NO: 3118 - DNA, 1510 bp, Homo sapiens
  source 1..1510: mol_type = genomic DNA
cgcacccgcgggagcggagccgtggcgcgctcgccccggacgccggccgcccctccgctcgccctactgagcgagcggcccggggcgccgaggggtccgcgccgcgcggggcgcaccgccctggccgccatgtgctcccagctctggttcctgacggaccggcgcatccgcgaggactacccgcaggtgcagatcctgcgcgccctccggcagcgctgctccgagcaggacgtgcgcttccgggcggtgcttatggaccagatcgccgtcaccatcgtcggcggccacctcggcctccagctaaaccagaaggccctcaccactttcccggatgtggtgcttgtacgggtacccacaccctcagtgcagtcagacagtgacatcactgtcctgcgacacctggagaagctgggctgccggttggtcaatcgcccacagagcatcttaaattgcatcaacaaattctggacgttccaagaactggctggacatggggtccccatgccagacaccttctcctatggtgggcatgaagacttttcaaaaatgattgatgaagctgagcccctgggctacccagtcgtggtgaagagcacacgaggccaccggggaaaagctgtttttctggcaagagataaacatcacctctctgacatctgccatctgatccgccacgatgtgccctacctgttccagaagtacgtgaaggagtcccatggaaaggacatccgggtggtggtggtagggggccaggtcataggctctatgcttcgctgctccactgatggacggatgcagagcaactgctctctcggtggcgtgggcgtcaagtgtccgctgacagaacaaggcaagcagttggctattcaggtgtccaacatcctaggcatggacttctgtggcattgatctccttatcatggacgatggctcctttgtggtgtgtgaggcaaatgctaatgttggcttcctagcctttgaccaggcatgcaacttagatgtgggtgggatcattgcagactataccatgtccttgctgccaaataggcagactggaaagatggctgtcctcccaggactgtcgagtccaagggagaagaacgagccggatggctgtgcttcagctcagggagttgcagagagcgtctataccatcaacagtgggtctacctctagtgaaagtgagcctgaactgggagagatccgggattcctcagcaagcacaatgggggccccaccctccatgctgcccgaacctggctacaacattaacaacaggattgcttctgagttaaaacttaagtgaattcctgctttttggcagcatttaaaccaaatcctactgcttccctagtagttttgagtgaataaaatctggactaatgtgatttcatttgcacagaaactagaaatcccatctgggcactcagcattttttctaacgatgatttaagcaaatggcctagctttgtggtttttacaaagacaaatataaaaacactcaagaacaa

SEQ ID NO: 3119 - DNA, 1783 bp, Homo sapiens
  source 1..1783: mol_type = genomic DNA
aactcctaactgcagcggaaacgtgggagccgcgcgggccgctgtcgtcccaacccccgccgccctcgtcgcgcgcggggcctccgcgcccccggctgctgctcacgccccgcccgggagccaggcagaaatactcagtgtcctcagtcacagaaacatcatccagttttatggagtaattcttgaacctcccaactatggcattgtcacagaatatgcttctctgggatcactctatgattacattaacagtaacagaagtgaggagatggatatggatcacattatgacctgggccactgatgtagccaaaggaatgcattatttacatatggaggctcctgtcaaggtgattcacagagacctcaagtcaagaaacgttgttatagctgctgatggagtattgaagatctgtgactttggtgcctctcggttccataaccatacaacacacatgtccttggttggaactttcccatggatggctccagaagttatccagagtctccctgtgtcagaaacttgtgacacatattcctatggtgtggttctctgggagatgctaacaagggaggtcccctttaaaggtttggaaggattacaagtagcttggcttgtagtggaaaaaaacgagagattaaccattccaagcagttgccccagaagttttgctgaactgttacatcagtgttgggaagctgatgccaagaaacggccatcattcaagcaaatcatttcaatcctggagtccatgtcaaatgacacgagccttcctgacaagtgtaactcattcctacacaacaaggcggagtggaggtgcgaaattgaggcaactcttgagaggctaaagaaactagagcgtgatctcagctttaaggagcaggagcttaaagaacgagaaagacgtttaaagatgtgggagcaaaagctgacagagcagtccaacaccccgcttctcttgcctcttgctgcaagaatgtctgaggagtcttactttgaatctaaaacagaggagtcaaacagtgcagagatgtcatgtcagatcacagcaacaagtaacggggagggccatggcatgaacccaagtctgcaggccatgatgctgatgggctttggggatatcttctcaatgaacaaagcaggagctgtgatgcattctgggatgcagataaacatgcaagccaagcagaattcttccaaaaccacatctaagagaagggggaagaaagtcaacatggctctggggttcagtgattttgacttgtcagaaggtgacgatgatgatgatgatgacggtgaggaggaggataatgacatggataatagtgaatgaaagcagaaagcaaagtaataaaatcacaaatgtttggaaaacacaaaagtaacttgtttatctcagtctgtacaaaaacagtaaggaggcagaaagccaagcactgcatttttaggccaatcacatttacatgaccgtaatttcttatcaattctacttttatttttgcttacagaaaaacggggggagaattaagccaaagaagtatatttatgaatcagcaaatgtggtgcctgattatagaaatttgtgatcctatatacaatataggacttttaaagttgtgacattctggctttttcttttaatgaatactttttagtttgtatttgactttatttcctttattcaaatcatttttaaaaacttacattttgaacaaacactcttaactcctaattgttctttgacacgtagtaattctgtgacatactttttttttcttatagc

SEQ ID NO: 3120 - DNA, 2308 bp, Homo sapiens
  source 1..2308: mol_type = genomic DNA
agtcctccgcccgggcgtccggaacagtcgacggcagactccggcccgctgagccacccgaggggtcccgtggcctccgcggacccggaatctgggccctcgcggacccgcgccccgcccagtcgccccagggcttccccacacccacggagtgaagtcagccgcggccctgcctgggaggaacttaccgtctaccgggaaaggtggccagcagatgtgtcgggcctggtgagagggtgaggcgagacggcccgatcgcccagggccccggaagctgcggaggtcacccccgcctggccttagctcagggacaccctggattcacgtgggagcccctgctcctgcctcccccgtcccaccactgaggctgttgggccaggccagtcatgctagaacggcctcctgcactggccatgcccatgcccacggagggcaccccgccacctctgagtggcacccccatcccagtcccagcctacttccgccacgcagaacctggattctccctcaagaggcccagggggctcagccggagcctcccacctccgccccctgccaagggcagcattcccatcagccgcctcttccctcctcggaccccaggctggcaccagctgcagccccggcgggtgtcattccggggcgaggcctcagagactctgcagagccctgggtatgacccaagccggccagagtccttcttccagcagagcttccagaggctcagccgcctgggccatggctcctacggagaggtcttcaaggtgcgctccaaggaggacggccggctctatgcggtaaagcgttccatgtcaccattccggggccccaaggaccgggcccgcaagttggccgaggtgggcagccacgagaaggtggggcagcacccatgctgcgtgcggctggagcaggcctgggaggagggcggcatcctgtacctgcagacggagctgtgcgggcccagcctgcagcaacactgtgaggcctggggtgccagcctgcctgaggcccaggtctggggctacctgcgggacacgctgcttgccctggcccatctgcacagccagggcctggtgcaccttgatgtcaagcctgccaacatcttcctggggccccggggccgctgcaagctgggtgacttcggactgctggtggagctgggtacagcaggagctggtgaggtccaggagggagacccccgctacatggcccccgagctgctgcagggctcctatgggacagcagcggatgtgttcagtctgggcctcaccatcctggaagtggcatgcaacatggagctgccccacggtggggagggctggcagcagctgcgccagggctacctgccccctgagttcactgccggtctgtcttccgagctgcgttctgtccttgtcatgatgctggagccagaccccaagctgcgggccacggccgaggccctgctggcactgcctgtgttgaggcagccgcgggcctggggtgtgctgtggtgcatggcagcggaggccctgagccgagggtgggccctgtggcaggccctgcttgccctgctctgctggctctggcatgggctggctcaccctgccagctggctacagcccctgggcccgccagccaccccgcctggctcaccaccctgcagtttgctcctggacagcagcctctccagcaactgggatgacgacagcctagggccttcactctcccctgaggctgtcctggcccggactgtggggagcacctccaccccccggagcaggtgcacacccagggtcttaacgcccctgaggctgagccctgctgcagaacccagcgctcctggccttgggccagcagctgaagccccatgctgtgtggagcaaagaggtttcctgagcaggcacatcccccggtccttctctgcattccaggcagctccaccaaagtctgcgtgcaacgcccttcatttgcatggacacacgcaaccctcggcgtttgtatggtcattaacatgctcctcccaccacggaagaactttcgaggcccgtaccaaagtagatcctttattcaaaatctgtgggggttttttgactgtttttgctgacctgtgacctctcactgaggacggcagtccaggaccacccccagaggggttcaaagacctccgaaaccagagaccacccccacatacaggtccatggagagggcctggaccatctggacccccacggtcaggccaagtcccagataatagcaccagatgtttcctgtccgacttttggtctccccaaggcgaccagaggccgagctgcccctacacaggcgc

SEQ ID NO: 3121 - DNA, 955 bp, Homo sapiens
  source 1..955: mol_type = genomic DNA
ccgagctcggagccccgcgggccgcgcccgccgccggccccacccatccgggtcgaggaggccgaggccatggctgagacggaggagcggagcctggacaacttctttgccaagagggacaagaagaagaagaaggagcggagcaaccgggcggcgagtgccgcgggcgcagcgggcagcgccggcggaagcagtggagccgcgggtgcggcgggcggcggggcgggcgcggggacccggccgggtgacggcgggaccgccagcgcgggggctgcgggcccaggggccgccaccaaggctgtgacgaaggacgaagatgaatggaaagaattggagcaaaaagaggttgattacagcggcctcagggttcaggcaatgcaaataagcagtgaaaaggaagaagacgataatgaaaagagacaagatccaggtgataactgggaagaaggtggaggtggtggtggaggtatggaaaaatcttcaggtccctggaataaaacagctccagtacaagcacctcctgctccagtaattgttacagaaaccccagaaccagcgatgactagtggtgtgtataggcctcctggggccaggttaaccacaacaaggaaaacaccacaaggaccaccagaaatctacagtgatacacagttcccatccctgcagtcaactgccaagcatgtagaaagccggaacaggtacttaaaatgaatgctacctggaattaaatgactacatatggcacatctacatcttactttagggacatgaattttttaaaataaataaaatgggaagaaatgtaaatgacatcagatggaaatgtgttttttggggtggcttttagaataaatcccagccttttcaccactttgagagcacagctggcttgaatttaaacctccacgtggacttgctcctctgctctgtcttaaaaaatgtgtaagggaccttg

SEQ ID NO: 3122 - DNA, 4747 bp, Homo sapiens
  source 1..4747: mol_type = genomic DNA
atttcctcttaatctgattgcagcttgaaggcagcccatttccattaagtaggactgcatggcaagcagccccaccaaagggttgacaatgagcgtcccagtggctcctaagaaatcatgttacactcagttgcgggacaacagaaatgcagcaagaaataataatgaaagcatcttaagtctgggagatacgaatgccaatcaaatcatgttggaggtcagctcctctcatgacgagtccaagacatgtgacctgggagatgaaattggaaatacaaattcaagtgagccagaaaaccgtacccatttccataaggaatttcaccaacttcagggctttgggaaaggctctcaggctggctctgccagcctgaaagattttagactttcttcaaccattcagagggaactcaatgaagagcacacagtggagagaggcacagatagcctgcagaccacgcggagtattcagggaccaagtctgtcgagttggaggaatgtgatgagtgaggccagtctagacgttttggctaaaagggatgctgaaattccccggcatgttcccaaggataaactggcaaagacccttgacaatgaggaactgaggaggcattctttggaaagagcaagcagctctgtagctgcagtcgggagcctgactccgcagcatccacagcctctatccctcgactcccgggaagcacggggtcagatacctgggggtggggaggggccacagaagacattgccagaccacgctgtcccggcagctttccctgcaactgacagtacctcagagggaaagagtgtgcgtcatcctaaaccatctacctcagaaagcaagcagagcactccctcagagacccaaacagtgggggcacatgtactgcaggtgtgcagtgagcacacatcacattccgcccatccagagcctgctctgaatttgactttggcatcgaaggaaatcccaagtaaactggaagcacaattaggtcagggaaagggagaggccaagctggatctgaaatatgttcctcccaggagagttgaacaggagggaaaggcagcccaggaagggtatctgggatgccacaaggaagagaatctgtcagccttggagggaagggatccatgtggggaagcacacccggaagccaccgatgcacttggccatctgctgaacagtgacctccaccaccttggggtgggaagaggcaactgtgaagagaagagaggagtcaacccaggggagcaggattctctccacaccacccccaaacagggctctgcttccttaggaggggctgataatcagcccactggcaaaatttcaccatgtgcaggtgagaagttgggtgaaaggacatccagcagcttttcaccaggtgacagtcatgtggcttttattcctaataatctgactgacagcaagcccttggatgtcattgaggaggaaaggcggttgggcagtgggaataaggacagtgttatggttttggtgttcaatccttctgttggagagaacaagacggaggtgcctgagcccctggaccctcaaagtggccgctcagaagcacgggaaagcaaagaggtcaccacatctgttgctgaaaacaggaaccttctagagaatgcagataagattgaaagcacctcagcaagagcagattcagttctcaatattccagcacccctccacccagagacaactgtgaacatgacctaccagcctacaacacccagtagcagttttcaggatgttagcgtgttcggtatggatgcggggtcccccttggtagttccaccccctactgatagtgcacgcttgttgaacacgtcccccaaagtgcctgacaagaacacttgccccagtgggatccccaagcctgtcttcacacattccaaggacacaccttcctcgcaggagggaatggagaactatcaggttgaaaaaacagaggagaggacagaaactaagcccatcattatgcccaagcccaagcatgtgaggcccaagatcatcacctacatcaggaggaatccccaggccctgggccaggtggacgcctcgctggttccagtggggcttccatatgccccgcccacatgtaccatgcctcttccccacgaagagaaggcagcaggtggtgacctgaagccatctgccaacctctatgagaaattcaagccagacctgcagaagccaagggtcttcagttccggattgatggtgtctggaatcaagcccccgggacatcctttcagtcaaatgagtgaaaagtttttgcaggaggttacagaccaccctggaaaagaagagttttgttctcctccctatgctcattatgaagtccctccaactttctatcggtcagccatgctccttaagccccagctaggattgggtgcaatgtcccgtttaccatctgcaaagagcaggattctgattgcaagtcagaggtcttcagcgagcgccatccacccaccaggacccataacaacagccaccagtctctacagttccgatccttcagcagatttaaagaaagcttccagttcaaatgctgcaaaatccaatctcccgaaatctggtctccgtcctcccggatactcacgtctcccggcagccaaactggcggcatttggctttgtccggagctccagcgtctcctcagtctccagcacccagtccggggacagtgcacagccagagcagggccggccagccacccgttcaacctttgggaatgaagaacagccagttctgaaggcatctctgccttctaaggacacacccaagggggccggccgggtggcccctccagcatcctccagtgtgacagcaccccgcaggagtttacttccagcgccaaaatccacttccacacccgctggaacaaagaaagatgctcagaaagatcaagatacgaataaacctgctgtttcatctcctaagagagtagcagcttcaaccaccaagcttcattcaccaggatacccaaagcagaggactgcggcagctcgaaatgggtttccgcccaagccggacccgcaggcccgtgaggctgagcggcagctggtgctgcggctgaaggagcggtgtgagcagcagaccagacagctgggcgttgcgcaaggggagctgaagagggccatctgcggctttgatgccctcgccgtggccacgcagcatttctttagaaagaatgaaagtgcccttgtgaaagaaaaagagctgtcaatcgaacttgcaaacatcagggatgaagttgccttccatacagcaaagtgcgagaaactacaaaaggagaaggaggagctggagaggcggttcgaggacgaggtgaagaggctgggctggcagcagcaggccgagctccaggagctggaggagcggctgcagctgcaattcgaggcggaaatggcgcgcctgcaggaggagcacggtgaccagctgctgagcatccggtgtcaacaccaggagcaggtggaagatctcaccgccagccatgatgctgctctcctagagatggaaaataaccacacagttgccatcacaatcctgcaggatgaccacgaccacaaagtccaagaattgatgtccactcatgagcttgaaaagaaagaattggaagaaaattttgaaaaactgcggctgtcattgcaggaccaggtggacacgctgaccttccagagccagtctctgcgggacagagcccgccgcttcgaagaggccttgaggaagaacacagaggagcagctggagattgcattggctccttatcagcacttggaagaagacatgaagagtctgaagcaggtattagaaatgaagaatcagcaaatacacgagcaagaaaagaagattcttgagctggaaaagctggcagaaaagaacattatcctagaagaaaagatccaggttctccaacagcagaacgaagacctcaaagcaaggattgaccaaaacacagttgtcaccagacagctgtcggaggaaaatgctaacctccaggaatatgttgagaaggaaacccaggagaagaagagattgagccgaaccaatgaagagctgctttggaagctccaaactggggacccgaccagtccgattaaactctcgcccacatctcccgtttaccgcggctcctcctcggggccctcctctccggccagagtcagcacaacacccagatgacgccactacacggcctgcgggagctccggcttctcgtcctccggtctccaccctgagggagcaccgacccggtgccgccggagctggccctgtgcgcatgctcagtagctgcgaatgcatcctaggcgcgtcctcctctgatccccgtgtaagactgccctggtgtcggcacttaggaatgtgtaaatggtaaagtctgatgtgcaaacgttttaccatagttagagccaaaagaaagacacttgcaattgttcttgagcaatgaactttcactgcagaatttcaggttagttacaaaaagctcagttttcaatatacattgaataatcattgtgtactgcaccgatatgtgtgtatatttagatatacgtatatacacatgctgcggttctgaatttcattttttataacatgaagtgctgacatattttagtgaaggtcagcagttttctaacttgtgcctaagaattattgggaaatgaaaatgcatttctatctagcttcccaggaatatttctacccaaaatagaaaaaggaaaaaaaaaaaga

SEQ ID NO: 3123 - DNA, 1833 bp, Homo sapiens
  source 1..1833: mol_type = genomic DNA
gttatgaaaattaaccaggagcgagcagaggagttgcaggaagcagagaggttcagcagaaaggcagcacaagcagccagagatctcacccgagcagaagctgagatcgaactcctgcagaatctcctcaggcagaagggggagcagtttcgacttgagatggagaaaacaggtgtaggtactggagcaaactcacaggtcctagaaattgagaaactgaatgagacaatggaacgacaaaggacagagattgcaaggctgcagaatgtactagacctcactggaagtgacaacaaaggaggctttgaaaatgttttagaagaaattgctgaacttcgacgtgaagtttcttatcagaatgattacataagcagcatggcagatcctttcaaaagacgaggctattggtactttatgccaccaccaccatcatcaaaagtttccagccatagttcccaggccaccaaggactctggtgttggccttaagtactcagcctcaactcctgttagaaaaccacgccctgggcagcaggatgggaaggaaggcagtcaacctccccctgcctcaggatactgggtttattctcccatcaggagtgggttacataaactgtttccaagtagagatgcagacagtggaggagatagtcaggaagagagtgagctggatgaccaagaagaacccccatttgtgcctcctcctggatacatgatgtatactgtgcttcctgatggttctcctgtaccccagggcatggccctgagaatgaagtttctagattagaagacataatgcagcatttaaaatcaaagaagcgggaagaaaggtggatgagagcatccaagcggcagtcggagaaagaaatggaagaactgcatcataatattgatgatcttttgcaagagaagaaaagcttagagtgtgaagtagaagaattacatagaactgtccagaaacgtcaacagcaaaaggacttcattgatggaaatgttgagagtcttatgactgaactagaaatagaaaaatcactcaaacatcatgaagatattgtagatgaaattgagtgcattgagaagactcttctgaaacgtcgctcagagctcagggaagctgaccgactcctggcagaggctgagagtgaactttcatgcactaaagaaaagacaaaaaatgctgttgaaaagttcactgatgccaagagaagtttattgcaaactgagtcagatgctgaggaattagaaaggagagctcaggaaactgctgttaacctcgtcaaagctgatcagcagctaagatcgctccaggctgatgcaaaggatttggagcagcacaaaatcaagcaagaagaaatcttgaaagaaataaacaaaattgtagcagcaaaagactcagacttccaatgtttaagcaagaagaaggaaaaactgacagaagagcttcagaaactacagaaagacatagagatggcagaacgcaatgaggatcaccacctgcaggtccttaaagaatctgaggtgcttcttcaggccaaaagagccgagctggaaaagctgaaaagccaggtgacaagtcagcagcaggagatggctgtcttggacaggcagttagggcataaaaaggaggagctgcatctactccaaggaagcatggtccaggcaaaagctgacctccaggaagctctgagactgggagagactgaagtaactgagaagtgcaatcacattagggaagtaaaatctcttctggaagaactgagttttcagaaaggagaactaaatgttcagattagtgaaagaaaaactcaacttacacttataaagcaggaaattg

SEQ ID NO: 3124 - DNA, 582 bp, Homo sapiens
  source 1..582: mol_type = genomic DNA
aacagaccgccgtgagagaggaggggcgccggccgggattcgcggcccggagctcgggaccggagtcaggaatggagagaagggtaatggtgttacctcttattgtggaaacctgttgagatcacagagaatatactgacggcataaaagggcagaaccatagcagggtgcgaagtcctcaccagtgaacggagacctctctgaactaaggataccatggccacgtcagccccactacggagcctggaagaggaggtgacctgctccatctgtcttgattacctgcgggaccctgtgaccattgactgtggccacgtcttctgccgcagctgcaccacagacgtccgccccatctcagggagccgccccgtctgcccactctgcaagaagccttttaagaaggagaacatccgacccgtgtggcaactggccagcctggtggagaacattgagcggctgaaggtggacaagggcaggcagccgggagaggtgacccgggagcagcaggatgcaaagttgtgcgagcgacaccgagagaagctgcactactactgtgaggacgacgggaagctgctgtgcgtg

SEQ ID NO: 3125 - DNA, 559 bp, Homo sapiens
  source 1..559: mol_type = genomic DNA
ggcgaggaggggaatttccttgtgcctccattcccgggaggggggagcggcgttggaggccaccgtttccagcatcaacaacagcaacttgtgattggcggtgaccggatattcagttgcacatccccacatcaatgcactgccaatgacagcaaaaccaacttctcctcagccttgtgaagaggatgaggaccttcaggatgattcacttccatttaatgaatgggttatatcctgtgttgtgacctcatggtttaagtgggaataaagatgagtataagcagtgatgaggtcaacttcttggtatatagatacttgcaagagtcaggattttctcattcagcatttacctttggtatagaaagccatatcagtcagtccaatataaatggtgccctcgtcccacccgctgcattgatttctatcatccagaaaggtctacagtatgtagaagcagaagttagtattaatgaggatggtaccttgtttgatggtcgaccaatagagtctctgtccctgatagatgccgtaatgcctgatgtagtacaaacaagacaac

SEQ ID NO: 3126 - DNA, 3926 bp, Homo sapiens
  source 1..3926: mol_type = genomic DNA
gcacttccgggccggccgattccgcgcgtctccgcccatcatggcgctcgtgccagtgtcccgtgggctacccactcctgtcatgtcctttgggctggtgcaggccagatcttctagggccgtagccctgagaggagcgcctggagaggaaacggcgcgccatgcacctcacacggcccctcagacctcacggcgaggccctatcagggtaatggtgtccgccggactcgcacaacactccgccggactcgcacaacactccgccgcactcgcacaagactccgccgcggcgacctctactgaaagacccccagtcctggtgtcgcccgaaggcccaggaaaccgtgcttccgcgcttctcccccagaacgtgggaagctgccgctttaccctcattttaccccagggtcgcaaaacatctcaccgtagttgaagccagcaagccggaccaggcgtcccggccaagccacgtgcgcgccccgcgccgcgagtgctcgccccgcccctagggaggagccggccgacccccggccacttagcagtgccgcagccgacggggtgcggttcggcgctcccaggttcctttcctcactgcacgctcttgcccctcctcttttctctcctgcccgtgttcttcccgccgcctgacctggcccgcccgcctttccagtctggccgggcgggggcctgaagcacggcggctcgggccgtgggaccgtgttcacaccctttccagaaattcttggctggtaaccgcgaaaccgactggagcaggagctgggagaactggagaaaactgctctaatctcacttgactccagctaggagctgatgctgcatcgtaataacatttgcagagcgctttcacaggcgctggagtgacttgtctgagattcctccagaactgagccctttgttggaaccataccccagcccatggtcccatgactaggtggatagtactccttgtacctcctgcaacccagaaccctggctgaccactttgaaggaggatgctccagcaggtcaatggccacaatccggggtctgatggccaagccagggagtacctcagagaagacctgcaggagttcctgggtggggaggtcctgctgtacaaactggatgacctcaccagggtgaatcctgtgacactagagacagtcctgaggtgcctgcaggcccggtacatggcagacacattctacaccaatgctggctgcaccctggtagccttgaaccccttcaagcctgttcctcagctctactcgcccgagctaatgagagagtaccatgctgcgcctcagccccagaaactgaagccccatgtgttcactgtgggtgaacagacctacaggaatgtcaagagcctgattgaaccagtcaaccagtctattgttgtcagtggagagagtggtgctggaaagacatggacgtctcgctgcctaatgaagttctatgctgtggtggccacctcacctgcatcttgggagagccacaagattgcagagaggatagaacagaggatcctgaactccaaccctgtcatggaagcttttgggaatgcgtgtacactgaggaataacaacagcagtcgctttgggaagttcatccagctccagctgaacagggctcagcaaatgactggagccgcagtccagacctacctcctagagaaaactcgagtggcctgccaggcttccagtgagaggaacttccacatcttctatcagatttgcaaaggagccagtgaggacgagaggctccagtggcaccttcctgagggagctgccttctcctggctgcccaacccagagaggagcttagaagaggattgttttgaggtgaccagagaggccatgctccatttgggcattgacacccctacccagaacaacatctttaaggtcctagctggactgctgcaccttggcaatatccagtttgctgcctccgaggatgaagcccagccctgccagccgatggatgatgccaagtactctgtcaggacggcagcctcgctgctggggctcccagaggacgtgctgctggagatggtgcagattagaaccatcagggcaggcagacagcagcaggtgttccggaagccctgcgcccgagccgagtgtgacacccgtagagactgcctggccaaactgatctatgcgcggttgtttgactggctggtatcagtgatcaacagcagcatctgtgcagacaccgactcgtggaccactttcataggcctgctggatgtgtatggatttgaatcatttcctgacaacagtctggaacagttgtgcatcaactacgccaatgagaagctgcagcagcattttgtggctcactacctaagggcccagcaggaggaatacgcagttgagggcctggagtggtcattcatcaactaccaggacaaccagccctgtttggatctcattgagggaagccccatcagcatctgctccctcataaatgaggaatgccgcctcaatcgacccagcagcgcagcccagctccagacacgcattgagactgccctggcaggcagcccctgcctgggccacaataagctcagccgggagcccagcttcattgtggtgcattatgcggggcctgtgcggtaccacacagcaggcctggtggagaagaacaaggaccctatcccacctgagctgaccaggctcctgcagcaatcccaggaccccctgctcatggggctgtttcctactaaccccaaagagaagacccaggaggaaccccctggccagagcagggcccctgtgttgaccgtggtgtccaagttcaaggcctcactggagcagcttctgcaggtcctacacagcaccacgccccactacattcgctgcatcaagcccaacagccagggccaggcgcagacctttctccaagaggaggtcctgagccagctggaggcctgtggcctcgtggagaccatccatatcagtgctgctggcttccccatccgggtctctcaccgaaactttgtagaacgatacaagttactaagaaggcttcatccttgcacatcctctggccccgacagcccatatcctgccaaagggctccctgaatggtgtccacacagcgaggaagccacgcttgaacctctcatccaggacattctccacactctgccggtcctaactcaggcagcagccataactggtgactcggctgaggccatgccagcccccatgcactgtggcaggaccaaggtgttcatgactgactctatgctggagcttctggaatgtgggcgtgcccgggtgctggagcagtgtgcccgctgcatccagggtggctggaggcgacaccggcaccgagagcaggagcggcagtggcgggccgtcatgctcatccaggcagccattcgttcctggttaactcggaaacacatccagaggctgcatgcagctgccacagtcatcaagcgtgcatggcagaagtggagaatcagaatggcctgccttgctgctaaagagctggatggtgtggaagaaaaacacttctctcaagctccctgttccctgagcacctcgccgctgcagaccaggctcctggaggcaataatccgcctctggcccctgggactggtcctggccaatacggctatgggtgtaggcagctttcagaggaaattagtggtctgggcttgcctccagctccccaggggcagccccagtagctacactgtccagacagcacaagaccaggctggtgtcacgtccatccgagcgctgcctcagggatcgataaagtttcactgcagaaagtctccactgcggtatgctgacatctgccctgaaccttcaccctacagcattacaggctttaatcagattctgctggaaagacacaggctgatccacgtgacctcttctgccttcactgggctggggtga

SEQ ID NO: 3127 - DNA, 6050 bp, Homo sapiens
  source 1..6050: mol_type = genomic DNA
cgttcacacctcctttccgagtatctgcatgccttgctggcccagagcacaagacccccattgtgctcccccggctcagaatccaaggaaagaaaggaagcgaagcctctgcattgagttctaggacagctgagacacttggattggacttaatcttaaacctctggagttcaagaccttttaaaaagggctaaataaacaatctctacatgtaaaaggccactgactcctacttcctctgtatagagcaactgttgaactcagctgcctgtagatagcggtgggtgtgctcgcaaacgtgccgccatgtctgttacgctaacatctgtgaagagagtgcaaagttctccaaacctattggctgcagggcgtgattctcagtcaccagactcagcttggagatcttacaatgatggcaatcaggagacactgaacggagatgctacatattcctctcttgcagcaaaaggttttagaagcgttcgaccaaacctacaagataaaagatcaccaactcagagccagataacagtgaatggaaactcaggaggtgccgtgagtcccatgagttactatcagaggccgttttccccctcggcatattctctcccagcctcactcaactccagcattgtcatgcagcacggcacatccctcgattccacagacacatatccccagcatgcgcagtctctggatggcaccaccagcagctctatccccctgtaccgatcctcagaggaagagaagagagtgacagtcatcaaagccccgcattacccagggatcgggcccgtggatgaatccggaatccccacagcaattagaacgacagtcgaccggcccaaggactggtacaagacgatgtttaagcaaattcacatggtgcacaagccggatgatgacacagacatgtataatactccttatacatacaatgcaggtctgtacaacccaccctacagtgctcagtcacaccctgctgcaaagacccaaacctacagacctctttccaaaagccactccgacaacagccccaatgcctttaaggatgcgtcctccccagtgcctcccccacatgttccacctccagtcccgccgcttcgaccaagagatcggtcttcaacagaaaagcatgactgggatcctccagacagaaaagtggacacaagaaaatttcggtctgagccaaggagtatttttgaatatgaacctggcaagtcatcaattcttcagcatgaaagaccagcctccttgtatcagtcctctatagacagaagcctggaaagacccatgagttctgcaagcatggccagtgacttcaggaagcggaggaagagcgagcctgcagtgggtccaccacggggcttgggagatcaaagtgcgagcaggactagcccaggccgagtggacctcccaggatcaagcaccactcttacaaagtctttcactagctcttctccttcttccccatcaagagcaaaaggtggggatgatagcaaaatatgtccatccctttgcagttactcagggctcaacggcaacccctccagtgagttagattactgtagcacttacagacagcacttggatgtccctcgggactcaccaagagccattagtttcaagaacggctggcaaatggcccggcaaaacgcagaaatctggagcagcacggaagaaaccgtctctcccaaaatcaaatcccggagctgtgacgatctcctaaacgacgactgcgatagcttcccggacccgaaagtcaagtcggaaagcatgggctccctgttatgtgaggaggactccaaggagagctgccccatggcgtgggggtccccctacgtcccggaggttcgcagtaacggcagatcaaggatcagacacaggtcagcccgcaacgccccggggttcctgaagatgtacaagaaaatgcaccgcatcaaccgcaaggacctgatgaactccgaggtgatctgctccgtgaagtccaggattctgcagtacgagagcgagcagcagcacaaggacctgctgcgcgcctggagccagtgctccacggaggaggtgccccgggacatggtgcccacacgcatctccgaattcgaaaagctgatccagaagtccaaatccatgccaaatttaggggatgacatgctgtctcccgtaaccctagaaccaccgcaaaatggcctatgtcccaagaggcggttttccattgagtatttgctggaggaagaaaatcaaagcggcccccccgctcggggccggcgaggctgccagtctaacgccctggtgcccattcacattgaagtcaccagcgatgagcagccccgagcacacgtggagttttccgacagcgaccaggacggggttgtgtccgaccacagtgactacattcacctagaggggtcatccttctgcagtgaaagtgactttgatcacttttccttcacatcctccgaaagcttttacggatccagccaccaccaccaccatcaccaccaccaccaccaccgccacctcatcagctcctgcaaaggcaggtgcccggcctcctacactcgatttaccacaatgttaaaacacgaaagagccagacacgaaaacaccgaggagcccagaaggcaagaaatggaccctggcctttctaaacttgcttttctagtcagtcctgtgcctttccggaggaaaaaaaattcggctcctaagaaacagactgaaaaggcaaaatgtaaagcatctgtgtttgaggctctggactctgcccttaaagacatctgtgaccaaattaaagctgaaaagaaaagggggagcttgccggacaacagcatcctgcaccgcctcatcagtgagctgctgccagatgttcccgagaggaactcatccctgagagcgctgaggaggagccccctgcaccagcctctccacccactgcctcccgatggtgctattcattgtccaccctaccagaatgactgcgggagaatgccccgcagtgcctctttccaagacgtggacacagccaacagcagctgccaccaccaagaccgtggcggtgcactccaagaccgtgagtcccctagaagttactcatccactttgactgacatggggagaagtgcaccaagggaaagaagaggaactccagaaaaagagaaattgcctgcaaaagctgtttatgattttaaggctcagacatctaaggagttgtcatttaagaaaggagatactgtctacatcctcaggaaaattgatcaaaattggtatgagggagaacaccacgggagagtgggcatcttcccgatctcatacgtagagaaactcacacctcctgagaaagcacagcctgcaagaccacctccgccagcccagcccggagaaatcggagaagctatagccaaatacaacttcaacgcagacacaaatgtggagctgtcactgagaaagggagatagagttattcttcttaaaagagttgatcaaaactggtatgaaggtaaaatcccaggaaccaacagacaaggcatcttccctgtttcctatgtggaggtcgtcaagaagaacacaaaaggtgctgaggactaccctgaccctccaataccccacagctattctagtgataggattcacagcttgagctcaaataagccacagcgtcctgtgtttactcatgaaaatattcaaggtgggggggaaccgtttcaggctctgtataactatactcccaggaatgaagatgagctggagctcagagaaagtgatgtcattgatgtcatggaaaagtgtgatgacggctggtttgtggggacctcaagaagaaccaaattctttggtactttccccggaaactacgtcaagaggctgtgaattgcgctccctccttctgtagaggccgcctgccagccatgcacctgcgtcaacgcgcctgaaacaccccgcgggcctcccgttgtcatgccttacggtttccaatgcgccgtcaccatctccacctgccaccaaaccaccagcagagtagccgccgctgctgtgagcctggggacgacatggcaggctggtccccctccgtgaaagtgtggattcctacttcctgctctaagctttgacacgtcaaaatgtgggatcagaaagaaaaaaatcatgatatttaaaaatggtcaaatatttgaggcaaaaaaaaaaaaaaaaagtgtctccaggaggctgtccagcctcgtggctccatttcaacatctccccccaggcgatgttctcccccaagacgaccagaaaattgtttattggggaatgctgtggtttgcattttcatattcttcgcttggcagtgtgtattcttttcacaagtttgcctagtgtcttggtttacacaatatgacaactgtaactgtactttagctattgtttgcctgcacatacatgttgtaatatgcacagtgattacaacctttaaagcaagaggaggcgagttaatttggatgagtgtgattttgctgattgaatgtgagttttcaaataggagtctttttctgcaatttgtttgcattttttagaagtgcaaacagtaagtaaataaaagccttcggtaataatcatgacaatacaagaggctgagctaggctacaggggaaaactattgtgttgtaaagttgcatcgctattttatattaaaatgtaatgatcagcatcatgaacaatgagctcttagtgttttatttatctgaaaaaatgtaagtaaaagcagtgttagtgagaggtgcaaagaattattctaacagacacctgaaagtatctgtaagcaatactagtaggtaagatttcactgtgtgtacacatacacatttgagattgtatgagaacatataatccatatgatatgttgtacattttatggaaatgtaatagaatctcacacattattttatagaaatagagtacagaagcatcacaagtattaaagttggttttagcaaggattaggattactacaattatttttactataataattatttttcttctatggaactcagaatcctggctacatttgaggacaggaatatgttgagcctgattttcctggtgtgtgtaaaatatttcctaggaataaattaggcactttttagaagcaatgttaaatcattcaggttttattttctgccctgaagcagaaatttaaaaaatgatattgggacctggaaggtttaatatggttcacagtgcctgaattacacctgctccgaaaactagctttgtatttcttatgactttgcataagaactgttcatctttggatcttgagcaccttacagataaaactttttatggcatctctttcatggacagtgatattgatcttttcacaatgtacgtagcctctagaattttgtacatatgtttgctctttttttgtacagactagttgttgagaaaacaggggcgtttcctaatttggtctttatcctgcgacaacactttcagcagactagcctctccttatctcacagatcacaagcacccctagatagtgtgattctgtcagatagcatttatgcaaaaatctatgaagttaaaagatcgtagaagccaaatgaaatgtacatatctactgactgatgacaagggaatttcattaggaagaaggtaaagaaacatcgttgagtagcctaccttgatttctgtcaagttcataaccagcttcatattttaaaggcttcaggtttgaaattaagtcaactgcatgcagctttgctgataaatgaataattctctttgatgccatttatgagaaaagacttcaatatctgttgcctgtcatatttaagaaaaattactgtttctactctctgtatctgattttaaaagaaaaaactattcatacctggcttccaggtaattgactttgaattcttacaagcaaaggtcattgtgtttttcttgaatagacatctaataaattttgcttggaagtatacttcagtttttcttcttgacatttatctttataaaaattgtgtattttattccaacttgttaaactaagagaaaatgca

SEQ ID NO: 3128 - DNA, 884 bp, Homo sapiens
  source 1..884: mol_type = genomic DNA
atcttgagtgagggcacgctctccttagaggggcggaacagtttttggcaccttatcgcgagcggcagcttatgcaagagtgacttaaaaaagaaaggcaggtccggagccaggggctaagtagcggtgcggtttctttttctggattagtttccccatcttgcctaaaaatgtcctagtctagtctttttagcagaactccactccctaaacatgtcagaactacacttcccatcaagggtcagaaagaaacttccggcacagtcttttcccagcattccttgtttacttccgggtttattactactgaaggaagaacgccagatcagaaaagggagctcaggtaccttccagagagtgagacccagcgcccttgtctcgcacccagtaggctttcatccccgccatggcggagctgatccagaagaagctacagggagaagtggagaaatatcaacagctacagaaggacttaagtaaatccatgtcggggaggcagaaacttgaagcacaactaacagaaaataatatcgtgaaagaggaactggccctgctggatgggtccaacgtggtctttaaacttctgggtccggtgctagtcaaacaggagctgggggaggctcgggccacagtagggaagaggctggactatatcacagctgaaattaagcgatacgaatcccagcttcgggatcttgagcggcagtcagagcaacagagggagacccttgctcagctgcagcaggagttccagcgggcccaggcagcaaaggcaggggctcctggcaaggcctgaccccatggtggggggaggggaggggaggggagggaatgaggcagctctaggatctatactgtagctaataaaatgtaaaaacacctgg

SEQ ID NO: 3129 - DNA, 694 bp, Homo sapiens
  source 1..694: mol_type = genomic DNA
ccgttcccaagctggtttgaaactaggggtcgggctcggccgtcgtcgttgtttgtcgccgcatccccgcttccgggttaggccgttcctgcccgccccctcctctcctcccttcggacccatagatctcaggctcggctccccgcccgccgcagcccactgttgacccggcccgtactgcggccccgtggccaccatgtccctgcacggcaaacggaaggagatctacaagtatgaagcgccctggacagtctacgcgatgaactggagtgtgcggcccgataagcgctttcgcttggcgctgggcagcttcgtggaggagtacaacaacaaggttcagcttgttggtttagatgaggagagttcagagtttatttgcagaaacacctttgaccacccataccccaccacaaagctcatgtggatccctgacacaaaaggcgtctatccagacctactggcaacaagcggtgactatctccgtgtgtggagggttggtgaaacagagaccaggctggagtgtttgctaaacaataataagaactctgatttctgtgctcccctgacctcctttgactggaatgaggtggatccttatcttttaggtacctcaagcattgatacgacatgctgtttccagtggccagtatgtctttcattgctttgcacccactgttaccagaagctgctctag

SEQ ID NO: 3130 - DNA, 1284 bp, Homo sapiens
  source 1..1284: mol_type = genomic DNA
cggtaccacagcttctcgtccgcgtcgagattacagccacggccttcaggagtgaccatagacgaatcctttctcacagaagacaagagcacccagaatcgcaagcttcttcagaaacgaaggacgctggtgaccaaactgaggaagaacttggctgaggagtacctgcactacctcagtgagcgagatgcctgtaagatcctcatcgcagacctgaatgagctgcggtaccagcgggaggacatgtcattagcccagtcgccaggcatctggggggaggaccctgtgaagttaaccctggctcttaagatgacccggcaagacctgacccgcacgcagatggaactcaacaacatgaaggccaactttggagatgtggtccccaggagggactttgaaatgcaggagaagaccaacaaggatcttcaggagcagctggacaccctgagagccagctacgaggaggttcgcaaggagcatgagatcctcatgcagctgcacatgagcacgctgaaggaacgggaccaattcttctctgagctgcaggagatccagcgcacttccacgccgcggcctgactggaccaagtgcaaagatgtggtggctgggggcccagagcgctggcagatgctggctgagggcaagaacagcgaccagctggtggacgtgctcctggaagagattggttcggggctgctgcgggagaaagacttcttccctggtctgggctatggggaagccatccctgcttttcttcggtttgatggcctcgtggagaacaagaagccaagcaagaaggacgtggtcaacctcctcaaggatgcctggaaggaacgtcttgctgaggagcagaaagagacgttcccagatttcttcttcaatttcctggagcatcgctttgggcccagtgatgccatggcctgggcttatactatttttgaaaatatcaagatcttccactccaacgaggttatgagtcagttctatgcagtcttgatgggaaagcggagtgagaatgtgtatgtcacccagaaggagacagtagcccagctgctgaaggagatgacaaatgctgacagtcagaacgaggggctactaaccatggagcagttcaacactgtcctcaagagtaccttccctctcaagacagaagagcaaatccaggagctgatggaggcagggggctggcatcccagcagcagcaatgcagacttgctcaactaccgctcactgtttatggaggatgaggagggccagagtgagccctttgtgcaaaaactctgg

SEQ ID NO: 3131 - DNA, 268 bp, Homo sapiens
  source 1..268: mol_type = genomic DNA
cggctgcgcgagcggagggaggcggagcgggatgagtgggtgttccggcagggatgtggtcattgacggccagtgagggcgagagtaccacggcccacttcttccttggagctggagatgaggggctgggcacccgtggaataggcatgaggccagaagagagtgacagcgagctccttgaggatgaggaggatgaagtgcctcctgaacctcagatcattgttggcatctgtgccatgaccaagaaatccaagtccaagccaatgac

SEQ ID NO: 3132 - DNA, 2060 bp, Homo sapiens
  source 1..2060: mol_type = genomic DNA
gcacagctgcccgccggaagaaccgagcttggctgtgtttatctcgttggggactaaggcgtcggttggcgcgcaacgggttctaggctgcaggcagctcgaggacccgcggccccgccccggctcggcctggcagtcctggcagcataccaggcacagctgtcaaaggaactccttgtgcctgtggggggccctgggtgaccccaatgacaacaactcagcttgacaggagctccctgtgaggggctaaccaaccgcggtaacatggaggtccctgtcctggatcaatagcagaggcagcaggccgtgccgggggggcatgttgctgtaaccagtggcccaggggatgttacggtggacagtgcacctggagggcgggccccgcagggtgaaccatgctgcagtggctgtcgggcatcgggtatactccttcgggggttactgctctggtgaagactatgagacactgcgtcagatagatgtgcacattttcaatgcagtgtccttgcgttggacaaagctgcccccggtgaagtctgccatccgtgggcaagctcctgtggtaccctacatgcgctatggacactcaaccgtcctcatcgacgacacagtcctcctttggggcgggcggaatgacaccgaaggggcctgcaatgtgctctatgcctttgacgtcaatacgcacaagtggttcacaccccgagtgtcagggacagttcctggggcccgggatggacattcagcctgtgtcctaggcaagatcatgtacatttttgggggctacgagcagcaggcggactgtttttccaatgacattcacaagctagataccagcaccatgacatggactcttatctgtacaaagggcagccctgcacgctggagggacttccactcagccacaatgctgggaagtcacatgtatgtctttgggggccgtgccgaccgctttgggccattccattccaacaatgagatttactgcaaccgcattcgagtctttgacaccagaactgaggcttggctggactgtcccccgactccagtgctgcctgaggggcgccggagccactcggcctttggctacaatggggagctgtacatctttggtggttataatgcaaggctgaaccggcacttccatgacctctggaagtttaatcctgtgtcctttacctggaaaaagattgaaccgaaggggaaggggccatgtccccgccggcgccagtgctgctgtattgttggtgacaagattgtcctctttgggggtaccagtccatctcctgaggaaggcctgggagatgaatttgaccttatagatcattctgacttacacattttggactttagccctagtctgaagactctgtgcaaactggccgtgattcagtataacctagaccagtcctgtttgcctcatgatatcaggtgggagctgaatgccatgaccaccaacagcaatatcagtcgccccatcgtctcctcccatgggtaggaggaagtttctgccacctcccctcctgagcctgctgtcatcttcactgcccctgcccatctgtcacccacctgctcctttgacccctggacttggtatacctccatgtggagttgttgggcgagaggtgttctctgtgctgtgaattcagtggggagctgtagcggggtgggggctaggttcctccccccttgggccgagggccccttccccttggtgctctgtccccatccacctcctttcagctgctcctgggcctcagctctgcccagggccagccaggttctgctgggaagggaagggaatggggagaagggagaagcaagcagtgtctgagcctcaggagcttccccctccccctttgcctatcccctcccctctgcttgagccttgagccttgactgggagctgaaaggagttgcagctgttggcatgagacctccttctccccgtcttggggaggtggggaccagcagataaatcccacccttccttgagctgtcgctgtactctgaagttcagccagctcagattttataaaaattaattaaaatctccaaacgtg

SEQ ID NO: 3133 - DNA, 3448 bp, Homo sapiens
  source 1..3448: mol_type = genomic DNA
ggccgggattcgcggcccggagctcgggaccggagtcaggaatggagagaagggtaatggttttacctcttattgtggaaacctgttgagatcacagagaatatactgacggcataaaagggcagaaccatagcagggtgcggttgcttcattccagcctcgcagtcacctctgtgccctgctggttgtcttcccagcgctgctgtagttgccttccatggatctataggagagcaagtcctccaggagctggtggtgtctgtcgattgactgagtgctggagctggcagccctgtgcaggctgccacctttgcccctttactgtgcttgctcctgactctatgtcgcgtctccaaggagaagaagtcctcaccagtgaacggagacctctctgaactaaggataccatggccacgtcagccccactacggagcctggaagaggaggtgacctgctccatctgtcttgattacctgcgggaccctgtgaccattgactgtggccacgtcttctgccgcagctgcaccacagacgtccgccccatctcagggagccgccccgtctgcccactctgcaagaagccttttaagaaggagaacatccgacccgtgtggcaactggccagcctggtggagaacattgagcggctgaaggtggacaagggcaggcagccgggagaggtgacccgggagcagcaggatgcaaagttgtgcgagcgacaccgagagaagctgcactactactgtgaggacgacgggaagctgctgtgcgtgatgtgccgggagtcccgggagcacaggccccacacggccgtcctcatggagaaggccgcccagccccacagggaaaaaatcctgaaccacctgagtaccctaaggagggacagagacaaaattcagggcttccaggcaaagggagaagctgatatcctggccgcgctgaagaagctccaggaccagaggcagtacattgtggctgagtttgagcagggtcatcagttcctgagggagcgggaggaacacctgctggaacagctggcgaagctggagcaggagctcacggagggcagggagaagttcaagagccggggcgtcggggagcttgcccggctggccctggtcatctccgaactggagggcaaggcgcagcagccagctgcagagctcatgcaggacacgagagacttcctaaacaggtatccacggaagaagttctgggttgggaaacccattgctcgagtggttaaaaaaaagaccggagaattctcagataaactcctctctctgcaacgaggcctgagggaattccaggggaagctgctgagagacttggaatataagacagtgagcgtcaccctggacccacagtcggccagtgggtacctgcagctgtcagaggactggaagtgcgtgacctacaccagcctgtacaagagtgcctacctgcacccccagcagtttgactgtgagcctggggtgctgggcagcaagggcttcacctggggcaaggtctactgggaagtggaagtggagagggagggctggtctgaggatgaagaagagggggatgaggaggaagagggagaagaggaggaggaggaagaggaggccggctatggggatggatatgacgactgggaaacggacgaagatgaggaatcgttgggcgatgaagaggaagaagaggaggaggaagaggaggaagttctggaaagctgcatggtgggggtggctagagactctgtgaagaggaagggagacctctccctgcggccagaggatggcgtgtgggcgctgcgcctctcctcctccggcatctgggccaacaccagccccgaggctgagcttttcccagcactgcggccccggagagtgggcatcgccctggattatgaagggggcaccgtgactttcaccaacgcagagtcacaggaactcatctacaccttcactgccaccttcacccggcgcctggtccccttcctgtggctcaagtggccaggaacacgcctcctgctaagaccctgagccctgacatctgcccccagccccaaccctcagatgcttcacttctttggaattccaggactctcaatggggggacgggatgcctggcctaagcacctggagcaggggaccccatatccactggtagccacctccccattgctgtggccccctgaaatctcactcagtgctgttgctccatctactgccctaatggggctcttttcccacctcctgctggtttcccgagggaacttctgaccctggagtccatgagggctcctttcctttttgaccacgaccttggccccagctctgcactctctggaataagggcccgatgcagcattttcttgcccagtgtggcaagacctcagaaaaaccagtcaattacgcctaagatcattttgctgtccttaaaccccccaggttccttcttgcacaaatccactctgctgcccaccttccctggcattttaaacagacctaccccaccccaactcagagttaagcatacatggcaatgctgaaaataaacaaaatccactgaggcttcccaggccatttaaagcctggagtaccagcgcatatcatctcatggggtccagagtggagtccaggcttctctgaaaccagggctgagcatatttccatagccaaggaggtgggactccctggagctatctgtggtcttagggaaggatccagacatacacggctttggggtacaagctgtgatcactgatcaataaattatctctagattggtccttgtgaggggagttttaagaatccagaacatcttgctcttgatcagcacatccaaaaacaccaagacaaacatccagtggagcagaacctctcctgcctcgggagttctgaccaggttccccagcagggtgttaagcctctgtctctggccctaccagcatccaggttccactttcctaggagagagtggagatgggaagacagggaaaggaaggcagcaggaggccacaagcccaccaggtcttcatgtcaagagagggagtaacatgtcttctcattgcccacggacccaacctctgtccaggtgcccctcatcatcacagtttaacacaagctcccctgctccagccaaattgatctcccagtcttgtccttacccattccaagtgctctgccagcccctgttcatccaagttttaagtcctccaccctgttctaagagactgttccaacggctctgggcctcagtggtcacttgaccaccattgtctcagagctgcccactttgtgtgtgtcacatgctgcctgagtcacacgtacatcttatttctgcctctagttttgtaagctcctggagggcggataacatcttatactactcttgtattctcatggcacctagtgcagtgctgggcacagagtaggtgctcaataaagacttgttgaatgaa

SEQ ID NO: 3134 - DNA, 740 bp, Homo sapiens; identical to SEQ ID NO: 1924
  source 1..740: mol_type = genomic DNA

SEQ ID NO: 3135 - DNA, 1893 bp, Homo sapiens
  source 1..1893: mol_type = genomic DNA
cagggagttgcctgagggaaaaggggcagacgtccctgggttccggtgttcgcggaggagtcgaggcacggagaggcttcgggggagggacggaaagaagggtggcccgccaggcgggcggggtccatggattcggggtgagggccgtccgcggcctcgctttcgcctcctccgagccgggccggcgatggccgcagctgtgaggcgaggtcgggtcccgtagcggcgcgcagcctccttgggggactcggggtcctgcagaagaatagaaggaaggtgataggatgtgatgatagaatttgtgatagccaagcaacaacttttcctaattcggcatgttaaaaaataagggtcactcatctaagaaagataacttggcagtcaatgcagttgctttacaagatcacattttacatgatcttcaacttcgaaatctttcagttgcagatcattctaagacacaagtacaaaagaaagagaacaaatctctaaaaagagatacaaaggcaataatagatactggacttaaaaaaactacacagtgccccaaactagaagactcagaaaaagaatatgttcttgatcccaaaccgccgccgttgactttggcacagaagttgggcctcattgggcctccaccacctccactgtcatcagatgaatgggagaaggtgaaacagcgctctctcctgcaaggggactccgtgcaaccatgccccatctgtaaagaagaattcgagcttcgtcctcaggtgctgctttcatgctcccatgtgttccacaaagcatgtcttcaggcttttgaaaagttcacaaataagaaaacctgtcctctctgtagaaagaaccagtatcaaacccgagtgatacacgatggggcccgcctgttcagaatcaagtgtgtgaccagaatccaagcctactggagaggatgtgttgttagaaagtggtacagaaacctgaggaaaacagtacctcccacagatgccaagttaagaaaaaaattctttgaaaaaaagttcacagaaatcagccaccgcatcctgtgctcatacaacaccaacattgaagagctctttgcagaaatcgatcagtgcttggccataaatcgaagtgttcttcagcagttggaagaaaaatgtggccatgagatcacagaagaggaatgggagaaaatccaagtgcaggctctgcgccgggagacccacgagtgctccatctgcctggcccctctctccgctgctggcggtcagcgcgtgggtgcaggcaggcgttccagagagatggccctcctgtcctgctcacatgtgttccaccatgcgtgtctgctggcactagaggagttctccgtgggagacaggcctcctttccatgcctgtcctctctgccgctcctgctaccagaagaagattcttgaatgttgaattcatagtcaaggaaagttaggtaattctgaggaaaaaagtttaccatcattttggatgaactgcatgagttctgggttaagtactacaatgtaatctgtttcccagggaaataagctattggtagttgtaggaaatcttagtatattttaaaagctgacatcccacctaattttaatctttggtctctaaaaagtaaatttcaaatttatgagtttaatcacttcaaatatgaatagcaaaaaatgagagcttgcttacttctaaaaattgaggttaagatatagctagtgtctgaacgacactccttaaagtaagttccaaatgtaaaacactccttaagttccaaatgttttccgctaatagtctgtcctaaagcctttgccattcctaatactcgttttgtaataattgctgtatttctgtgtaataaaatataaaaataaaatattcagtggtattcaacatc

SEQ ID NO: 3136 - DNA, 1943 bp, Homo sapiens
  source 1..1943: mol_type = genomic DNA
aggtaagaggaaactccattggataaatggcgaggaaacgtatactccctcttaaggaacacggtgtcttccttcgtctccgggttcccgagaccccagagtcactgacctccgtccctcagctttcggggttcggcagcagaaggggcgggcccgggcctgggattggctggcgtcgtccgacccccttcgctgctctccattcgcaatcgcccgcgggcgcctgcgcgatgggtcggccgtggggagcggggcgggaagcgcttcagggcagcggatcccatgtcggccctgaggcgctcgggctacggccccagtgacggtccgtcctacggccgctactacgggcctgggggtggagatgtgccggtacacccacctccacccttatatcctcttcgccctgaacctccccagcctcccatttcctggcgggtgcgcgggggcggcccggcggagaccacctggctgggagaaggcggaggaggcgatggctactatccctcgggaggcgcctggccagagcctggtcgagccggaggaagccaccagagtttgaattcttatacaaatggagcgtatggtccaacataccccccaggccctggggcaaatactgcctcatactcaggggcttattatgcacctggttatactcagaccagttactccacagaagttccaagtacttaccgttcatctggcaacagcccaactccagtctctcgttggatctatccccagcaggactgtcagactgaagcaccccctcttagggggcaggttccaggatatccgccttcacagaaccctggaatgaccctgccccattatccttatggagatggtaatcgtagtgttccacaatcaggaccgactgtacgaccacaagaagatgcgtgggcttctcctggtgcttatggaatgggtggccgttatccctggccttcatcagcgccctcagcaccacccggcaatctctacatgactgaaagtacttcaccatggcctagcagtggctctccccagtcacccccttcacccccagtccagcagcccaaggattcttcatacccctatagccaatcagatcaaagcatgaaccggcacaactttccttgcagtgtccatcagtacgaatcctcggggacagtgaacaatgatgattcagatcttttggattcccaagtccagtatagtgctgagcctcagctgtatggtaatgccaccagtgaccatcccaacaatcaagatcaaagtagcagtcttcctgaagaatgtgtaccttcagatgaaagtactcctccgagtattaaaaaaatcatacatgtgctggagaaggtccagtatcttgaacaagaagtagaagaatttgtaggaaaaaagacagacaaagcatactggcttctggaagaaatgctaaccaaggaacttttggaactggattcagttgaaactgggggccaggactctgtacggcaggccagaaaagaggctgtttgtaagattcaggccatactggaaaaattagaaaaaaaaggattatgaaaggatttagaacaaagtggaagcctgttactaacttgaccaaagaacacttgatttggttaattaccctctttttgaaatgcctgttgatgacaagaagcaatacattccagctttcctttgattttatacttgaaaaactggcaaaggaatggaagaatattttagtcatgagttgttttcagttttcagacgaatgaatgtaataggaaactatggagttaccaatattgccaagtagactcactccttaaaaaatttatggatatctacaagctgcttcttaccagcaggagggaaacacacttcacacaacaggcttatcagaaacctaccagatgaaactggatataatctgagacaaacaggatgtgtttttttaaacatctggatat

SEQ ID NO: 3137 - DNA, 320 bp, Homo sapiens
  source 1..320: mol_type = genomic DNA
acaatctccgggaaggggcagagcagaaggtggtattcatcacaggacgagtccacccaggggaaacaccctcatcatttgtgtgccaagggatcattgacttccttgtaagccagcaccctattgcctgtgtcctccgggaatacctggtcttcaagatcgcaccaatgctcaatcctgatggagtctacctgggcaattacaggtgcttgtcattgatgaggaacggttccagaggcaggccatttttcccaagctcctctgccagaatgctgaggacttctcctattccagcacatcctttaaccgggacgctgtga

SEQ ID NO: 3138 - DNA, 681 bp, Homo sapiens
  source 1..681: mol_type = genomic DNA
tctgatttttgcttgcctggtgcctggtttcccagcagtcatgtcatccaggggcccttgcacactggagacactcatcaatcccagccctagtgtagctgatgtaaagatatatccagaagaaatcactccactcctaccagccatatcaggggagaagattgctgaggaccaaacctgcttttttcttcaaatactgttgaagtatatggttattcaggctgcgagcttggagtggaagaataaggagaatcaagatactggttttaaatttctttttacattgtttcgaaagtattatcttcctcatttatttccatcatttactaagttaacaaacatctacaaacctgtacttgacatcccccatttgagaccaaagcctgtgtacattactaccactcgagacaatgagaacatttacagtacaaagattccatatatggcagctcgtgttgtttttattaagtggattgtaaccttctttttggaaaaaaagtatctaactgcaacacaaaacactaaaaatggagttgatgtattgcctaaaatcatccagactgttggtggtggtgctgtgcaggagagagcgcctgagctggatggtggtgggcccacggagcaggacaaaagccattctaacagcagcaccttgtcggaccgaagactcagcaactccag

SEQ ID NO: 3139 - DNA, 874 bp, Homo sapiens
  source 1..874: mol_type = genomic DNA
acacggtatgggtgtagactggacccgccccctaaatccaggagaccatcaactatggaaaggagatctagggaacaccgtcttgaacccgccaggggttttgagtctcggacccaggagatccaaccctgaccaccctcccaggatgcagcagggggatgttaaatcagacttcaggaagaacttccttgctgcctgagttaggtgtcgtcacgcctgcccaggggccaaggaggcgggtttggtgcggccactccaaggccaaagcgagaaaatcttactgcgcacgcgcaatagacagccgatggagccaccgatggagccgtccggaggggagcaagagcccggagccgtcaggttcctggacctgccctgggaagacgtgctgctcccacacgtcctgaaccgggtcccgctgcgccagctgctccggctgcagcgcgttagccgggccttccggtcgctggtgcagcttcacctggccgggctgcgtcgcttcgatgccgcgcaggtgggtccgcagatcccgcgggccgcattggcccggctgctgcgggatgccgaggggctgcaggagctggcactggcgccgtgtcacgaatggctgtcagacgaggacctggtgccggtgctggcgcggaatccgcagctgcggagtgtggcgttgggcggctgcgggcaactgagtcgccgggcgcttggggctttggccgagggctgcccacgcctgcagcgcctgtcgctcgcgcactgtgactgggtggacgggctggcgctgcgcggcctcgctgatcgctgcccggccctggaggagctggatctcaccgcctgccgccagctcaaggacgaggccatcgtgtacctggcgcagagg

SEQ ID NO: 3140 - DNA, 1015 bp, Homo sapiens
  source 1..1015: mol_type = genomic DNA
gaagaagcaggcagcttgagacaggtggagctggatcaagctgtgaacgtgatttgctggaagctggtcattagtgttgacgatgtgtcacactgtgtaagggaatcgcatggagatgggcattccgaactgttaatggggacatgggactccagttgtctctgatcacttgtgtggattttcctggcgtagaacgacagaagccgctagtaagtcgccaagacctacagcaggaattctgcaccaaagcttaaaaaagtgaggaggaagtaaatgctaaattattcatgagcctcatttgacagcacatcagaaggggaagtgtcaggggttttataaagggcataaaatcttgttattttaatttgcatctgggagaatgtctgagcaaggagacctgaatcaggcaatagcagaggaaggagggactgagcaggagacggccactccagagaacggcattgttaaatcagaaagtctggatgaagaggagaaactggaactgcagaggcggctggaggctcagaatcaagaaagaagaaaatccaagtcaggagcaggaaaaggtaaactgactcgcagccttgctgtctgtgaggaatcttctgccagaccaggaggtgaaagtcttcaggatcagactctctgaaaactgcaaatggaaaggaattcaaaagaatttagattaaaagttaaataaaaagtaggcacagtagtgctgaattttcctcaaaggctctcttttgataaggctgaaccaaatataatcccaagtatcctctctccttccttgttggagatgtcttacctctcagctccccaaaatgcacttgcctataagaaacacaattgctggttcatatgaaacttaggaaatagtgaataaggtgcatttaactttggagaaatacttttatggctttggtggagatttctcaatactgcaaaagttgtccagaaatgaatctgagctgatggtgactttaagttaatattattaatatatcactgcata

SEQ ID NO: 3141 - DNA, 577 bp, Homo sapiens
  source 1..577: mol_type = genomic DNA
aatttttctctgcttgttggacatgaagagagggagacaaaggctctcagaaagagaaagacgggctggtgaaggacaaactaaggaatttgattattcacttttccaagataaagtggcatggagtggggaaagaccattaaggaatgctgaacataaaggaatcctggggacctgaccctcagttaagacataagaatgacaaccaggagtgtgctcgatgttgaaacatttgtagcagatatactgaaaggagaaaatttatccaagaaagcaaaggaaaagagagaatcccttattaagaagataaaagatgtaaagtctatctatcttcaggaatttcaagacaaaggtgatgcagaagatggggaagaatatgatgacccttttgctgggcctccagacactatttcattagcctcagaacgatatgataaagacgatgaagccccctctgatggagcccagtttcctccaattgcagcacaagaccttccttttgttctaaaggctggctaccttgaaaaacgcagaaaagatcacagctttctgggatttgaatggcagaaacggtggt

SEQ ID NO: 3142 - DNA, 834 bp, Homo sapiens
  source 1..834: mol_type = genomic DNA
agatagaatctgcagtgcctgaaatccagcctgctgcttactcacatcctcatactcagctgcagactgcctgacagaagggctgccaaactgcactccagacagacaggtgcacagccaggcctgattcagcaggaagcatctcagacaccaaccactatgctgtcagcagttgcccggggctaccagggctggtttcatccctgtgctaggctttctgtgaggatgagcagcaccgggatagacaggaagggcgtcctggctaaccgggtagccgtggtcacggggtccaccagtgggatcggctttgccatcgcccgacgtctggcccgggacggggcccacgtggtcatcagcagccggaagcagcagaacgtggaccgggccatggccaagctgcagggggaggggctgagtgtggcgggcattgtgtgccacgtggggaaggctgaggaccgggagcagctggtggccaaggccctggagcactgtgggggcgtcgacttcctggtgtgcagcgcaggggtcaaccctctggtagggagcactctggggaccagtgagcagatctgggacaagatcctaagtgtgaacgtgaagtccccagccctgctgctgagccagttgctgccctacatggagaacaggaggggtgctgtcatcctggtctcttccattgcagcttataatccagtagtggcgctgggtgtctacaatgtcagcaagacagcgctgctgggtctcactagaacactggcattggagctggcccccaaggacatccgggtaaactgcgtggttccaggaattatcaaaactgacttcagcaaagtg

SEQ ID NO: 3143 - DNA, 9618 bp, Homo sapiens
  source 1..9618: mol_type = genomic DNA
ggcaacagcaatgacatccgcgtggctggcacaggggacaggcgagggcgtgaacgatgtgcggaagggagcctgtgccagccacgtcagcaccatggccagcttcctgaagggggcccatgtgaccatcaacgcacgggccgaggaggatgtggagcctgagtgcatcatggagaaggtggccaaggcttcaggtgccaactacagctttcacaaggagagtggccgcttccaggacgtgggaccccaggccccagtgggctctgtgtaccagaagaccaatgccgtgtctgagattaaaagggttggtaaagacagcttctgggccaaagcagagaaggaggaggagaaccgtcggctggaggaaaagcggcgggccgaggaggcacagcggcagctggagcaggagcgccgggagcgtgagctgcgtgaggctgcacgccgggagcagcgctatcaggagcagggtggcgaggccagcccccagaggacgtgggagcagcagcaagaagtggtttcaaggaaccgaaatgagcaggagtctgccgtgcacccgagggagattttcaagcagaaggagagggccatgtccaccacctccatctccagtcctcagcctggcaagctgaggagccccttcctgcagaagcagctcacccaaccagagacccactttggcagagagccagctgctgccatctcaaggcccagggcagatctccctgctgaggagccggcgcccagcactcctccatgtctggtgcaggcagaagaggaggctgtgtatgaggaacctccagagcaggagaccttctacgagcagcccccactggtgcagcagcaaggtgctggctctgagcacattgaccaccacattcagggccaggggctcagtgggcaagggctctgtgcccgtgccctgtacgactaccaggcagccgacgacacagagatctcctttgaccccgagaacctcatcacgggcatcgaggtgatcgacgaaggctggtggcgtggctatgggccggatggccattttggcatgttccctgccaactacgtggagctcattgagtgaggctgagggcacatcttgcccttcccctctcagacatggcttccttattgctggaagaggaggcctgggagttgacattcagcactcttccaggaataggacccccagtgaggatgaggcctcagggctccctccggcttggcagactcagcctgtcaccccaaatgcagcaatggcctggtgattcccacacatccttcctgcatcccccgaccctcccagacagcttggctcttgcccctgacaggatactgagccaagccctgcctgtggccaagccctgagtggccactgccaagctgcggggaagggtcctgagcaggggcatctgggaggctctggctgccttctgcatttatttgccttttttctttttctcttgcttctaaggggtggtggccaccactgtttagaatgacccttgggaacagtgaacgtagagaattgtttttagcagagtttgtgaccaaagtcagagtggatcatggtggtttggcagcagggaatttgtcttgttggagcctgctctgtgctccccactccatttctctgtccctctgcctgggctatgggaagtggggatgcagatggccaagctcccaccctgggtattcaaaaacggcagacacaacatgttcctccacgcggctcactcgatgcctgcaggccccagtgtgtgcctcaactgattctgacttcaggaaaagtaacacagagtggccttggcctgttgtcttcccctattttctgtcccagctcatccgtgtctctgaagaacaaatatgcttttggaccacgaattcccagtttggtctacacaggctcgcagctctcacctgtcctgctgtagcctgaatgctcccatgtgggaatagcaccccaccacctgcccagtgtctgcctctgctccgtgtctggggtgagcaccctcaccctgagactgtggctgatgatgatcagccaccaggaagaggctaaatgttaagatgggactgaagttggagccttcctgcgttccagttcctctaggagaggccaagggctgccctgctcccagcttcagggagcctctgcctacatgggatggcccactgtgtggcgtcaggtacctggcacccactgagcatccggggaattaggtccctcctgtgccccagagctgctaggcagactgctaggcggttgactcaaggtgttacctgctagtgcctggggtgaaggctgcatggagcccaaccttgctcctggccttcctgtgctcaggcctctccccttttcgccagggcttcctggtgcctctcccatgaagagggaacttcccctccactcccatggaagacccaggtttgggctgttgccagctttgaggccccctgtgggcttgcctgtcccaacccaagaggcagggctcaaagtgccacccgggggttgcaaggacagcagaggaccacctgccctctgcaggaagctgtccaggaagccgtgtcctgggctgtggtccttgctccccatggggagagctgggtcacttggcctcttctaactggccccaagcacgccaattctggagcatggttactaagtggctctgaagcttcagggtcaccacaggcttgtcctgactgcaaactcatggagtggttgcagccctggctcagtgtcctgatgactaggtgtgggtactaggctcctgcccctggtgacacacgtatggagtgggggagggtgggtggctgcacccctggttctggagtccccacagctgatggcggtgtgagcctggcatgcacggctgcgctggactccaggctgttgggggaggtgcctttattgcccaagcccacccctcacttggccttgccctgggcagccacagcctccatggccttccgcaccgtttcctcatcacccaggaactgcatgggcttggtgggcttcagctccttgttcagctcatacacaatggggatccccgtgggcaggttcagctccatgatcgcctggtctgacatccctatgccggaaggaataggtgtccttagcccctctgtccccagcctgtttacacagcagacactatgtgacctttatggtccacagagccagttcccctggcaccaattccttcccagccctgagaacgaggccacagaaatgttgccaaaggtcaaggagtaactgagttagaccaagcagcctacagaaatagcccagtggtgaaaaaaatggggacttcagccccacccaagtggctgtgatctgtggtggtgctgtccatagttccctcagcccagtgtgactccagccagactgaagttgagggtcaggaagggacactcaccctttgttttttttttttcttttctttttctttttcttttttttgagatggagttttactcctcttgcccaggctggagtgcagtggcacgatcttggctcactgcaacctccatctcctgggttgaagtgattctgcctcagcctcccaagtagctgggattacaggtgagcgccaccacacccggctaattttgtatttttagtagaaacgggttttaccatgttggtcaggctggtctcaaactcctgacctcaggtgatctgcctgcctcagcctcccaaagtgctgggattacaggagtgagccaccgtgcccagcaccctttggtttctaaagtgctctaaattctagacatcctgaacagaggagcaagtgcggaatggagctggaggagggacagggaggccgagcctggtcgaaacctgaccctgcctgcctcctgcagcccctgagctgggaatagcagctcgacctttgatgttcgcgccactccacccctgctccgtgcaggagggtttaagaaaatgttctctggggagtcagagtgaaatccctcatattcaccaccaaaagtgcgtcccctttccccaaaccaggctgtgggagggtcatggggctgcatgaagtctccggaagggagaggaggcaggtggtccttccctctgcctggccccagtgccaggtgccaggtgtccgtgtttggagcgggcaggcttggggctggctgggtctccggggcctgccggtctgggtgctctggccaactgcccaacggccctaggagcaggaggtctggggcacacccttctagcctttccaggactcaacaagctttaaggtcattcagatgctaatttagactgcccttgtgtcagaatactaaggtgggaggcggagcggaggtgccagtcactctgggcgaggccttactgcgcccatgcatcccgggcccatttgtcagcccttgctcttcagtgggagcccagctgcaagcccagagtctggccactccatagtcctgcacccctcttttgattggtctttcctttgcccagagaggggctccagagggagataggtggtgaagctcatgcagggattctgaggacctgatgggggagggccctgcgaggggtccaagcctacatcaagaggaattcagtaccagggggagctccccaccaccccggaaaagggagaggcccagagatggaggtggcttgtccagggccccacagtaagttgggatttggagccagatgctctaagcccagcccttccgtttcctagctgggtgtcccttggcagatgccacctttggagcctgccccacctcgggacacagcgagcttcgagtgcagtcagcccctgtggagtgtgtcccagttacacagaaatggggaaaatttcacaaaactaaaaaatggcttctcagccctcctttttcagtgaatgatgtggagccccacgcctagaaagcctggtccatgggcgagagactttgctgagatgagaagccagctggggctgctgcccacccaccctgcccaggctcctgaaggtggcctcaccttccaggtgcttgacaatgccccgcaggctgttcccgtgggctgcaatgagcactcgcttgccggccttgatctggggaacaatctcctcgttccagaagggcagggcccgggcaatggtgtccttgaggctctcgcaggtggggagttccccgggcttcaggcctgcgtaccgacgctcctgggggacacaggcacgctgctttccctcccaagccagtgggcccccacccgactccccactctgcagcttcccagaggccttcccagcaaaggcagcccaccttgctaatggagttgtagtaggggtgcttctcgtccatcgggggcggcgggatgtcgaaggagcgcctccagatcttcacctgctcctccccgtgcttggcggccgtttctgccttgttgaggcctgtgaggcccccgtaatgccgctcattgaggcgccaagtgcgcaccacaggcagccacatctggtccgtgccgtccaggatggcccagagggtgcggatggcccgcttcagcactgacgtgtagcagatgtcaaactccatcttggcatccttgatggccttggctccccgcttggcctcctcggtccccttttcactcagctctgcatcgaaccagccacagaaacggttctcctggttccatgtgctctcgccgtgccggaccatcacgaggcggtgagtggccatggtggcagcagggaccacagaggactctggacggggacggctgcttcccaacactcccagctttataatagtgtcttcccagcccccacccaccccagccaactgccaatcagcattccaggcggtggcaggtgaccagtagctgagctgctgggggctgggggccaggggagtgtgcaggccaagaggctgtgcttaaaatagccccacgcatccaccagctcctggcctgggttcaggtggcatgtctataaccagctggcacccagagcccagactgagtggggctgctggtcagggatgggcgtgaagggcagaagtctgggccaggggagatggggatagcagggacagaggggctctccagggcaacgctcagtggcctatcagccattctctgctcagacagaggcacaaacaaaatcccaacccctttctcctgtgattggcagccaggctaggaggcggccctcagcaggcagaggaggagagccagaggagctggtgcagaccacagctttgtggagaggagtctggccttgtggaaggtaccaggcagcagcagcagaatgggcaagggctggggctgagccgggtttccaggacaaagggggaaagggcccctgtctttcctccggggtccctttgtcaaggtctcatccatacatgccccatgctcccaccctatctgccctcacccaagccacgctcactctcctagccgaaaccaccttgaaaaagagaaatccaagggggtttgggggcaggactgaggactgtcagaagtcttgattgttaggtaaatgctcagcttagcaggaacccacaacgtaggctgaagggtggcacggagttgagtctaggaccaagacttctgcattcaggtttgggggatgagagccaccaaggcagggaagagactatgagcaataaagtcacaattggggccctaatgaaggggccatggccagacccttgggcatgggccccatccagggcctcccatttcctcccaccccagtgaccacactgtcacctgcgacacttctgataacaggagcgggtaggtgagaggccagcagagggaccaccactctgagacttggatctgagtgtgcaagaaaccctcgacaggcctccctccatccctgctggcctacctggggaggggctcctggcttggggcctgtgaagctaaggctctgtacccaaaggttggcagacaagtcccagtgggcaaagtcctgtcggctgccaggacccccaaggctggcaggtggaacccatccctcctagcagtgccatgcgcaggtctcactgttccacactgatcctgattgaagccacatctcctcatctgcttttgtccctttgaccaagagttgattcactagcccaactaaacatgactgaggaccaggctctggcagtcccacaggggccagacatgaagcccatatttcagtggaggagggatcgtaccagcagctaaacatgcctaccgtagatagcaccagatgctaggaaggaaggaccataatgtactgggagagatgggaaaggagaggccggggacagccctgaggtgacatgtgagtggaaagagcggagtgcaaaggcctcagctatgatgagtcctacagggagagcaattcaggtagaggggttggcaaagacccaagccctacagaaagcaaacaagctggggcagcgaccatcaggggcacatggcagagaggtgggctttgtgtcccaacacagtgggaatcactggagactttgaagcatggtcatattttcaagtcacttgcagctgtgtaggagtggaagtagaagctgagtaccctgcaggtctcggcagctttgatgagaacaaggccgcttagccagggctgggtgcagaagcagtggcaaggatcccccagacctgggagacctcactgccaaccaagcaggaggtgtcaaaaaggaaaggggagcccaaagaagggctggacttcggggaagcaagcccctgcttctgacccttggctccggcttgactttcctttgattcatttgacaagtagttgctggcctctgcagtgtgccagagctttcttggaggggtacaggggtaggaaaaccaaaagccaccctcagggcctccatccaggaaggcatagcatggtgggcggcgaggaaggctgctgagtcaacaaggtggtcccaggaaggtggagggagcatcttcccatgtctctcccactgacagccaccaatcctggacagatgcaggagcagctgtcagtagacagataagaaaaggagatcagattcaaagttccgcagagaagtggtgaggtaacaagtattgcctagcctggacacacaggcggcttgaaacctcaagtgcaccaacagaaagagctccaggaagaatcagaggagtgggatgtgaagcccctcgaagtcagtgagttgggggaatccctccaatttttcttttcttctctaccccagctcctgggcagtaacatggaggtggcagtggtggcacagtgacggtagtgtgagctgggtacgcacttgaaacctgagagggtaacgctaccctctgtctagaggagccatggccccaaaagcatggggcaaccaccttctgcagctcctttctgcccccctgcgctgggccctggatgcagtttcagggagtatgcagcagggtaggtagggaaagagccccagatttgtggctggaggtcttggtagggatgttgcagggagctgttgtgtttcagggagagtacagagaagggagagatgaagtgagtgatccgataaagtgatatgtgaagtcattggcttgctgccaagctgcgcacagggctgaccctagatgcacattgcaggtcccagactgaccggtgtagatacaggactaatatgactagtagtgcaaacactttaaacagtcaacattctgcttaggatttaaacaaggtccagagtctcaacataatatttaaaatatccaggttatccaaaataacccagtgtatgaaaaccaggaaaatcttaacatgggagaaaagaagatgatcaatacatgcccatcctgagatgattcaactattggaatgatcagatacagacttcaaagcagctatttataaccagccttcagaaagtattggtgaatattcttaaacagaatggaaatgacaaagcatggagtccataaattagatgatagtttggaaaaagatataaacttacaaaccaagaagctcagtgaaccacacaactggataaattaacaacaaaagtccaagcttagacacatcataaagaaacttctgaaaactaaagaccaagaaaaataagatcagccagagaaaaacgatacatttcattcaggtgaacaattctttgaaagactggatcttcaccagaaactatagaggccagaaagaagtggaacatttttagttttgaaataactgtcacccaagaattctatatccagtaaaaatttctattttactggaataaaagaatgaaataaagacattctcaaatgaaggcaagctgaggaaattcataaccaaagaatctgctttaaaaaaatgttaaaccaagttcttcagacagaagagattactgggggcaattcaaaactttgggaatgcaggaagaacatcataaatggcaaaagtccacataaatatgaaactattctttacttctttaagagttatgtgatggttgaattaagtcatgatactgtctgatggaggcttcagtgtatacagatgtaagacaactagaacatgaggggagaagggtgaagggacctagatggtagtgaggtttctacatgctacttgaaatggcaaaacattaatctaaattgactgtaagagtatgtgtatttggccgggcagg

SEQ ID NO: 3144 - DNA, 1476 bp, Homo sapiens; identical to SEQ ID NO: 1945
  source 1..1476: mol_type = genomic DNA

SEQ ID NO: 3145 - DNA, 2892 bp, Homo sapiens
  source 1..2892: mol_type = genomic DNA
tttgttcgcctctcttcggccctctactcaagagctccgtctccgtctcgccctcctcgaagtcctcgtcgcgcgcccgcgacccaggtcgccctgaaatctagcccgtccgagcgcgagtccaacgccgcggccgcaccaaggccccctcagaccgtgccatgggtgacagtgatgacgagtacgatcgaaggcgcagggacaagttcagaagagagcgcagcgactacgaccgttcccgcgagagagatgaaagacgtcgaggggacgattggaatgacagagagtgggaccgtggccgtgagcgccgtagtcggggtgaatatcgggactatgaccggaatcggcgagagcgcttctcgccacctcgccacgaactcagcccgccacagaagcgcatgaggagagactgggatgagcacagctctgacccataccacagtggctatgagatgccctatgctggggggggtgggggcccaacttatggcccccctcagccctggggccaccctgacgtccacatcatgcagcaccatgtcctgcctatccaggccaggctgggcagcattgcagagattgacctgggtgtgccgccgcccgtgatgaagaccttcaaggagtttctcctctccctggatgactcggtggatgagacggaggccgtcaagcgctataatgactacaagctggatttccggaggcaacagatgcaggatttcttcctggcgcacaaagatgaggagtggtttcggtctaagtaccacccagatgaggtggggaagcgtcggcaggaggcccggggggccctgcaaaaccgactgagggtcttcctgtccctcatggagactggctggtttgataaccttctcctggacatagacaaagctgatgccattgtcaagatgctggatgcagccgtgattaagatggaaggaggcacggagaatgatcttcgcatcctggagcaggaggaggaggaggagcaggcaggaaagcctggggagcccagcaagaaagaagaaggacgggctggagcaggcctaggggacggggagcgcaaaaccaacgacaaggatgagaagaaggaagacggcaagcaggctgagaatgacagttctaatgatgacaaaacaaagaagtcggagggtgatggggacaaggaagagaagaaagaagactccgagaaggaagccaaaaagagtagcaagaagcggaaccggaagcacagtggtgacgacagctttgacgagggcagcgtgtcagagtctgagtcggagtcagagagcggccaggctgaggaggagaaggaggaggccgaagcgctcaaggagaaggagaagcccaaggaagaagaatgggagaagcccaaggacgccgcggggctggagtgcaagccgcggccgctgcataagacctgctccctcttcatgcgcaacatcgcgcccaacatctcccgggccgagatcatctccctttgtaaaaggtacccaggctttatgcgggtggcgctctcagagccccagccagagaggaggtttttccgtcgtggctgggtgaccttcgaccgcagtgttaacattaaagagatctgttggaacctgcagaacatccgtctccgggagtgtgagctgagccctggtgtgaacagggacctgacccggcgcgttcgcaacatcaacggcatcacccagcacaagcagattgtgcgcaacgacatcaagctggcggccaagctgatccacacgctggatgacaggacacagctttgggcctcagaaccagggacgcctcccctgcccacgagcctgccctcgcaaaacccgatcttgaagaatatcaccgactacctgatcgaggaagtaagcgccgaggaggaggagctgctggggagcagcgggggcgctcctcctgaggagcctcctaaggaagggaacccggcagagatcaacgtggagcgggatgagaagttgattaaggtcttggacaagctcctcctttacctgcgcatcgtgcattccttggattattacaacacctgtgagtaccccaacgaggacgagatgcccaatcgctgtgggatcatccacgttcgggggcccatgccacccaaccgcatcagtcacggggaagtgctggagtggcagaagacttttgaggagaagctcacgccgttgctgagtgtgcgggagtcactctcagaggaagaggcccagaagatggggcgcaaagacccagagcaggaagtggagaagttcgtcacctccaacacgcaggaactgggcaaggataagtggctgtgtcctctcagtggcaagaaattcaagggtcctgagtttgtgcgcaaacatatcttcaacaagcatgcagagaaaattgaggaagtgaaaaaggaagtcgcgttttttaacaacttcctcactgatgctaagcgcccagctctgcctgagatcaagccagcccagccacctggccccgcccagagtttgaccccaggactcccctacccacaccagactccccagggcctgatgccctatggtcagccccggcccccgatcttgggctatggagctggtgctgtccgccctgcagtccccacaggaggccctccatacccccatgccccgtatggtgctggtcgagggaactatgatgccttccgaggccagggaggttatcctgggaaacctcgcaacaggatggttcgtggagacccaagggccattgtggaatatcgggacctggatgccccagacgatgttgatttcttttgagccgtcccccgttcctcagtcctgtatcatccatacttgtactaccttgtcctatgaagctctgagaattttttgtacgatcagccttactgctaataaaagcacttccacaggg

SEQ ID NO: 3146 - DNA, 3626 bp, Homo sapiens
  source 1..3626: mol_type = genomic DNA
acggcgcgagtccgagggcgacagcagcgcgcaggcgcacgtcagtccccgcgcttttcggaggctgccagcgtcccacaccagccgcaggtgaaaaccggcagaaagacattaagagattttcctgcagtcactgctggcagatgatagagccaggatttgaaagcaggcagcctggctccagaccctgtgctcttaactcccgttttgcatcaagaacagaatcctatgaaaggcttgcacagtgcttggtactgagtaggcactccgtcagtattttagtagctattattccaaaggacactgtattctaggtactaagacaatgtgaatggaatggaaaacaattcctccctgcagaagccaactgtctaggaagacagataatgacattattaaaataatcagaacattggcaaaataaagaagattgaaatgcagttcatatgacagtgctaattaatcatactttttagatctaggaaaggccataaaggttaaattgacttggaaatggtaaacaagacaatggttgtgtcactgatcggtgatggccagtttttggttatccttatttgccatttaaatgattgaattgaaaggaagaagtaagacttggaagatgaatattgaaggaaaggtgaagatggaaaagagaagggggtttattctgagaacagtgactagaactctgaggatagcagcatcaaggagcattgtgtacatgcagaagtgcacagtacctggagtgaaactgcttgtgttcgatttctgataccattcataactggctgtgtgatctcaaaacctctaaaatgcagacctccagctctagatctgtgcacctgagtgaatggcagaagaattacttcgcaattacatctggcatatgtaccggaccgaaggcagatgcataccgtgcacagatattacgcattcagtatgcatgggcaaactctgagatttcccaggtctgtgctaccaaactgttcaaaaaatatgcagagaaatattctgcaattattgattctgacaatgttgaatctgggttgaataattatgcagaaaacattttaactttggcaggatctcaacaaacagatagtgacaagtggcagtctggattgtcaataaataatgttttcaaaatgagtagtgtacagaagatgatgcaagctggcaaaaaattcaaagactctctgttggaacctgctcttgcatcagtggtaatccataaggaggccactgtctttgatcttcctaaatttagtgtttgtggtagttctcaagagagtgactcattacctaactcagctcatgatcgagaccggacccaagacttcccggagagcaatcgtttgaaactccttcagaatgcccagccacctatggtgactaacactgctaggacttgtcctacattctcagcacctgtaggtgagtcagctactgcaaaattccatgtcacaccattgtttggaaatgtcaaaaaggaaaatcacagctctgcaaaagaaaacataggacttaatgtgttcttatctaaccagtcttgttttcctgctgcctgtgaaaatccacagaggaagtctttttatggttctggcaccattgatgcactttccaatccaatactgaataaggcttgtagtaaaacagaagataatggcccaaaggaggatagcagcctgcctacatttaaaactgcaaaagaacaattatgggtagatcagcaaaaaaagtaccaccaacctcagcgtgcatcagggtcttcatatggtggtgtaaaaaagtctctaggagctagtagatcccgagggatacttggaaagtttgttcctcctatacccaagcaagatgggggagagcagaatggaggaatgcaatgtaagccttatggggcaggacctacagaaccagcacatccagttgatgagcgtctgaagaacttggagccaaagatgattgaacttattatgaatgagattatggatcatggacctccagtaaattgggaagatattgcaggagtagaatttgctaaagccaccataaaggaaatagttgtgtggcccatgttgaggccagacatctttactggtttaaggggaccccctaaaggaattttgctctttggtcctcctgggactggtaaaactctaattggcaagtgcattgctagtcagtctggggcaacattctttagcatctctgcttcatccttaacttctaaatgggtaggtgagggggagaaaatggtccgtgcattgtttgctgttgcaaggtgtcagcaaccagctgtgatatttattgacgaaattgattccttgttatctcaacggggagatggtgagcatgaatcttctagaaggataaaaacagaatttttagttcaattagatggagcaacaacatcttctgaagatcgtatcctagtggtgggagcaacaaatcggccacaagaaattgatgaggctgcccggagaagattggtgaaaaggctttatattcccctcccagaagcttcagccaggaaacagatagtaattaatctaatgtccaaagagcagtgttgcctcagtgaagaagaaattgaacagattgtacagcagtctgatgcgttttcaggagcagacatgacacagctttgcagggaggcttctcttggtcctattcgcagtttacaaactgctgacattgctaccataacaccggatcaagttcgacccatagcttacattgattttgaaaatgcttttagaactgtgcgacctagtgtttctccaaaagatttagagctttatgaaaactggaacaaaacttttggttgtggaaagtaagtgggatacttggaatcaaggcatctctgtagtacagtcttctttattttttagcatagaaagttggggatgtgttaattgtatttttaagaatatattctaagttctgtacttcaaataatagcacagattttacatctgattgacatagtgtatgttaatgtaagttttgctttccagtgattacctgatacgtaagcctatttgaacaaagtgagaatgaacttttgtttctaagaagtctttatcttgaagctatataacatgaaaagtgagctcaaattttttttagttgaagattacatataaagttgtgtctgattaatattcatcttttattgaagaaagtgccttctgatggccacataattcttaatgtcagctagtataatggtttacatttggacaaagtattgcttagtgttatttaagtagatttaagatctcaaagctaaagtgccaatttttactttcttcagccaatttgttacctcttttatggtttttaatttttatcaggactaacattttcagaaatagcaaggtgtgatctagtattagattcacagaactgaaaggttaattaagaatgttggttattttcacgggagcgtgtgatatttaacattaatattttatttgacactacagcctgtaatactgctctctttcaaaaacaagttttcagatttttataacagacccattttgttttatgaaacatgttcattacagaaacatgagaaaatagagataagtaaaaagaataaaagtcactattatcct

SEQ ID NO: 3147 - DNA, 1644 bp, Homo sapiens
  source 1..1644: mol_type = genomic DNA
tcacttcctcccgaagacgctgtttcctagcaaccgccctccgcctctgttattagcccctcctcctcgctcggtccaggaccggctctgcgggcgccgccaggcccagaccaagctactatcagaagttgaattctaataattagctattttataaaggtaacgagaaaaaatacactatgtctgatgaagtttttagcaccactttggcatatacaaagagtccaaaagttaccaaaagaactactttccaggatgagctaataagagcaattacagctcgctcagccagacaaaggagttctgaatactcagatgactttgacagtgatgagattgtttctttaggtgatttttctgacacttcagcagatgaaaattcagttaataaaaaaatgaatgactttcatatatcagatgatgaagaaaagaatccttcaaaactattgtttttgaaaaccaataaatcaaacggtaacataaccaaagatgagccagtgtgtgccatcaaaaatgaagaggaaatggcacctgatgggtgtgaagacattgttgtaaaatctttctctgaatctcaaaataaggatgaggaatttgaaaaagacaaaataaaaatgaaacctaaacccagaattctttcaattaaaagcacatcttcagaaaacaacagccttgacacagatgatcactttaaaccatcacctcggccaaggagtatgttgaaaaagaaaagtcacatggaggagaaggatggactagaagataaagaaactgccctcagtgaagaattggagttacattctgcaccttcttcccttccaacgccgaatggcatacaattagaagctgagaaaaaagcattctctgaaaaccttgatcctgaggattcatgcttaacaagtctagcatcatcatcacttaaacaaattcttggagattctttttcaccaggatctgagggaaacgcatctggaaaagatccaaatgaagaaatcactgaaaaccataattccttgaaatcagatgaaaataaagagaattcattttcagcagaccatgtgactactgcagttgagaaatccaaggaaagtcaagtgactgctgatgaccttgaagaagaaaaggcaaaagcggaactgattatggatgatgacagaacagttgatccactactatctaaatctcagagtatcttaatatctaccagtgcaacagcatcttcaaagaaaacaattgaagatagaaatataaagaataaaaagtcaacaaataatagagcatccagtgcatctgccagattaatgacctctgagtttttgaagaaatctagttctaaaaggagaactccatcgacaactacctcttctcactatttagggactttaaaagtcttggaccaaaaaccttcacagaaacagagcatagaacctgatagagcagataacataagggcagctgtttatcaggagtggttagaaaagaaaaatgtgtatttacatgaaatgcacagaataaaaagaattgaaagtgaaaacttaaggatccaaaatgaacagaaaaaagctgctaaaagagaagaagcattagcatcatttgaggcctggaaggctatgaaagaaaaggaagcaaagaaaatagctgcca

SEQ ID NO: 3148 - DNA, 926 bp, Homo sapiens
  source 1..926: mol_type = genomic DNA
ccgcgatggtgagagagccgggcccccggccagggacccccggctgttcggcctcagggcagtggactgccactctccgcccctacctgagtgccgtgcgggccacattgcaggctgccctctgcctggagaacttctcctcccaggttgtggaacgacacaacaagccggaagtggaagtcaggagtagcaaagagctcctgttacaacctgtgaccatcagcaggaatgagaaggaaaaggttctgattgagggctccatcaactctgtccgggtcagcattgctgtgaaacaggctgatgagatcgagaagattttgtgccacaagttcatgcgcttcatgatgatgcgagcagagaacttctttatccttcgaaggaagcctgtggaggggtatgatatcagctttctgatcaccaacttccacacagagcagatgtacaaacacaagttggtggactttgtgatccacttcatggaggagattgacaaggagatcagtgagatgaagctgtcagtcaatgcccgtgcccgcattgtggctgaagagttccttaagaatttttaaaccatctggctggatctcgtggccttccccctcagactacccatgtctccacgaaggcgtcctggagtcactccccgagcagcgcggcggcggcagggagttgggttggggtgggcatttgatgcgggaggtgggtggtgtgcttgctagctgggcaagaaagcagcagtggacctgccccaaggccacacgtgcctggtcaggctggcttctgatgttcagtcccctgggccgggacagattttttttaacgtcttgaaacttaaactctgtgcttgtaggatactgtaacctttttgtctttttttttttttttttttttaaacctccacctccagtggctgtgactggtcccag

SEQ ID NO: 3149 - DNA, 2084 bp, Homo sapiens
  source 1..2084: mol_type = genomic DNA
ctagcttggcctcttccctaagaaataaagaaggcactttggggtccaaggtagggtacttagatgtggaagcaaggggccccggggaggggcggggaggcggcggagagagcccgccgctgcagccgcccccgcctgcccccgtgctcctgtacgaccagggcgggggccggcgccggcgcggggaggccgaggccgaggccgaggagtgggaggccgagtcggtgctgggcaccctgctgcagaagctgcgagaggaaggctacctggcctactacctccagggaggcttcagcagattccaggccgagtgccctcacctgtgtgagaccagccttgctggccgtgccggctccagcatggcgccggtgcccggtccagtgcccgtggtggggttgggcagcctgtgcctgggctccgactgctctgatgcggaatccgaggctgaccgcgactccatgagctgtggcctggattcggagggtgccacacccccaccagtggggctgcgggcatccttccctgtccagatcctgcccaacctctatctgggcagtgcccgggattccgccaatttggagagcctggccaaactgggcatccgctacatcctcaatgtcacccccaacctcccaaacttcttcgagaagaatggtgactttcactacaagcagatccccatctccgaccactggagccagaacctgtcgcggttctttccggaggccattgagttcattgatgaggccttgtcccagaactgcggggtgctcgtccactgcttggcgggggtcagccgttctgtcaccgtcactgtggcctacctcatgcagaagctccacctctctctcaacgatgcctatgacctggtcaagaggaagaagtctaacatctcccccaacttcaacttcatggggcagttgctggactttgagcgcagcttgcggctggaggagcgccactcgcaggagcagggcagtggggggcaggcatctgcggcctccaacccgccctccttcttcaccacccccaccagtgatggcgccttcgagctggcccccacctagggccccgtggccggcaggccggcccctgccccacccccacccacgggtgtccctgcccactcgtgtggcaagggaggggagggcaggagggctcggcctgagcagggtgctggggggagagcgcaatacctcacgcgggctgccgtcctaatcaacgtgcctatggcgggaccacgctcggagcctgcctcttctgcgactgttactttttctttgcgggatgggggtgggggttccctctccaggtggttgtccaggcccatgtcccggccctgggtgctcagccagctcggctaggccctgcgcctccctgcgcttcccccttcaggaagggtgtgtgccacctcgttgcactggatcccagtggctgcttgggggagaggcgtttgccatcactggtgttgtcacctccctgtttctccaccaagggcttgggcctctcggggctggggcctcccaggggatggggacccagagtgcagtggccgcccacatccatggcctaggagctactgggcaggttcccggccacacatctggtgggctgttttgttttttttttttcctcttcccccagatgtcttgacgggatcactggggctctttgtgagtgagggtggccaaactaccgccggaggagatggggtctcagagcgagagctgcggagggggaggggaagaagaaggcctcacttttgctgctgcggggcccacacagccgctgctactttggggggtggggaaggggccaagctgcagacacacacagtcattcatttctgtccacacccctgtgggtggcgggtgtgcgtgtgtgtgcttgtgtgtgcgcacgtgtcggcgctcacacacacatgctagcccactgatgcacccagcccagggctggcagtctttgcagcgtggggccgtctcaccctggagcctggagaggatctatgcttgtttgtttttgtaatccatatcatagttgctttctttaattgttccttctgaataaacagtttatttaagata

SEQ ID NO: 3150 - DNA, 162 bp, Homo sapiens
  source 1..162: mol_type = genomic DNA
ctagggaccccgaaatccgaccgcccatgggaagccactcgccagagtcttacctgagtgaaaaatgccatggccttgtttctcatagcaggggattccttaccccatcaccatgtgcacctcagaaactttccaagcgctggacaccttcgaagccagaca

SEQ ID NO: 3151 - DNA, 3250 bp, Homo sapiens
  source 1..3250: mol_type = genomic DNA
gagtcaggaatggagagaagggtaatggttttacctcttattgtggaaacctgttgagatcacagagaatatactgacggcataaaagggcagaaccatagcagggtgcgcgctgctgtagttgccttccatggatctataggagagcaagtcctccaggagaagaagtcctcaccagtgaacggagacctctctgaactaaggataccatggccacgtcagccccactacggagcctggaagaggaggtgacctgctccatctgtcttgattacctgcgggaccctgtgaccattgactgtggccacgtcttctgccgcagctgcaccacagacgtccgccccatctcagggagccgccccgtctgcccactctgcaagaagccttttaagaaggagaacatccgacccgtgtggcaactggccagcctggtggagaacattgagcggctgaaggtggacaagggcaggcagccgggagaggtgacccgggagcagcaggatgcaaagttgtgcgagcgacaccgagagaagctgcactactactgtgaggacgacgggaagctgctgtgcgtgatgtgccgggagtcccgggagcacaggccccacacggccgtcctcatggagaaggccgcccagccccacagggaaaaaatcctgaaccacctgagtaccctaaggagggacagagacaaaattcagggcttccaggcaaagggagaagctgatatcctggccgcgctgaagaagctccaggaccagaggcagtacattgtggctgagtttgagcagggtcatcagttcctgagggagcgggaggaacacctgctggaacagctggcgaagctggagcaggagctcacggagggcagggagaagttcaagagccggggcgtcggggagcttgcccggctggccctggtcatctccgaactggagggcaaggcgcagcagccagctgcagagctcatgcaggacacgagagacttcctaaacaggtatccacggaagaagttctgggttgggaaacccattgctcgagtggttaaaaaaaagaccggagaattctcagataaactcctctctctgcaacgaggcctgagggaattccaggggaagctgctgagagacttggaatataagacagtgagcgtcaccctggacccacagtcggccagtgggtacctgcagctgtcagaggactggaagtgcgtgacctacaccagcctgtacaagagtgcctacctgcacccccagcagtttgactgtgagcctggggtgctaggcagcaagggcttcacctggggcaaggtctactgggaagtggaagtggagagggagggctggtctgaggatgaagaagagggggatgaggaggaagagggagaagaggaggaggaggaagaggaggccggctatggggatggatatgacgactgggaaacggacgaagatgaggaatcgttgggcgatgaagaggaagaagaggaggaggaagaggaggaagttctggaaagctgcatggtgggggtggctagagactctgtgaagaggaagggagacctctccctgcggccagaggatggcgtgtgggcgctgcgcctctcctcctccggcatctgggccaacaccagccccgaggctgagcttttcccagcactgcggccccggagagtgggcatcgccctggattatgaagggggcaccgtgactttcaccaacgcagagtcacaggaactcatctacaccttcactgccaccttcacccggcgcctggtccccttcctgtggctcaagtggccaggaacacgcctcctgctaagaccctgagccctgacatctgcccccagccccaaccctcagatgcttcacttctttggaattccaggactctcaatggggggacgggatgcctggcctaagcacctggagcaggggaccccatatccactggtagccacctccccattgctgtggccccctgaaatctcactcagtgctgttgctccatctactgccctaatggggctcttttcccacctcctgctggtttcccgagggaacttctgaccctggagtccatgagggctcctttcctttttgaccacgaccttggccccagctctgcactctctggaataagggcccgatgcagcattttcttgcccagtgtggcaagacctcagaaaaaccagtcaattacgcctaagatcattttgctgtccttaaaccccccaggttccttcttgcacaaatccactctgctgcccaccttccctggcattttaaacagacctaccccaccccaactcagagttaagcatacatggcaatgctgaaaataaacaaaatccactgaggcttcccaggccatttaaagcctggagtaccagcgcatatcatctcatggggtccagagtggagtccaggcttctctgaaaccagggctgagcatatttccatagccaaggaggtgggactccctggagctatctgtggtcttagggaaggatccagacatacacggctttggggtacaagctgtgatcactgatcaataaattatctctagattggtccttgtgaggggagttttaagaatccagaacatcttgctcttgatcagcacatccaaaaacaccaagacaaacatccagtggagcagaacctctcctgcctcgggagttctgaccgggttccccagcagggtgttaagcctctgtctctggccctaccagcatccaggttccactttcctaggagagagtggagatgggaagacagggaaaggaaggcagcaggaggccacaagcccaccaggtcttcatgtcaagagagggagtaacatgtcttctcattgcccacggacccaacctctgtccaggtgcccctcatcatcacagtttaacacaagctcccctgctccagccaaattgatctcccagtcttgtccttacccattccaagtgctctgccagcccctgttcatccaagttttaagtcctccaccctgttctaagagactgttccaacggctctgggcctcagtggtcacttgaccaccattgtctcagagctgcccactttgtgtgtgtcacatgctgcctgagtcacatgtacatcttatttctgcctctagttttgtaagctcctggagggcggataacatcttatactactcttgtattctcatggcacctagtgcagtgctgggcacagagtaggtgctcaataaagacttgttgaatgaa

SEQ ID NO: 3152 - DNA, 603 bp, Homo sapiens; identical to SEQ ID NO: 2780
  source 1..603: mol_type = genomic DNA

SEQ ID NO: 3153 - DNA, 2549 bp, Homo sapiens
  source 1..2549: mol_type = genomic DNA
atggaaccagagaggaaggggctatcgttggcttcttcttcagatggagacgggagagaagaaaataaattaaaacaaggaatttcccaagacttggcttcttcctccagattagacagatacaaaatagcaaggcagttaacagaaaaagcaatcaaggagaagaagattttctctatctacggacactacccggtggtccgggccgctctgcgaaggaagggctgggtagagaagaagttccactttttgcccaaggtcattccggatgtcgaggatgaaggcgcccgggtcaatgatgatacatgtgccaaagtcaaagaaaatcaagaaatggctttggagaaaacagacaacatccacgacgtgatgtctaggttggtaaaaaatgagatgccgtacctcctctggaccatcaagagggacatcattgactatcacagcctgacctacgaccagatgctgaaccactacgcaaagacagcctccttcaccaccaagatcgggctgtgcgtgaacatgcggagcctgccctggtacgtcccggccaaccccgactccttcttcccacgctgctacagcctctgcaccgagagtgagcagcaggagttcctggaagacttccggcgcaccatggcatccagcatcctcaagtgggtggtcagccaccagagctgcagcaggagcagcagaagcaagcccagggaccagagggaggaggccgggagcagcgacctgagcagcaggcaagatgctgaaaatgctgaggcaaagctcaggggcctcccggggcagcttgtggacatcgcgtgcaaggtgtgccaggcctacctggggcagctggagcatgaggacatcgacacgtcagcagatgccgtggaggacctcactgaggccgagtgggaggacctgacccagcagtactactccctcgttcatggcgatgctttcatctccaattcaagaaattacttttcgcagtgccaggctctgctgaatagaatcacgtctgtgaaccctcagacggacattgacgggctccggaacatctggattataaagcccgcggccaagtcccggggccgagacatagtgtgcatggaccgtgtggaggagatcctggagctggcagctgcagaccaccctctttccagggacaacaagtgggtggtccagaagtacatcgagacgccgctgctcatctgtgacaccaagttcgacatcagacagtggttcctcgtcacggactggaaccccctgaccatctggttctacaaggagagttacttgcggttctcaactcagcgcttctccctggacaagctggacagcgccatccacctgtgcaacaacgccgtccagaagtacctgaagaatgatgtgggccgcagccccctgctgcccgcacacaacatgtggaccagcaccaggttccaggagtacctgcagcgccagggccgtggcgccgtgtggggcagcgtcatctacccgtccatgaagaaggccatcgcccacgccatgaaggtggcccaggaccacgtggagcctcgcaagaacagctttgagctctacggggctgacttcgtccttgggagggacttcaggccctggctgatcgagatcaattccagccccaccatgcacccgtccacgccggtcacggcccagctgtgtgcacaggtgcaggaggacaccatcaaggtggccgtggaccgcagctgtgacatcggcaacttcgagctcctgtggaggcagccggtggttgagccgcccccattcagcgggtccgacctctgcgtggcgggcgtcagtgtgaggagagccaggaggcaggtgctgcccgtctgcaacctcaaggcctcggcctcgctgttggacgcgcagccgctgaaggcacggggcccctcggccatgccagaccctgcccagggacccccatcaccagctctccagcgggacttgggactgaaggaagagaaggggctccccctggccttgctggcacccttaaggggggcagccgagagcggtggagccgcacagcccacccgcaccaaagctgctgggaaggtggagctcccggcctgcccctgtcgccacgtggacagtcaggccccaaacaccggtgtccccgtagcccagcccgccaaaagctgggatccaaaccagctaaatgcgcacccgctggagcctgtgctgcggggcctgaagacagcagagggcgcgctgcgtccgccgcccggaggaaaaggagagggcacggtctgcagccgcctgccacaccacgggcaccacgtggccgcctgccagaccacgggcaccacgtgggatggtgggcctggggtgtgcttcctccggcagctcctggcatcagaactgcccatgggccctgggctgccgagggacccccgagcgccgccctgcctcgtgtgccgcgggctgctgccacccgccgggccctgcaagcgctgccgctcgttctgcgccgcggtcctgcagggcgcgtccttcgtgcggctcggcgggcggagctgcagcccgcggacccc

SEQ ID NO: 3154 - DNA, 3599 bp, Homo sapiens
  source 1..3599: mol_type = genomic DNA
aacaaccccgaggtcttatttttatagaatatcaagaacaaaatcttccaaaaggcacacgatgccaaactaaaaataaagagcgaaaacccaaaaagtcgcgctcaattccttctgaaacctattcgcctcctacccctgtcccatcctctggcgctggcgggtcctcgtccccgttttccccaccgcaagtcctggaacctccgcttaactcttttctcggcggctccgccccggccccgccccagccatgccttggccccgccccgttcgccgtttattggcttctcccaacccctgccggtgggtgacaagccgggaagcttggaggggtctattgcgtacgcccaaggcgctgggcctggagcaggagaaagggagtggaggcgcgtcggagactatgaagcgcggcattcggcgggatcctttccggaagcggaagctcggcgggcgggccaagaaggtccgggagcccacggcggttaattctttttaccgtgaggcttcacttccctcggtctgggcttctctgaggcggcgagagatggtcaggtctggagctcgaccgggccaggtgttatcttcaggaaggcacactggacctgctaaattaacaaatggaaagaaagcgacctatttaagaaaaataccacgttttaatgcagattctggctattccatccattctgattcagaaagtcaggctgaaactgtacacgggcttgatggttgtgcttctttgctgagggacattttgagaaatgaagattcagcatcttcagataataagaaacagatacctaatgaagcttctgctagaagtgaaagagacacatcagacctagagcaaaactggtcattgcaagatcattatagaatgtattcacccataatataccaagccctctgtgagcacgtgcagactcagatgtcactgatgaatgacttgacttcaaagaacatccctaatggaattcctgctgtaccatgccatgctccctctcattctgaatctcaggcaactcctcattctagttatggcttatgtacctccaccccagtctggtcacttcagcggccaccctgccctccaaaggttcattctgaagttcaaactgatggcaacagtcagtttgcatcacaaggtaaaacagtttctgcaacctgtactgatgttctacggaattcatttaataccagtcctggagttccatgtagcctgcccaaaactgacatatcagctattccaacattgcagcaactgggccttgttaatggaattctgccacaacaaggaattcataaggaaacagacctactaaaatgtattcaaacatatttgtctctttttcgatctcatggaaaagaaacgcatctggacagtcagacacaccgaagccctactcagtcacaaccagctttcttggccactaatgaagaaaaatgtgccagagagcaaattagagaggccacaagtgaaagaaaggatttaaacatacatgtgcgagatacaaaaacagtgaaggatgtacagaaggcaaaaaatgtgaacaagacagctgaaaaagttagaattataaaatatttgttgggagagctcaaggccctggtagcagaacaagaggattcagaaattcagaggttgattacagaaatggaggcatgtatatctgtacttccaacagtaagtggaaacacagatattcaagttgagatagcactggccatgcaaccattaagaagtgagaatgctcagttacgaaggcagttgagaattttgaaccagcaactcagagaacaacagaaaactcaaaaaccatctggtgctgtggattgcaaccttgaattgttttctcttcagtcattgaatatgtcactgcaaaatcaattggaggagtcactaaagagccaggaattactgcagagtaaaaatgaagagctgttaaaagtgattgaaaatcagaaagatgaaaacaaaaaatttagtagtatatttaaagacaaagatcaaactatacttgaaaataaacagcaatatgatattgagataacaagaataaaaattgaattggaggaagccctagtcaatgtgaaaagctcccagtttaagttagaaactgctgaaaaggaaaaccagatattggggataacattacgtcagcgtgatgctgaggtgactcgactaagagaattaaccagaactttacagactagcatggcaaagcttctctccgatcttagtgtggacagtgctcgctgcaagcctgggaataaccttaccaaatcactcttgaacattcatgataaacaacttcaacatgacccagctcctgctcacacttccataatgagctatctaaataagttagaaacaaattacagttttacacattcagagccactttctacaattaaaaatgaggaaaccatagagccagacaaaacctatgaaaatgttctgtcctccagaggccctcaaaatagtaacactaggggcatggaggaagcatctgcacctggaattatttctgccctttcaaaacaggattctgatgaagggagtgaaactatggctttaatagaagatgagcataatttggataatacaatttacattccttttgctagaagcactcctgaaaagaaatcaccactttctaagagactatcccctcagccacaaataagagcagctacaacacagctagtcagcaacagcggacttgctgtctctggaaaagaaaataaactgtgtacacctgtaatctgttcctcttcaacaaaggaagcagaagatgcacctgaaaaactttccagagcatctgatatgaaggacacacagctcctcaagaaaataaaggaagcaattggtaagatccctgctgccaccaaggagccagaggaacaaactgcatgtcatggcccatcaggttgtcttagcaacagccttcaagtgaaaggcaatactgtctgtgatggtagtgttttcacttctgacttgatgtctgactggagcatctcttcgttttcaacgttcacttctcgtgatgaacaagacttcagaaatggccttgcggcattagatgccaacatagctagactccagaagtctttaaggactggtcttctggagaaatgaattcagaagaaaactcatcaggtgcttctttttaaaactagaacttggctatattgaatgtgtatttttctttagtgaaatgatgttttatgttattatgtgtgaagtaatatattgtacaagtaataaatgtattgttgagatatattgacactgaggagcttataaaaacaagtcatcttaagttcacaattgctacaagaagaaagttgtggataactaggaaattattgtaagtaatgttttatttcagtacttagcaattagagttcttttattaagatgtatctgctggattaagggtacaggttgaaatagttctgtggctgtcctaagaaataatgggaaaagaatctctggatgtaagtttttctgttgaaactagagggttttttttttctgtttacatatacttttttttaatagcaatgtgtttttattaaacatgctgtgtgccaca

SEQ ID NO: 3155 - DNA, 713 bp, Homo sapiens
  source 1..713: mol_type = genomic DNA
cccttctgagcaatggagcttaccatctttatcctgagactggccatttacatcctgacatttcccttgtacctgctgaactttctgggcttgtggagctggatatgcaaaaaatggttcccctacttcttggtgaggttcactgtgatatacaacgaacagatggcaagcaagaagcgggagctcttcagtaacctgcaggagtttgcgggcccctccgggaaactctccctgctggaagtgggctgtggcacgggggccaacttcaagttctacccacctgggtgcagagtgctgagaccgggaggggctttctatttcatggagcatgtggcagctgagtgttcgacttggaattacttctggcaacaagtcctggatcctgcctggcaccttctgtttgatgggtgcaacctgaccagagagagctggaaggccctggagcgggccagcttctctaagctgaagctgcagcacatccaggccccactgtcctgggagttggtgcgccctcatatctatggatatgctgtgaaatagtgtgagctggcagttaagagctgaatggctcaaagaatttaaagcttcagttttacatttaaaatgctaagtgggagaagagaaaccttttttttggggggcggtttttttggtttgttgttggttttttttttttttttggcgggaagaaagagttttgctcttgttgccca

SEQ ID NO: 3156 - DNA, 3772 bp, Homo sapiens
  source 1..3772: mol_type = genomic DNA
gccgccgccgccgccgccgccgcgccgcggcttgagggcgggaggctgggggagggtagcggagccggcgccgccgccatgttgggtctgaagcggctgctgtaggcgccgacggagcgagcgggcgtgcggagcgggcgacagtggcgtgggatctgcctctctgcgagcagctgggagcggcggcggcggcgccatgagcgggggcaccccttacatcggcagcaagatcagcctcatctccaaggcggagatccgctacgagggcatcctctacaccatcgacaccgaaaactccaccgtagcccttgccaaagttcgatcctttggtacagaagacagaccgacagatcgtccaataccacctcgagatgaagtctttgaatacattatattccgtgggagtgacattaaagaccttactgtttgtgagccaccaaaaccacagtgttctttgcctcaagacccagctattgttcagtcctcactaggctcatcgacttcttcattccagtccatgggttcttatggacctttcggcaggatgcccacatacagtcagttcagtccgagttccttagttgggcagcagtttggtgctgttggtgttgctggaagctctttgacatcctttggaacagaaacatcaaacagtggtaccttaccccaaagtagtgcggttggttctgcctttacacaggatacaagatctctaaaaacacagttatctcaaggtcgctcaagccctcagttagaccctttgagaaaaagcccaaccatggaacaagcagtgcagaccgcctcagcccacttacctgctccagcagctgttgggagaaggagtcctgtatcaaccaggcctttgccatctgccagccaaaaggcaggagagaatcaggagcacaggcgagctgaagtacacaaagtttcaaggccagaaaatgagcaactcagaaatgataacaagagacaagtagctccaggtgctccttcagctccaaggagagggcgtgggggtcatcggggtggcaggggaagatttggtattcggcgagatgggccaatgaaatttgagaaagactttgactttgaaagtgcaaatgcacaattcaacaaggaagagattgacagagagtttcataataaacttaaattaaaagaagataaacttgagaaacaggagaagcctgtaaatggtgaagataaaggagactcaggagttgatacccaaaacagtgaaggaaatgccgatgaagaagatccacttggacctaattgctattatgacaaaactaaatccttctttgataatatttcttgtgatgacaatagagaacggagaccaacctgggctgaagaaagaagattaaatgctgaaacatttggaatcccacttcgtccaaaccgtggccgtgggggatacagaggcagaggaggtcttggtttccgtggtggcagagggcgtggtggtggcagaggtggtaccttcactgcccctcgaggatttcgcggtggattcagaggaggtcgtgggggccgggagtttgcggattttgaatataggaaaaccacagcttttggaccctaaaaggtctggattgatcgtactgctttctgaaagaaagacaacaaagttgctgcatagtctacaaacaagtctctgaaaataggtgaatttctagctcttcatggtcctgaacattgatttcagtctttgcaaagaatgaagaagtgaattcgctgtacatttgtcaccagcactgggtttttgttttttgtttgtttttccgcttaatttcaaagataaaatgcagttacttttgggggtggaaggctcatcttaaaacatgagcattaaatatatttggaatagcagaaggttaagtaatttcttatgtatagttaaactaaagcagtacttcagtgggacttaacaagtattttttcatcactgaaaggttttttttttttatcactaaattgtatttggcaattgcaagttgcctgcagatagggccgtgatactgtgttttgagccacagaaggttgtgtgtgtgtgtgtgtgtgtgtgtgtgtgtgtgtgtgtatgtgtgtgtctttttcctcctttcttttggggaatcctgtaatatgaggtagcttatttcgtcaattaattagggtgctggatggtagagaattttgtcagtcaactatgtacacacagtaaatactgtttcttaggcaaaggtaacttttttatatagttgtaaaattccattatattccattgccaaagaaacattaagaactttgtatagctgtataaaaagcaactaattttttaaagaataaacattttaaagtcagcaaacatactgtgtccttgcagaagttgatgtgctgagcagcagccttatgggtgggtctttttttcttagttttccaggcttaacatttttgattttgttttttaatgtttggaacataaatgaagatttgatacattatttcattatctaaaaaggattaattattcatgctcattgtaagaacttcattttgtagcaaatggcatatcacaggatctgtccagataatcgatattttcagtatacaaatgtaaataatcacagatgagaatgtacttagctgtattttcaaataagtaatcttccccccttttgtaggactttaaaactaggcatcaatgaacctgtttttcctattatgcctggaatttagtcatgataccttgactcattccatcatatttcaagaggattcagagtgctagaaattattttggtagcctgtaacacacggcaacactggtccttgggcctatgatgacccacagatgactcagtatagagttcattgctaattataaattactagtgaatctttttgatattttaagctctagtgggaaaaatctggccacttttgtgtttttatgaaggccatggaataaaaggatccaaagatttaaatatttttatctaatattttgattgttttcttaactttctccttaaaacattcagtagtgataaagatatagaaactgcactgtaggagaattggaatatttaaggctggttgacattttttattttcattttatatcttttgtatagctctacaaggcagtgttttgtaatttggtttcattatgaagatccagtacttggcagccatagtttagacaatattgttcagtgctgtttgcttgcatgttaacaacaaaaccttttagaggacccacaaatcatgatattgaacacagttccgaggcattcagagcatcagagcaagtaccatggcaatacatgtgtagactgttggagatgtcccgggccaatttcaagaaagaaaactgtaaatactagttctacttgctctgaaattatgagtttatgcgttttcccagccctccgaatcactgactggggcgttttgtgccccagcaataactggcagcatggcatacctgcagtaccccttacaatattaaagcaaagtttttattctaaaacagaataaaactgttcaataaaaaatgctcgtcaaagttctttctctttaaatagtaacattctgtttcagtaggaacataatgaaaggaatcttttaaatggaagagcggaattataatgtttgtattccctgtaataactataaatcagttactttatttctaagattgagttattgttgcagatgtttagggaaagctaaaagccccttccttcccctcctgtgtgtaaataaaatacttctgagatca

SEQ ID NO: 3157 - DNA, 5669 bp, Homo sapiens
  source 1..5669: mol_type = genomic DNA
agactgaggctggctggctggaggttgacacaggagtgctcaggggagcagcatcacaagagggcagatcgaaagcatcgtccttgctgaaaaacagatggcagaggtggaagcggtacagctgaaggaggaaggaaaccggcatttccagctccaggactacaaggccgccacaaatagctacagccaggccctgaagctgaccaaggacaaggccctgctggccacgctttatcggaaccgggcagcctgtggcctgaaaacggagagctacgtccaggcagcttcagatgcctccagagccatcgacatcaactcctcggacatcaaggctctgtatcggcgatgccaggcactggagcacctggggaagctggaccaggccttcaaagacgtgcagcgttgtgccaccctcgagccacggaaccagaacttccaggagatgctgaggagactcaacaccagcattcaggagaagctccgagtgcagttctccacagactcgagggtacagaagatgtttgagatcctcttggatgaaaacagtgaggctgataagcgggaaaaggctgccaacaatctcattgtcctaggccgtgaggaagcaggggctgagaagatcttccagaacaatggagtagccttgctactgcagcttctggacactaagaagcctgagctggtgctggctgcagtgcggaccctgtcgggcatgtgcagcggccaccaagccagagccacagtgattctgcatgcagtgcggatagaccgaatctgtagcctcatggccgtggagaatgaggagatgtctctggctgtctgcaacctgctccaagccatcattgactccttgtctggggaggacaagcgggagcatcgagggaaggaggaggccctggttctagacaccaagaaggacctgaagcagatcaccagccacctgctggacatgctagtcagcaagaaggtgtctggccagggcagggatcaggcgctgaacctgctcaataagaatgttcccaggaaggaccttgccattcatgacaactcacgtaccatctatgtggtggataatggtctgaggaagatcctgaaggttgtggggcaggttccagatctgccatcctgcctgcccctgactgacaacacccgcatgctggcctctatcctcatcaacaagctctatgatgacctgcgctgtgacccggagcgcgatcacttccgcaagatctgtgaggaatatatcacgggcaagtttgacccccaggacatggacaagaacttgaatgccatccagacagtgtcagggatcctgcagggcccctttgacctgggcaaccagctgctgggactgaaaggtgtgatggagatgatggtggcactatgtggctcagagcgcgagacggaccagctggtggccgtggaggccctcatccatgcctccacgaagctcagccgcgccaccttcatcatcaccaatggagtgtcactgctcaaacagatctacaagaccaccaaaaatgagaagatcaagatccgcacactggtgggactctgtaagctcggctctgcaggtggcacagactacggtctcaggcagtttgcggaagggtcgacagaaaaactggccaaacagtgtcgcaagtggctgtgcaatatgtccatagacactcggacccgacgctgggcagtggagggcctggcctacctcacgctggacgctgatgtgaaggacgactttgtccaggacgtccctgccctgcaggccatgtttgagctggccaagaccagtgacaagaccatcctgtactcggtggccaccaccctggtgaactgcaccaacagctacgatgtcaaggaggtcatcccagagcttgtccagctcgccaagttctccaagcagcatgtgcccgaggaacaccccaaggacaagaaggactttatagacatgcgggtgaagcggcttctgaaggcgggtgtcatctctgccctggcttgcatggtgaaagcagatagtgccatcctcactgaccagaccaaggagctgctggccagggtattcctggcactgtgtgacaacccaaaggaccgaggcaccattgtggctcaaggtggtggcaaggccctgattcccctggctttggagggcacagatgtgggcaaggtgaaggcagcccacgctctagcaaagatcgctgctgtctccaatccggacattgcttttcctggggagcgggtgtatgaggtggtgcggccccttgtaagactcttggacacacagagggatgggcttcagaactatgaggctctcctaggcctcaccaacctgtctgggcggagtgacaaactccggcagaagatctttaaggagagggccttgccagacatcgagaactacatgtttgagaatcatgatcagctgcggcaggcggccaccgagtgcatgtgcaacatggtgctccacaaggaggtacaggaaaggttcttggctgacgggaatgaccggctgaagctggtggtgctgctctgcggggaggatgatgataaggtgcagaatgcggctgcaggggctctggccatgctgacagcagcacacaagaaactgtgcctcaagatgactcaagtgacaacccagtggttggagatcctccagcggctttgcctgcacgaccagctgtctgtccaacaccggggcctggtcattgcctacaacctactggcagccgatgctgagctggccaagaagctggtggagagtgagctgctggagatcctgactgtggtgggcaaacaggagccagatgagaagaaggcagaagtggttcagacagcccgagaatgtctcatcaagtgcatggattatggtttcattaaaccagtgtcttagacagcgaccctcagggatgctgggagtggtcctgtactgtgcagagtcctgggttggttgggttctcctgaagagtcaggtcatctagggatcatagcagtgacaatgaagtctcaatataaaggaaagacttgattgttctctgagttgtgagtcttctcctttgtcctgacagagtttggatgtttcactctctctcttgcttcctgtctccttatatttgtcatgtttcagaaattcccagaataattttcacccatgattagaaataggttggatcattctttctgtacccattctgaaggccaggataataggttgaagttctttatattttggaaaatggattttgtggtaaggtaggaactaacgggtgtgtgcatataaaggttaatgctgttgtatttggatgctgatctgtgctgttttcatgacctctctcccacactatttgaatcagtctgttcagaactgtgtgtttcacctgcagtgctctgtcccagtcccatgcccattcccatcacttcactgtgatggaaatagagtttatgttcaacagtggggcatgacctctgcaatttgcttgggaaagtcttccaagcaagatggacatgatgaatacaaataagatctactcaaagtacttcaaacaaaaaataaataattcattggctcatgtatcttggccacccagggaaggtctgacattgttagttagatccagagtttcaaatgtcatcaccatggatgtgtctttttctctctctcatttcccctccccatatcttgtcttttatttattataggtttgtctcattccctggcaggctctctccctgtgataggaaagagagtccccagcagccccagggtgacatagttgttatagttcattatggaatagaagagagaagagcattctcaataacccggcaaagttcccagggatgactctgatatgtctatgtctcaggtcacatttccatctatgaaccaatcatattcagaggtggaatgctaattggccaggcctgggtcatatatacaagtctagggaagaaatgagcttcatccctgtccaattgacatggactgattaggggtattaatggaagaggtgtgccaccacaaaagaatgtaccctgggcagatcaaagaacatattctgtatgtcaggcttggccacaaaagaatgacacaagtaatatgctgtagatcagaacctctctgctaatattgcctttttagcatggttaagatagctaagatctagtactgtcactccagtatgtcccaattctacctacgtttattgaagggtcaacagttctgatctcagcattgggtaaagggtgggacattcagatttacggtccttgataaaaacaatttacaacgttccgttgtgtaataaatgtaagtgtacatatgcctgggacatcagctggaaaagggacagactatcagagagttgcactgttgcggtatgggccaaatccaacataatacccgctgtacctctagagaactaaaaccttaatttctcagatcttttctgcactaatggtctttacatacagcctacattttaactaactcttgcatgggcttgtttcacagcaggaaactatattcatcatatccttattatgatagagaatgacaacattcaaaagggtgtggtgcttctgaaaatatacacaataaatggcatgatttgacctctgtcaaattcttctttcctgctttcctcatatgtgggcttgagtgggtgtatttagctcctttaaaggaaactctttcacaggcagggccacactcttactcgttttgatctcatgaggttacatctgccagtggcgttcagggccagttagataaagttcatcttgtttggattggagagactttttttttttttttttttgagacagggtcttgctctgtaacctaggctcaagtgcagtgcagtggtgcagtcatggctcaccgcagccttggtctcctgggctcaagtgatctttctacttcagcctcctcaatagctgggactacaggcacacaccaccacccccaggtaattaaaaaatttttttttgtagagacagggtctcactatgttgcccagtctgggagaccacattctttaacatgaatattttgtaaatagtccaagaagatctagaggaaagctgaattccttcatctgatttttgccactgggctgcctcccattgtctggctaagtcttcatgggaggcctttaagaaaagctgtgacaaatacctttgtttcccactgcctaggttacataagtagttggcttttccagcctagactcttatattgttgcttgtaagagggcccttctttgcagatttcttttttttttcatctatgctttcaaataggcagatgctagcctgagatcatctctttattgaggtagtttgcccaaaaacagcaaggaacagccaatacctgccaactttctaggtttttccaaccaattctcttacagaaaatctataaatatcttagaggtatgtttcttagtttcccaacatataatgggaaaattcatcatttatattattacttttaactgaagtatgttgttatcagagaacttggtctgtgtcatattaatcctttgccatttgagaagcatacagttttaaagtttatatctccaaaaggatattttgtaaaaatttaacccctttgactcttagtcttctcatttgtgaaaggtaaataataaagaatttctgttcctagt

SEQ ID NO: 3158 - DNA, 246 bp, Homo sapiens
  source 1..246: mol_type = genomic DNA
atgagtcactacggcagctactacggaggcctgggctacagctgtggaggcttcggtggcctgggctatggctatggctgtggatgtggcagcttctgcagacggggttctggctgtggctatggaggctacggatatggctctggctttggaggctacggatatggctctggctttggaggctatggatatggctgctgccgcccatcgtacaatggaggatacggattctctggcttttattaa

SEQ ID NO: 3159 - DNA, 206 bp, Homo sapiens
  source 1..206: mol_type = genomic DNA
ggccggcagagagagcctggatacgaagcaggcgggcttcagagtgggttggaaaaatggaggtgccgcgcctggatcatgccctcaacagccccaccagcccctgtgaggaggtgatcaaaaacctcagcctggaggccattcagctgtgcgaccgggacgttgtttttgaagaacttacatccaaacagacaagaaaaggataa

SEQ ID NO: 3160 - DNA, 1918 bp, Homo sapiens
  source 1..1918: mol_type = genomic DNA
ggacgcctggtgttctcgcgggaaagaaccgttgcgcccgactttgcgcggaggtaggagggggaagtggaggcgggagtgaagtctcgcgagaagagtcggttgccgtagcagagccctctagctgtgtgtgtctgaggctcggccgcctgagccgcggacggtttgctgagcccgttagtgcgcccggccgagacacgccgccgccatgtcccgctacctgcgtccccccaacacgtctctgttcgtcaggaacgtggccgacgacaccaggtctgaagacttgcggcgtgaatttggtcgttatggtcctatagttgatgtgtatgttccacttgatttctacactcgccgtccaagaggatttgcttatgttcaatttgaggatgttcgtgatgctgaagacgctttacataatttggacagaaagtggatttgtggacggcagattgaaatacagtttgcccagggggatcgaaagacaccaaatcagatgaaagccaaggaagggaggaatgtgtacagttcttcacgctatgatgattatgacagatacagacgttctagaagccgaagttatgaaaggaggagatcaagaagtcggtcttttgattacaactatagaagatcgtatagtcctagaaaaccaaactgcagctggaatacccagtacagttctgcttactacacttcaagaaagatctgaaagcggaaaaagaaccaaagaagggcagttcaagcgaccaaagggtgggtggaaggtgctgcagtatgaatactgtacgaatattttgactctggtctgaaaagataaaagaatgttatcgaaaactacatggaataattgaagtcccttcaagtttgaaagtaagcattttaggacaaataaaaggaaattcaactttgtacttgtggaaactaatccctaaatatgaataggtttatattgattcatgggtaacaggtccataataaattattggaaactaggatgtctgaatatcaaggaagacagccatagtctcttacagtgcctctgttggtctgtctcaaactgaattgggtgggaaaaggtatggtccaatataaaagttccatttttgccattattggcaaatcttgcctttgtttattttggtgccagtgttttctgcttaatcatttgctttgttggcatctgtgtttatttacttgtacaccacatgcagtttacatctgtcttaactactccttcccaggtaaattccaattatatttgacatccagctaagagggcccatctcttctcacctctttcctagtcagtatattcagcaaatatttattgagcccttactgtgggcaaatcattgtactggataattgagaaaaatagataattcccttattcagtaaatgtctactgagcacaatctagtgaatcattacagtatggcctcattgttttgtttgaggtgtgttattcataacaatattttacaccattcgtatcaatgtaattatagaacacaatatacgatcaaggataagtaattgtgtggttatctgccatttaaaagtatccagtatttgatcacattattataaataatgaaaaaatgatttaatctgtaataaactggtttattgtgcagtgactgtaatatactagagttataataaattgtttactctgcctcaccaaacacatgctaggatataacccccaaaataagtatttaactttgcattaggtataaaggagactgggtgctataattagattattttgaggcagacagagagctgttatcctaactgatttagtatgttctgtaattgagaaaatgttcaccaaattatactttttagtgatttacatgtacattttataggggacatgttctgtgtatagcgaataaataacttttatagtatc

SEQ ID NO: 3161 - DNA, 2119 bp, Homo sapiens
  source 1..2119: mol_type = genomic DNA
tcgtcatggccagtgtctgtctggcgcccggtgcccaggcactgtgcgagaccagtccgcaggggcgactcggagagcgccgggccgcggcgggagaagagcctgcagcgattaaagtgaagaaacaatggccagcaatcacaaatcttcagcagctcgccctgtttcaagaggtggagttgggttaacaggaaggcctccttctgggatacgacccctatcaggaaatattcgagtggcaactgcaatgccacctgggacagcaagaccaggttctcgtggttgtcccatagggactggtggagttctgtcttctcaaatcaaagttgcccatcgccctgtaacacaacaaggtttgactggaatgaaaactgggacgaaaggtccccagaggcaaattttagacaaatcttactatcttgggcttcttagaagtaaaataagtgaacttacaactgaagttaataaacttcagaagggaatagaaatgtacaatcaagagaattcagtatatttgtcatatgaaaagagggctgagactttagctgttgagataaaagagcttcaaggacaactagcagactacaacatgttggtagataaacttaataccaacactgaaatggaagaagtaatgaatgattacaatatgcttaaagctcaaaatgatcgagaaacacaaagtttggatgtcatatttactgaaagacaagcgaaagaaaaacaaatcagaagtgtcgaagaagaaattgaacaggaaaaacaagcaacagatgacattatcaaaaatatgtcttttgaaaaccaagtcaagtacctagagatgaaaaccacaaatgagaaactgttacaggaattagatacacttcaacaacaattggattcacagaacatgaaaaaagagagcctggaagcagaaatagctcactcccaggtgaaacaggaggcggtattgctgcatgaaaaactttatgagttggagtcccatcgagatcaaatgattgcagaagacaaaagcataggatctccaatggaagagagagagaaattacttaagcagattaaagatgataatcaggaaatagccagcatggaaagacagttaacagatacaaaagaaaagataaatcagtttattgaagaaattagacaacttgacatggatttagaggaacaccaaggtgaaatgaaccagaaatacaaggagctaaagaaaagggaggaacatatggacacttttattgagacttttgaggaaacaaagaatcaggaactgaaacgaaaggcacagatagaagccaacattgttgcactcttggagcactgcagtcgaaatataaatcgtatagaacagatatcctctatcaccaatcaagagctaaagatgatgcaggatgacctcaattttaaatctactgaagtgcagaaatcacaaagtacagctcagaatttgacttcagacattcaacgtctgcagttggatctgcagaaaatggagcttctagaaagtaagatgactgaagaacagcattctctaaaaagcaaaattaagcaaatgacaactgatctggagatatataatgatttgccagctttaaaatcatcaggtgaagaaaagataaagaaattacatcaggagagaatgatattatcaacccacagaaatgcctttaagaaaataatggagaagcaaaacatagagtatgaggcactaaaaacacaattgcaagaaaatgagacacattctcagcttacaaatttggagagaaagtggcaacaccttgagcaaaataattttgcgatgaaagaattcatagcaaccaagagtcaagagagtgattaccagccaattaagaaaaatgtgaccaagcagattgcagagtacaataaaaccatcgtggatgctttacatagcaccagcggaaactgagtttaagtccactgaaagtctctaaggaagtatcctcttgctgctaaacttggtacaagttgactaccaaaaaaaaaaaaagcttacttttggagtttacctaaaatttctgaatgttataatttttgtggcctcttttaagaatgatattttaaaatagtaaatagttcaataaatggtttgcatatt

SEQ ID NO: 3162 - DNA, 540 bp, Homo sapiens
  source 1..540: mol_type = genomic DNA
agtgtaaccaatcaagcagaatctctaggcgttcgtgctttgaaatgaggctccacatagctcccacgtgggacaagatggtgtcttcggcgcagatgggcttcaacctgcaggctctcctggagcagctcagccaggatgagttgagcaagttcaagtatctgatcacgaccttctccctggcacacgagctccagaagatcccccacaaggaggtagacaaggctgatgggaagcaactggtagaaatcctcaccacccattgtgacagctactgggtggagatggcgagcctccaggtctttgaaaagatgcaccgaatggatctgtctgagagagcaaaggatgaagtcagagaagcagctttgaaatcctttaataaaaggaagcctctatcattagggataacacggaaagaacgaccacctctagacgtggacgaaatgctggagcgcttcaaaacagaagcacaagcgtttacagaaacgaaaggaaatgtcatctgcctgggtaaagaagtctttaaaggaaaaaagccag

SEQ ID NO: 3163 - DNA, 603 bp, Homo sapiens; identical to SEQ ID NO: 2833
  source 1..603: mol_type = genomic DNA

SEQ ID NO: 3164 - DNA, 460 bp, Homo sapiens; identical to SEQ ID NO: 2760
  source 1..460: mol_type = genomic DNA

SEQ ID NO: 3165 - DNA, 681 bp, Homo sapiens
  source 1..681: mol_type = genomic DNA
gtacgggagctggaggctgagcttgatgcagagcagaagaagcacgccgaggcccttaagggcgtgcgcaagcatgagcgccgtgtcaaggagctcgcataccaggtgggcgacagggtctccctggggagtggccctggagctggcccagcccaagcaagccctgagtcccccttgcccgcccaggccgaggaggacaggaagaacctggctcgcatgcaggacctggtggacaagctgcagagcaaggtcaagagctacaagcgccagtttgaggaggcggagcagcaggccaacaccaacctggccaagtatcgcaaggcccagcacgagctggatgatgcggaggagcgggcagacatggcggaaacccaggccaacaagctgcgggcacggacccgggacgccctgggccccaagcacaaggagtgacggcctgaccccctgggctctaaagaggaatgtctgctgttgcacatctggctgaggccacctgccccgatcctgccatctctgcatcgccccctgctgccttcagccttccctgggccctgaataaacaccacagccagtttccttctcattcttttctttggggttcaggaggaaaaacacagtcctagggacaaaagccaggtccacagcagtcatttttaaaataaagttatttaatagtctcca

SEQ ID NO: 3166 - DNA, 2296 bp, Homo sapiens
  source 1..2296: mol_type = genomic DNA
agacttgcttcaggttccaacccggtaaggcaaatggagaggctgtcaggagaccagaagtttacctcagctattgcaccgacgcaccacgtgctctggtgcacatccaccgcctcttcctgcctcagtttctccttttgtaaaacaacagcttgtaaaggcctggggatcttctcatccacgggagttttctaaggatgcaggcgaaagaggatctcactctgttgcctaggctggaatgtggtggcatgatcacagctcactgcagccacaaattcctgggctcaagcaatcctcctgcttcagcctcctgagtagctgggactataggcaagcgctactgtgctcagctctcactctctggctgaatgtagaggactctgaaggcttaggcaagaggggagttataaggcaccacagaaccctgaatgactgcatggagcagaacccttcgcaaacctgctcttcaggcctcctttttgagacagctggaaaagattctttctccttttctagcaattacttcctccctccgactcaaatgcctactcagcctctagtattcagtggctgctgcagtttgcggggttcttctccagaccatagatgcctcagtttttgcagtacctggaggtttcaccagtgaaagctctgaaacagcaaagatggcagcctgccctttcctctgggagttccatcctaggggtgtacagaactgttgctggcctgaatacacctgcatgaggtggctgaagactccagttggattatttatgaggatggcctgtgcaaaaagacacccagagatttcatgctgttgattcacagaaagcctgttcctcttcactccgtagagtcctcagagtctggatcatcccttacagaagatccttgataatatttctgatatacctccaaggttccgtttgtcaaatgtgtgcgacccttctgataagtcaccagaggtgatgagggagagagagaaagaaagcaaattacaactgtaaagagtctctgaacagtgaaagatcaaaacagacagtctctggctttactggatgagtcaccattgcagcccgaccgcaaaaacaagcgtggcttctgtacttagcagcagtcttcctgtctggaaaggaaacattgctcagattggagatactggccattttatagacttcaaagcaacttaggccactgaactgtcaggcgggaaaacaggctgaagaaatgtcaacaattgggagttttgaaggattccaggctgtgtctctgaagcaagagggagatgaccaaccctctgagactgaccacctatcgatggaggaagaggacccgatgccaagacagatttcaaggcagtcaagtgtgaccgaatcaactctttaccccaatccttatcatcagccttatatctcacggaagtactttgctacacggccgggggccattgagactgccatggaagacttgaaaggtcacgtagctgagacttctggagagaccattcaaggcttctggctcttgacaaagatagaccactggaacaatgagaaggagagaattctactggtcacagacaagactctcttgatctgcaaatacgacttcatcatgctgagttgtgtgcagctgcagcggattcctctgagcgctgtctatcgcatctgcctgggcaagttcaccttccctgggatgtccctggacaagagacaaggagaaggccttaggatctactgggggagtccggaggagcagtctcttctgtcccgctggaacccatggtccactgaagttccttatgctactttcactgagcatcctatgaaatacaccagtgagaaattccttgaaatttgcaagttgtctgggttcatgtctaagcttgttccagctatccagaatgcccacaagaattcaactggatctggaagaggaaagaaactgatggtgttaactgaacccattttgattgagacctacacagggctgatgtcattcattggaaaccgcaacaaacttggctattcccttgcccgtgggagtattggtttttgagagtctttttggtaccataagcatatcatccacagatatgtcactttgaaaattccagtttgacccacgctatttttggactgaaacaattaattatttttaaatgacgctttatgatttagaaatttagtatttccgaaaatttaaaagcttgattggactgatagatacacactttagacctcatacaagaataatcaaattttcttaaaactagaaaataaatgctgctgagcctatc

SEQ ID NO: 3167 - DNA, 336 bp, Homo sapiens
  source 1..336: mol_type = genomic DNA
tctgcgcaagaaccgccggcgggtgtttgggctgcttgagcggccagtgctgctgccgcctgtgtccattgacactgccagctacaagatctttgtgtccgggaagagtggtgtgggcaagacggcgctggtggccaagctggctggcctggaggtgcctgtggtgcaccacgagaccaccggcttgcatggagaacacagatgccttcctcttcctcttctccttcactgaccgtgcctcctttgaagacctccctggacagctggcccgcatagcaggtgaggcccctggtgtcgtcaggatggtcatcggctccaaatttgaccagtacatgc

SEQ ID NO: 3168 - DNA, 3524 bp, Homo sapiens
  source 1..3524: mol_type = genomic DNA
atgggcacaggggattttatctgcatttccatgactggaggggcgccctgggggttcagattgcaaggtggcaaggagcagaagcagcccttacaagttgcaaagattcgaaatcagagcaaagcctctgggtctgggctctgtgagggagatgaagtggtttccatcaatggcaacccttgtgcagatctcacctaccctgaagtcatcaagctcatggaaagcataacagactctctccaaatgctcatcaaaagaccatccagtggaataagtgaggctttgatatctgaaaatgaaaacaaaaacctcgagcatctcacacatgggggttatgtggaaagtaccaccctgcagattcgaccggccacaaagacccagtgcacagaattcttcctcgcccctgtcaagactgaagttcccctagctgagaaccaaagaagtggtcccgactgtgcaggcagcttgaaagaagaaacaggcccgagctaccaaagggctccccaaatgcctgactcccaaagaggacgcgtggcagaagagctgatcttaagggagaaggtagaagcggtacagcctgggcctgtggttgagctgcaactgtccctttcacaggagagacataagggcgctagtggccctttagtggctctcccgggagctgaaaaatctaagtctcctgacccagaccctaacttgtcacatgacaggattgtccacataaattcgatccctactaatgagaaagcagaccctttcctgaggtccagcaagataatccagatctccagtggcagagagttgagagtgatccaggaaagtgaagcaggagatgcgggactgccccgggtggaagtgatcctcgactgctctgacaggcagaagacagaagggtgcaggcttcaggcaggaaaggagtgtgtggattctccagtggaaggagggcagtcagaagcacctccttctctggtatcctttgccgtctcatcagaaggcacagagcagggagaagatccacgctcggaaaaagatcacagcagacctcacaagcaccgagcgcggcatgcacggctcaggaggagtgaaagcctgtcagaaaaacaagtgaaggaagcaaaatctaaatgcaaaagcattgcccttcttctaacggatgctcccaaccccaactccaagggggtgttgatgtttaagaagcgacgtcggagggccaggaaatacaccctagttagctacggtactggcgagcttgagcgagaggcggacgaggaggaagaaggtgacaaggaggatacatgtgaagtagcatttcttggtgcaagcgaatcagaggtggatgaagagttattgtctgacgttgacgacaacacacaagttgtgaactttgactgggattctggactggtggacattgaaaagaaactgaacagaggggacaagatggagatgttaccagacaccacaggcaagggagccctcatgtttgccaagaggagggagagaatggatcagatcacagcccaaaaagaagaggacaaggtaggtggaacgccaagcagagaacaagatgctgcccagaccgatggcctgagaaccacgacttcttaccaaagaaaggaggaagagtcggtaagaacgcagagctctgtgagcaaaagctacatcgaggtgagtcatggtcttggccatgttccccaacagaatggcttcagtgggacatctgagacagcaaacatccagaggatggtccccatgaatagaacggccaaacccttcccagggtctgtgaatcagccagctacccccttctcgccaacccgaaacatgacgagtcccattgctgactttcctgcacctccaccttactctgcagtcactcctccccctgacgccttctccagaggggtttcaagtccgattgctggcccagcacagccccctccatggccccagcctgccccgtggtcccagccagccttttacgattcgtctgagcgaatagcttcccgagatgagaggatctcagtgccagcaaaaagaacaggaatattgcaggaggccaaaaggagaagcacgacaaaacccatgtttacttttaaagagcccaaagtaagcccaaatcctgaactcttgtcactccttcaaaattcagaaggcaaacggggcactggagctggaggtgattccggaccggaagaagactacctcagcttgggggcagaggcttgtaatttcatgcaaagctcctctgccaaacaaaagacccctcctcctgttgctccaaaacctgcagtcaagtcctcatcctcccaaccagtaactccagtttccccagtctggtctccaggagtggctcccacccaacctcctgccttccccacatccaacccatcaaagggcaccgttgtctcctccatcaaaatagcccagccttcttaccctcctgcccggcctgcaagtactttgaacgtggctggtcccttcaaaggaccacaagcagcagtagccagtcagaattacacacccaaaccaacagtttccacaccaacagtcaatgctgttcagcctggtgcagtgggaccatccaatgagcttccaggaatgagtgggagaggagctcagctctttgctaaaaggcagtcgagaatggagaagtatgtggtcgattcagacacggtgcaggcccacgctgctcgagctcagtctcccactccatctctcccggccagttggaagtactcctccaatgtccgagcacctcctcctgtggcctataatcctatccactcgccgtcttacccactggctgctctcaagtctcagccatcagctgcacagccctccaaaatgggcaagaaaaagggaaagaaacccctcaatgcattagatgtcatgaagcaccaaccgtatcagctcaatgcatccttgtttactttccaacctccagatgcaaaggatggcctcccccagaagtcatcagtcaaggtcaattcagccctggccatgaagcaagctcttcctccccggccagtgaatgctgcctcacctacgaatgtgcaggcttcgtcagtgtactcggtaccagcctatacctctcctccttccttctttgcagaggcctcctcaccagtcagtgcatccccagtgcctgtgggcattcccacctcgccaaagcaagaatcagcctcatcatcttattttgtggcaccaaggccaaagttctcagccaagaaaagtggtgtcacaattcaggtgaaatgtaaatctgggatccatagtcaagatatcataaggacctacttcccagcctacctttcttcctctacctgataatgataatactcaaaataacaacattcaaaggaaacacaaagaaatcctgctttcacatctcctatttcttgggctccttaataactactgatggtttgttcatgaaaaaaaatttttaaatcaaaagattgtacttggccctgagttgaaaaaatttcaaaaatcaaaagtttgtacttggccctgagttg

SEQ ID NO: 3169 - DNA, 4728 bp, Homo sapiens
  source 1..4728: mol_type = genomic DNA
actgccgctgccgcggctacctgcggttcatctccgcacattccacacgcggcccaaacggtctctctctctctctctcaaacaccgcctttccgtctttgttttatcttgagtagcttagaaagattggagaagaaagcttacgtggaatgaaaatcaacttttatggatattttgaggactaaaagaataaatagggcgtccgtactgtagcgaaagtgcgactaaggttaggcatctggatttcccccgtagccctctttcaccccccccccccggccattaccgaagcggatgaaaacaaacactaacgatggcggcgccgggaagcgaccggctgctgggcttaaggcgggagtgaccgcttaaccagtgagggaagcactgaagagcgccagtcgacgtgggtgcgacaactcgcggagtcttaggagcaaaacgtctggggcctgcgagccaggacccttctgaagccttaggtgtctatcggcgacgtgtacggtcactgcagctccggagcgcggaaccctcagccaggaggcgcggctggtcggtcccaggtcccggcctccgtaatgagagcccggaaccactctttgtgccgcagcttcgcaggtactaacttttgcgggggataccccaagatctctcagcgcccccgggtgggaggctgtggattcctataggcaatggaaactgatctcaattcccaggacagaaaggacctggacaagtttattaaattttttgccctcaagactgtccaagtgattgtccaggctcggcttggtgaaaagatttgcactcgttcatcatcttctccaacgggttcagattggttcaacttagcaatcaaagacatcccagaggttacacatgaagcaaagaaggcactggcaggacagctgcctgcagtcgggaggtccatgtgtgtggagatttcacttaagacttctgagggagattccatggagctggaaatatggtgtcttgaaatgaatgaaaagtgtgataaagaaatcaaagtttcctacacggtgtacaacagactgtcattgctgctgaagtcccttcttgctataactagggtgacaccagcctataggctctccaggaaacaagggcatgaatatgtcatattatacaggatatattttggagaagttcagctgagtggcttaggagaaggcttccagacagttcgtgttgggacagtgggcacccctgtgggcaccatcactctttcttgtgcttacagaattaacttggcattcatgtctaccaggcaatttgagaggaccccacctatcatggggattattattgatcactttgtggaccgtccctatcccagctcctctcccatgcacccctgcaattacagaactgctggtgaggacactggagtaatatacccgtctgtagaagactctcaagaagtgtgtaccacctctttttccacctccccaccatcccagctctcaagctctcgcctttcctatcagcctgctgccctgggcgttggatcagctgacctggcttatccagtagtgtttgctgctggcttaaatgctacacaccctcaccagctgatggttcctgggaaggaaggtggggtaccccttgctcccaaccagcctgtccatggtacccaggctgaccaggagagactggcaacctgcaccccttctgacagaacccactgtgctgccacaccctccagtagtgaggatactgaaaccgtatcaaacagcagtgagggacgggcctcccctcacgatgtcttggagaccatctttgtccgaaaagtgggggcttttgtcaacaaacccattaaccaggtgaccctgacgagtttggatataccctttgccatgtttgctcccaagaatttggagctggaggataccgatccaatggtgaatcctccagattccccagagactgaatctcctctccagggcagcctgcactcagatggctccagcgggggcagcagtggcaatacccatgatgactttgttatgatagactttaaaccagctttttctaaagatgacattcttccgatggacctggggaccttctatcgggagtttcagaacccacctcagctgagcagcctctccatagatattggagcacagtccatggctgaagacttggactcattaccagagaagctggctgtgcatgagaagaatgtccgcgagtttgatgcctttgtggaaaccctgcagtaaaagtatccttgagtcccagcagcaccccctttttgtggccccagggcataagcagcctcccatgcatcagctgctcccacccctcatcctgctctgagccaggtggaagggaggctggcttctcccatggggacccagaagtccctactcttggacctcctggagactccgtggcggcagtcaagcccagtgcccagttggagaagactcacgtgctggccttggagatgggaagaaccttcgtacgaaaaagccctcagcagggccatctgtgtgccctgcccatcaccaactgcttcccaagggtgtcatcctgttcctcctgctgccggcctcctgcctgggcctgccttgcagctggccccttccctgcctgctgtcaccatccactgtttgacattccagctggtggccaagagattggtgtggagtcgcagaaagaggaaggagacagtgccaggaggaagaaggaaggagtcccttagctctcttcattgtcccctttacttcctgctatcttcttctcctcttcttctctctcttgcctctatgcctgtatttctggcaatatgacaggcctgcctacccaagatcagaactccaaaaccactcccacccctgaaggtcgggagggtctgagcagccctggtggctgcctgtgctcaggtcctcagctccatgggaaataaaaatggcaccctgaatctctaggattttgtcacttggagtcacagcaaagttctcttcctcttgtccccccgttgctgctccttggttatagaacatggtaaatatttattactttcagagaaaccagatattttatagaggaaatatgtttgaggtgagttgtttttcacttggagaaggcggagggctcttcctgggacggagacctcctcctccggaggttattgagaatccgggctgctgctttgaggatcttcccaccatacagacagcgagatccaagaagagggctggccgggggcaaagtcacctcccagtgtggctgcactggaactgactaaaggctttaccttggatagttgcgtattcctggtgagagccttacatctcccacagtttctgcagagtgactgactccattctggcagcccaggaagtcctgggtgctaaatgtgatggccacatgtagtggttaggggatgttgtgtgtgtcccccaactgcctgggtacttgttcctgatccctggggctgtcctgtggagcttttcctcctgcttgggcctagctaccatctccctctaatcccaggttctctacactgccctggggtttaccagctggattggcttctggttgagaaatcaaagctgggcgtatgattgacttaacccttcaggtattgttacttgaataagtcaagtgcctagcctcacccacctatgatctgtcctttcccagcctcgctggtagtcctggtcaaggagatctaggtctactccattcctcctggcccacctggggcattcactggcagcagctgtgcttcagtggagcaggtggttctcagctgcttgttagtatactgcatgtgacactgttcccacatacaaggctgacttctgaggattggagcaggctctggcggggaccagagctctgcgtgctgctgctgccaccaagaagtgttagcagaagcagtagcagccaactggccctcctgactttggcccagagcacatgcgtggcttgctgaacccaggctcaggtttatccccaaggccccagctttgagaagggggaaggcccctggtaagttattgatgcccccatatttcagctactgctctctttccaaggccttgcatggaaaggcctagccattgtctgaggcagcaatctttggcatctacaggtggcagcagcctttcaccagggctccatctgtgaagagtctcagccatgactttgagctgagcttgggagaagtaaagcaactgttaaggccagcccttgcccctcagacctgccatgaaaggaatgagccctagactgactcctgcagcacccccgggacaggctgggaccagctgtttgtctccaggtgtcagagtccctcctcctcctccaacctctccaacctactttgtttggaaataccgagctacacttcaaaatgtattcaagggatttccaataaatttttttctgtactttacagcctcctgtcctgtaggttgtctgaagacctcgtaaccccttccccacccctgccccagtgcaggtctgggaaaggggagagtggtgcgttgtgaagcgcagaaagacctcaagtgtctgggcaagcctgttttgagtcgggtgtggcctcttaggggctgtataccctggggtttcctgggtcaggaaacttcttagtatttctctttccctggtcccctatcaggggcttgaatttgaatattcagttggagaatgcatttaaaatacacccatagtaaaatctccataaaatgc

SEQ ID NO: 3170 - DNA, 460 bp, Homo sapiens
  source 1..460: mol_type = genomic DNA
acgctgcgggtcctgggcccaggccttgggatgggcgggaaggcttggccgcgccgggctgtgggcactgcaggaggcccctgtgcagatctcggcccctttccaaacactcctgatgcctcatttgcctctcgcctcttttcgaccaccattttgggggctgaggcactcacggggcctccccaggtttcactccgtttctacacagtcggagccccatggatctcccatctcccggaggaaccgtgaagccaaacagaagcgcctgcgagagaagcaggcgactctggaggctgagatagcaggggagagcaagtcacctgcagaatccattaaggcctggaggcctaaggagttagtattgtatgaaatccctacgaaacccggtgaaaagaaagatgtctctgggcccctgcctcctgcatacagcccccgatatgttgaggctgcctggtacccg

SEQ ID NO: 3171 - DNA, 1199 bp, Homo sapiens
  source 1..1199: mol_type = genomic DNA
gctttgcaagttcttcaccgcaaagaactgccgcagacttccgcctgggtgccaaccacgtgatcacgcgagcgttggagaggccctaaattatacagatctgtgattgaagatgtcattaatgatgtgagagacatctttctggatgatggagtggatgaacaagtactgatggaactaaaaactttatgggaaaacaaactaatgcagtccagggcagtagatggatttcattcagaagagcagcagcttctactgcaagttcaacagcagcatcaaccccagcagcagcagcatcaccaccatcaccatcatcagcaagctcagcctcagcagacagtacctcagcaagcgcagacccagcaggttcttattcctgcatcacagcaagccacagcaccacaagttattgttccagattctaagttgatacagcatatgaatgcatcaaacatgagtgctgctgctacagctgctaccttagcactccctgcaggtgtgactcctgttcagcagatattaacaaattcaggccagcttcttcaggtggtcagagcagccaatggtgcccaatatatctttcagcctcagcagtcagtggttctacaacaacaggttataccacaaatgcagcctggtggagtacaagctcctgttatacagcaggtgctggctcctcttcctggagggatttcaccacagacaggtgtcatcatccagcctcagcaaatcttatttacaggaaataagactcaagttatacctacgacagtggcagcacctacaccagcccaagcacagataactgcaactggccagcagcaaccgcaggcccagcctgctcaaacacaagctccattggtcttacaagttgatggaactggggatacatcatctgaagaagatgaagatgaagaagaagactatgatgatgatgaggaggaagacaaagagaaagatggagctgaagatgggcaggtggaagaagagcccctcaatagtgaagatgatgtgagtgatgaggaaggacaggaactctttgacacagaaaatgttgttgtatgccaatatgataagatacacagaagtaaaaacaaatggaaatttcatctcaaggatggcattatgaatcttaatggaagagattatatattttccaaagccattggagatgcagaatggtgaagagttgctttttt

SEQ ID NO: 3172 - DNA, 5584 bp, Homo sapiens
  source 1..5584: mol_type = genomic DNA
gtcgtgctctcctcggtaggggaggaattggttaggcggcggcggcggcgaagcggcggcggcggctgtaggggagcagcggcagtggcggcgacggcgaggaggtgttcggtttgcgcagcgtagaaacgcccgcagcttcagagaaggagttcttgtgggaccaaattaggcattctgaacccacgccggcttagctgggccgagtccaggcgctgccgcacgtacagttttggtggcggtgacagacactgttcttgactctaggggcctattaggccgacgtctgaggcgcagatcgctggctctcgacgcattactctttacgccttacatttctgtcttccttcctgggtcagtgattcccggaccctggaagagaagagggtggctaatgattaaggctttccttaaagtttcccatgtctcaatggactcctgaatataacgagctctacaccttaaaagtggatatgaagagtgagattccttctgatgcaccaaagacacaggagagtctgaaagggatccttttgcatccagagcccattggggcagccaaaagttttcctgcaggagttgagatgattaatagtaaagtggggaatgaattctctcacctgtgtgatgattctcaaaagcaagagaaggaaatgaatggtaaccagcaagaacaagaaaaaagtctcgttgtgaggaaaaaacgcaaaagccagcaggctggcccttcgtatgtgcagaattgtgttaaagaaaaccagggaatattaggactgaggcaacacctagggacaccaagtgatgaagataatgattcctcttttagtgattgtctttcttctccttcatctagtctgcattttggagattctgatactgtgacttcagatgaggataaagaagtctctgtaagacattcccagaccattttgaatgctaaaagtagaagccatagtgcacggtctcataagtggcctcggactgagacagaatctgtatcgggattgttaatgaaaagaccctgtttacatggcagttcgttacggagacttccatgcagaaagagatttgtaaaaaataattcctcacagaggacacagaaacaaaaagagaggatattaatgcagaggaagaaacgagaagtgttagctcgaagaaaatatgccttgctacctagttctagtagttccagtgagaatgacctcagcagtgaatcctcttctagctcatcaactgaaggagaagaagatttgtttgtttctgccagtgaaaaccaccaaaacaatccagctgttccctcaggaagtattgatgaagatgttgtggtgatagaagcttcctccactccccaggttactgccaatgaagaaattaatgttacctcaactgacagtgaagtggagattgtaacagttggagaaagctatcggtctcgttcaacccttggacactccagatctcattggagccagggttccagttctcatgcaagtcggccacaggagccacggaaccgcagtaggatttctactgttatacagcccttgaggcagaatgcagcagaagttgtggaccttaccgttgatgaagatgaacctactgtagtaccaaccacttctgcaagaatggaatcacaagctactagcgcttccattaacaattcaaatccatctacctctgagcaggcctctgatactgcttcagctgtcaccagtagccaaccttccacagtgtcagagacttcagctactcttacaagcaatagtaccactggcacttctataggagatgactcaaggagaactacatctagtgctgtaacggaaactggccctcctgcaatgccaaggttaccttcctgctgtccccagcactcaccatgtggagggtcgtcacagaaccaccatgcattaggacatcctcatacaagttgctttcagcagcatggtcaccattttcaacatcatcaccaccaccaccatactccccacccagctgtcccagtttctccttcctttagtgatcctgcttgccctgtggaaagacctccacaagtacaagcaccttgtggagcaaatagtagttctggtaccagctatcatgaacagcaggcattgccagtggacctgagcaacagtggtatcagaagtcatggaagtggcagttttcatggagcatctgcatttgacccctgctgccctgtttcttcctcccgagctgcaatctttggccatcaggccgctgctgctgccccaagtcaacctttatcatcaatagatggctatggatcaagcatggttgcgcagccccagccccagccccctccacagccctctctctcatcatgtcgacattacatgccacccccttatgcctctttgacaaggccacttcatcatcaagcttctgcctgcccgcattctcatggaaacccccctcctcagactcagcctccgcctcaagtggattatgttattcctcatcctgtacatgctttccattctcaaatatcttctcatgcaacatctcatcctgtggcacccccaccaccaactcacttagccagtacagctgcaccaatccctcagcatcttcctcctacacaccagccaatttcgcaccatattccagccacagcacctccagcacagagactgcatcctcatgaagtgatgcagaggatggaagttcaaaggaggaggatgatgcagcatccaactggtctttttgtgttctgtgtttccaggcgggcacatgaacgccccccaccccatccacataggatgcacccaaactatggtcatgggcatcatattcatgtgcctcagactatgtcctcacatcctcgacaggctccagagaggtctgcctgggaactgggaattgaagctggagtgactgcagctacttatacacctggtgcattgcatcctcacttggcccattatcacgcacctcctcgacttcatcacttacaattaggagctcttcctttaatggttcctgatatggcaggctatcctcacatccgttacatttcatcaggattggatggaacatcattcagaggtcctttcaggggcaattttgaggaactgattcatttggaagaaagattaggcaatgtcaatcgtggagcatcccaggggacaattgaaagatgtacatatccacataaatacaaaaaggtaacaactgattggttctcacagaggaaactgcactgcaaacaagatggggaagaagggactgaggaagacacagaggaaaaatgtactatctgtttgtctattttagaggaaggtgaagatgtgagacgtcttccatgtatgcaccttttccaccaagtgtgtgttgaccaatggttgattaccaataagaagtgccccatatgcagagtggacattgaggcccagctgccaagtgaaagttgacaccatgtttcagaactcttgccctccctctcattcccatccttcctggtactgcagtcaaccaaagatggcatgacttacctgcgcagatttggaagcattgaacttagagtgctggctctgctatatggtacaactaatgctagacctacagtttatgtatacagttgattttgatgtatttataaaagcttttttttctagatttgacatttttctgtatcattttactgtatttttgcatggttccttgtattgcatttctttgcacatattatgggcttgtgaccctaaacttgcaggcaaggttagctgctttagtaagtagaattttgtggtctttttgttttttacatagtaccaagccttgataattatgaattttttatccattactaacctttaatttaatcaatcatgtactttagtttaatgtataaagatcctctagaaaatgataatattgtgtattaagacattccttaattaggacaaaatggctgctgtatatttactatatggagttctgagttaaataccatccttaatactgggaacagaatacaacccatataaatcagatgcaggtggtagtcacatcaccagagtgatcagtataaattttcttggtgtatccttttcctttcaacacagtgcagataagagttgaatattgatatcatacatttagactgctgttctgattgcatttatctttttcctacatcatttagaattttatttccctgattcagtttttgctgctgtgaaacagctctgatgaacactaaatattaatttcaattagctagattgtacatacttgcagatttaacaaaattttagggaaattgaaaaagacatgtagaatttgttgtcttctgctaagcacgaaaagttaagatatctgcttacattgattttgtagacacattaagtcaagatttggaatttaagtcactggcaggtatctgtgcattcatagaacttataaaggtcccaggatcacttttaagggatttttattagtttaaaggtaaataaagtcagctgaatctacatgtctcttgttttatttctctctaaacttgaaaacagtaaatctgcagatactgtgaggcacaaattatactgtcaacctactgttgctatggttatatactcccacttcatacattaccaagagtcgatcactgatttaaaatttttaatttctatagttaagatttactgcataatatagaatataaagttaagttaacatactaacatttctcctttggaggaagttttaatctacttcaggatgcatattattatcaagatactttcatatacaggatagcctaattttatttgtttaaatatgcttaatatgccccagattgcaaatgcatccagtcagtaatatcactgtctgtatgtggaggacatgttcccatggatcatatgtgaagatgtcaataagcttgcattaagccacctgctttgtaagtggattgattaataaataacttatatttctattgtctttgtgtttcataattagtttttataaaaacagtttacattaaacatcttggaattcaacaatagtgatctcactcaaattgacatttgcataatttgacatttatattcattcagttatgactacttgcccttttcttcatattagtaaatgttacactgtagtagttgtcaatgttaacaggcttcaacatagtatgtgtgcagatggacgatggatttaaagagcataccttatgattaaaccgaggttatagaaggtcaggggagagtgaaggagtcagtgacctatgtctgccatcttactggggaaaagagcaagtagcctgtcttcctttaagtaagtagcctgtaatggatgtactactttgccactggaataccccgggtctgtgccaagggactgaagaagtgtaagatggggagaactgtatgtcatggagtcctcttgacgttcccccagatacaagtaaagcacaggtggatttctctatttttgaatactacatcagatttagatgcacgactacctgttgacttgttttataattgctactgatttttttaatgtaggcaaagctttgttactttgaaatttatttaataaaagtatttgtgac

SEQ ID NO: 3173 - DNA, 3818 bp, Homo sapiens
  source 1..3818: mol_type = genomic DNA
cgtcccccagccccggcctcccgcggacccatgcccgcccgtatcggctactacgagatcgaccgcaccatcggcaagggcaacttcgcggtggtcaagcgggccacgcacctcgtcaccaaggccaaggttgctatcaagatcatagataagacccagctggatgaagaaaacttgaagaagattttccgggaagttcaaattatgaagatgctttgccacccccatatcatcaggctctaccaggttatggagacagaacggatgatttatctggtgacagaatatgctagtggaggggaaatatttggaggatttggacatcagcaattctcattctgccccgagctgcctattgctgagtcctggagaagtgcagttaagagatgggggccccttcttctactcagcccccacttgtggaacttgatcagaccacctggtggcccatggtagaatggcagaaaaggaggcacgtcggaagttcaaacagatcgtcacagctgtctatttttgtcactgtcggaacattgttcatcgtgatttaaaagctgaaaatttacttctggatgccaatctgaatatcaaaatagcagattttggtttcagtaacctcttcactcctgggcagctgctgaagacctggtgtggcagccctccctatgctgcacctgaactctttgaaggaaaagaatatgatgggcccaaagtggacatctggagccttggagttgtcctctacgtgcttgtgtgcggtgccctgccatttgatggaagcacactgcagaatctgcgggcccgcgtgctgagtggaaagttccgcatcccattttttatgtccacagaatgtgagcatttgatccgccatatgttggtgttagatcccaataagcgcctctccatggagcagatctgcaagcacaagtggatgaagctaggggacgccgatcccaactttgacaggttaatagctgaatgccaacaactaaaggaagaaagacaggtggaccccctgaatgaggatgtcctcttggccatggaggacatgggactggacaaagaacagacactgcagtcattaagatcagatgcctatgatcactatagtgcaatctacagcctgctgtgtgatcgacataagagacataaaaccctgcgtctcggagcacttcctagcatgccccgagccctggcctttcaagcaccagtcaatatccaggcggagcaggcaggtactgctatgaacatcagcgttccccaggtgcagctgatcaacccagagaaccaaattgtggagccggatgggacactgaatttggacagtgatgagggtgaagagccttcccctgaagcattggtgcgctatttgtcaatgaggaggcacacagtgggtgtggctgacccacgcacggaagttatggaagatctgcagaagctcctacctggctttcctggagtcaacccccaggctccattcctgcaggtggcccctaatgtgaacttcatgcacaacctgttgcctatgcaaaacttgcaaccaaccgggcaacttgagtacaaggagcagtctctcctacagccgcccacgctacagctgttgaatggaatgggcccccttggccggagggcatcagatggaggagccaacatccaactgcatgcccagcagctgctgaagcgcccacggggaccctctccgcttgtcaccatgacaccagcagtgccagcagttacccctgtggacgaggagagctcagacggggagccagaccaggaagctgtgcagagctctacctacaaggactccaacactctgcacctccctacggagcgtttctcccctgtgcgccggttctcagatggggctgcgagcatccaggccttcaaagctcacctggaaaaaatgggcaacaacagcagcatcaaacagctgcagcaggagtgtgagcagctgcagaagatgtacggggggcagattgatgaaagaaccctggagaagacccagcagcagcatatgttataccagcaggagcagcaccatcaaattctccagcaacaaattcaagactctatctgtcctcctcagccatctccacctcttcaggctgcatgtgaaaatcagccagccctccttacccatcagctccagaggttaaggattcagccttcaagcccaccccccaaccaccccaacaaccatctcttcaggcagcccagtaatagtcctccccccatgagcagtgccatgatccagcctcacggggctgcatcttcttcccagtttcaaggcttaccttcccgcagtgcaatctttcagcagcaacctgagaactgttcctctcctcccaacgtggcactaacctgcttgggtatgcagcagcctgctcagtcacagcaggtcaccatccaagtccaagagcctgttgacatgctcagcaacatgccaggcacagctgcaggctccagtgggcgcggcatctccatcagccccagtgctggtcagatgcagatgcagcaccgtaccaacctgatggccaccctcagctatgggcaccgtcccttgtccaagcagctgagtgctgacagtgcagaggctcacagtgcacatcagcagccgccacactataccacgtcggcactacagcaggccctgctgtctcccacgccgccagactatacaagacaccagcaggtaccccacatccttcaaggactgctttctccccggcattcgctcaccggccactcggacatccggctgcccccaacagagtttgcacagctcattaaaaggcagcagcaacaacggcagcagcagcagcaacagcagcaacagcaagaataccaggaactgttcaggcacatgaaccaaggggatgcggggagtctggctcccagccttgggggacagagcatgacagagcgccaggctttatcttatcaaaatgctgactcttatcaccatcacaccagcccccagcatctgctacaaatcagggcacaagaatgtgtctcacaggcttcctcacccaccccgccccacgggtatgctcaccagccggcactgatgcattcagagagcatggaggaggactgctcgtgtgagggggccaaggatggcttccaagacagtaagagttcaagtacattgaccaaaggttgccatgacagccctctgctcttgagtaccggtggacctggggaccctgaatctttgctaggaactgtgagtcatgcccaagaattggggatacatccctatggtcatcagccaactgctgcattcagtaaaaataaggtgcccagcagagagcctgtcatagggaactgcatggatagaagttctccaggacaagcagtggagctgccggatcacaatgggctcgggtacccagcacgcccctccgtccatgagcaccacaggccccgggccctccagagacaccacacgatccagaacagcgacgatgcttatgtacagctggataacttgccaggaatgagtctcgtggctgggaaagcacttagctctgcccggatgtcggatgcagttctcagtcagtcttcgctcatgggcagccagcagtttcaggatggggaaaatgaggaatgtggggcaagcctgggaggtcatgagcacccagacctgagtgatggcagccagcatttaaactcctcttgctatccatctacgtgtattacagacattctgctcagctacaagcaccccgaagtctccttcagcatggagcaggcaggcgtgtaacaagaaacagagagttttgtgtacagcttgggaatgaaaaggttgattgtaa

SEQ ID NO: 3174 - DNA, 1896 bp, Homo sapiens
  source 1..1896: mol_type = genomic DNA
atcagaccattgagatgtggaagctgttgctgtgggttggtgctgcccataaactcgtgtgttatttcaccaactgggcacacagtcggccaggccctgcctcgatcttgccccatgacctggacccctttctctgcacccacctgatatttgcctttgcctcaatgaacaacaatcagattgttgctaaggatctccaggatgagaaaattctctacccagagttcaacaaactaaaggagaggaacagagagctgaaaacactactgtccatcggcgggtggaactttggcacctcaagattcaccactatgttgtccacatttgccaaccgtgaaaagtttattgcttcagttatatcccttctgaggacacatgactttgatggtcttgaccttttcttcttatatcctggatttcatcaatgtcttgtcttatgacttacatggaagttgggaaaggttcacaggacataatagccccctcttctctctgcctgaagaccccaaatcttcggcatatgctatgaattattggagaaagcttggggcaccctcagagaagctcatcatggggatccccacctatggacgtacctttcgcctcctcaaagcctctaagaatgggttgcaggccagagcgatcggaccagcatctccagggaagtacaccaagcaagaaggcttcttggcttattttgagatttgttcctttgtctggggagcgaagaagcactggattgattaccagtatgtcccgtatgccaacaaggggaaagagtgggttggctatgacaatgccatcagcttcagttacaaggcatggtttataaggcgagagcattttgggggggccatggtgtggacattggacatggatgacgtcaggggcacgttctgtggcactggccctttcccccttgtctacgtattgaatgatatcctggtgcgggctgagttcagttcaacttctttaccacaattttggctgtcatctgctgtgaattcttcaagcactgaccctgaaaggctggctgtgaccacggcatggaccactgatagtaagattttgcccccaggaggagaggctggggtcactgagatccacggaaagtgtgaaaatatgactataacccctagaggtacaactgtgacccctacaaaggaaactgtatcccttggaaagcacactgtagctctaggagagaagactgagatcactggggcaatgaccatgacttctgtgggtcatcagtccatgacccctggagagaaggccctgacccctgtgggtcatcaatctgtgaccactggacagaagaccctgacctctgtgggttatcagtctgtgacccctggggaaaagaccctgacccctgtgggtcatcagtctgtgacccctgtgagtcatcagtctgtgagccctggaggaacgactatgacccctgtccattttcagactgagacccttagacagaatacagtggcccctagaaggaaggctgtggcccgtgaaaaggtgactgtcccctccagaaacatatcagtcacccctgaagggcagactatgcctttaagaggggagaatttgacttctgaggtgggcactcaccccaggatgggtaacttgggtcttcagatggaagctgaaaacaggatgatgctgtcctccagccccgtcatccagctcccggaacaaactcctctagcttttgacaaccgctttgttcccatctatggaaaccattcctctgtcaactcagtaacccctcaaacaagtcctctttctctaaaaaaagaaatcccagaaaactctgctgtggatgaagaagcctaagcccctctggtgtcagaaaccagggaaaacccttgtcttttcttctaagtgacatgttgg

SEQ ID NO: 3175 - DNA, 1572 bp, Homo sapiens
  source 1..1572: mol_type = genomic DNA
ctttccggcaggctactgggctccgcccacacacctcccggcctggttcctaaacgccagctcggagcaatccccttgggctggagccaaatccctgctgtgattttaaggaagaccggcagggtggcaaccaactatatctgaggaccagagccattttggggcaccagagcttgtgacctctccatctccacccagctgggtccaggggccactctcagcactcacctcagcagctgacatcataaagcagacttgggaacctggaagcactctggagaacctttccctgagacatggagctttggggccgaatgctgtgggccctcctgtctggcccagggaggaggggaagtacccggggctgggccttcagctcatggcaaccccaaccacctctggctgggttatccagtgccatagaactggtcagccactggactggggtctttgagaagaggggtatccctgaggcccgggaatccagtgagtacatcgtggctcatgtccttggagccaaaacatttcagagcctgaggccggcactttggacccagcccttgacctctcagcaactacagtgtatccgggagctgagtagccgtcgattgcagaggatgccggtgcagtacatccttggagagtgggacttccaggggctcagcctaaggatggtgcccccagtgtttattcctcggccagaaacagaggaactggttgagtgggtgctggaagaggtggcccagaggtcccatgctgtgggatccccaggcagccccctcattctggaggtgggctgcggatcaggagccatctccctcagcctgctgagccagctcccccagagccgagtcattgctgtggataagcgggaagctgctatctctctgacccatgagaatgctcagaggcttcggttgcaggacaggatttggatcatccacctcgacatgacctcagaaaggagctggacacacctgccctggggccccatggacctgattgtcagcaaccctccctacgtcttccaccaggacatggagcagctggcccctgagatccgcagctatgaagaccccgcggccctggatggtggggaggagggcatggacatcattacccacattctggccttggcaccccggctcctgaaagactctggtagtatcttcttagaagtggacccaaggcacccggagcttgtcagcagctggcttcagagccggcctgacctgtaccttaatcttgtggctgtgcgcagggacttctgtgggaggccccggttcctgcatatccggaggtctgggccatagcatggctgccctgtggatgccttgtcagtgccgccagcctgaccagaggggaggtggatggcactttccagagcccaggttcttatggcatttcccagggttctgtgatttccccatgctctgcatttctaggatatttctaggacacctggattggctccatcacatcagagtggctgagggcagttgctctgtgttggtgaaattgctgtgggggtatcgggggatatggccagtaaagtattgagagactaacaaa

SEQ ID NO: 3176 - DNA, 3307 bp, Homo sapiens
  source 1..3307: mol_type = genomic DNA
aataaatttctctgtgattggttggtgaaggttttcaaaccggagctgtgggcgcggcgctgctctgccgttgggtgaggcgcggagcgaagtgaagggtggcccaggtggggccaggctgactgaatgtatctcctagctatggactaaataatacatggggggaaataaacaagtattcatgagggtgaaaatgtgacccagcaggaaaattacaactattttcaattgacgttgaatagggtgagtaaattttagctttttgagttacaatttggctgagatatcagagttacagaaagatggatactatgatgctgaatgtgcggaatctgtttgagcagcttgtgcgccgggtggagattctcagtgaaggaaatgaagtccaatttatccagttggcgaaggactttgaggatttccgtaaaaagtggcagaggactgaccatgagctggggaaatacaaggatcttttgatgaaagcagagactgagcgaagtgctctggatgttaagctgaagcatgcacgtaatcaggtggatgtagagatcaaacggagacagagagctgaggctgactgcgaaaagctggaacgacagattcagctgattcgagagatgctcatgtgtgacacatctggcagcattcaactaagcgaggagcaaaaatcagctctggcttttctcaacagaggccaaccatccagcagcaatgctgggaacaaaagactatcaaccattgatgaatctggttccattttatcagatatcagctttgacaagactgatgaatcactggattgggactcttctttggtgaagactttcaaactgaagaagagagaaaagaggcgctctactagccgacagtttgttgatggtccccctggacctgtaaagaaaactcgttccattggctctgcagtagaccaggggaatgaatccatagttgcaaaaactacagtgactgttcccaatgatggcgggcccatcgaagctgtgtccactattgagactgtgccatattggaccaggagccgaaggaaaacaggtactttacaaccttggaacagtgactccaccctgaacagcaggcagctggagccaagaactgagacagacagtgtgggcacgccacagagtaatggagggatgcgcctgcatgactttgtttctaagacggttattaaacctgaatcctgtgttccatgtggaaagcggataaaatttggcaaattatctctgaagtgtcgagactgtcgtgtggtctctcatccagaatgtcgggaccgctgtccccttccctgcattcctaccctgataggaacacctgtcaagattggagagggaatgctggcagactttgtgtcccagacttctccaatgatcccctccattgttgtgcattgtgtaaatgagattgagcaaagaggtctgactgagacaggcctgtataggatctctggctgtgaccgcacagtaaaagagctgaaagagaaattcctcagagtgaaaactgtacccctcctcagcaaagtggatgatatccatgctatctgtagccttctaaaagactttcttcgaaacctcaaagaacctcttctgacctttcgccttaacagagcctttatggaagcagcagaaatcacagatgaagacaacagcatagctgccatgtaccaagctgttggtgaactgccccaggccaacagggacacattagctttcctcatgattcacttgcagagagtggctcagagtccacatactaaaatggatgttgccaatctggctaaagtctttggccctacaatagtggcccatgctgtgcccaatccagacccagtgacaatgttacaggacatcaagcgtcaacccaaggtggttgagcgcctgctttccttgcctctggagtattggagtcagttcatgatggtggagcaagagaacattgaccccctacatgtcattgaaaactcaaatgccttttcaacaccacagacaccagatattaaagtgagtttactgggacctgtgaccactcctgaacatcagcttctcaagactccttcatctagttccctgtcacagagagtccgttccaccctcaccaagaacactcctagatttgggagcaaaagcaagtctgccactaacctaggacgacaaggcaacttttttgcttctccaatgctcaagtgaagtcacatctgcctgttacttcccagcattgactgactataagaaaggacacatctgtactctgctctgcagcctcctgtactcattactacttttagcattctccaggcttttactcaagtttaattgtgcatgagggttttattaaaactatatatatctccccttccttctcctcaagtcacataatatcagcactttgtgctggtcattgttgggagcttttagatgagacatctttccaggggtagaagggttagtatggaattggttgtgattctttttggggaagggggttattgttcctttggcttaaagccaaatgctgctcatagaatgatctttctctagtttcatttagaactgatttccgtgagacaatgacagaaaccctacctatctgataagattagcttgtctcagggtgggaagtgggagggcagggcaaagaaaggattagaccagaggatttaggatgcctccttctaagaaccagaagttctcattccccattatgaactgagctataatatggagctttcataaaaatgggatgcattgaggacagaactagtgatgggagtatgcgtagctttgatttggatgattaggtctttaatagtgttgagtggcacaaccttgtaaatgtgaaagtacaactcgtatttatctctgatgtgctgctggctgaactttgggttcatttggggtcaaagccagtttttcttttaaaattgaattcattctgatgcttggcccccatacccccaaccttgtccagtggagcccaacttctaaaggtcaatatatcatcctttggcatcccaactaacaataaagagtaggctataagggaagattgtcaatattttgtggtaagaaaagctacagtcattttttctttgcactttggatgctgaaatttttcccatggaacatagccacatctagatagatgtgagctttttcttctgttaaaattattcttaatgtctgtaaaaacgattttcttctgtagaatgtttgacttcgtattgacccttatctgtaaaacacctatttgggataatatttggaaaaaaagtaaatagctttttcaaaatgaa

SEQ ID NO: 3177 - DNA, 1968 bp, Homo sapiens
  source 1..1968: mol_type = genomic DNA
ccacccgcctctggctcctctccttcccacccctgccgtgctccggcaggaagaggtggtgccagggccgttgctaggatacgaccaacagctgagaacgcggcgagtatggaagctgcgtcttaggagcctgggaaagcacttcgacgagaatagtttggtttcgtacacaggaaaatgtctaatcaacaggagaagtatgaagctcagaatatagtcaattcaacagaagagagtgatgatgcttttgatactgtcactattccagttccctcagaagagcctcaagagtcagatcaaactgaagagcatgaatctggaatagaacaattcagtgagagccatgcaatacatgttgaggagcagagtgaccaaagcttttcaagcctggaaccagacaatgaacaactcatggaagaggttatatcaccaagacaagtttcatatactccgcaacatcatgaaaagcaatatgcaatgcagaggccaaatgatgatagtttggcatttctggataaaataaagtctgtaaaggaatctttgcaagaatcagtggaagattctctagcaacagtaaaagttgtacttattccagtgggccaggaaattgtaataccttttaaggttgataccattcttaaatatcttaaggaccatttttcacacttattaggtatcccacattctgtactgcagataagatactcaggaaaaattcttaaaaataatgagactctagtacaacatggagttaagccacaggaaattgtacaagtggaaatcttttctacaaatccagatctgtatccagtcagaagaatagatggattaactgatgtctctcaaatcataactgtcactgtccaaactggacttgatcaataccagcaggtacctgttgagattgtcaaatctgactttcacaaaccatttcttggtggattcagacataaagtaacaggagtagagtatcacaatgctggaacacaaactgtacctaaaaggattcccgaaagactcagtatattttgtagggatacgcagacagtttttcagaaaaaaaatctccaacaaactacaaatacaacatccacacagatgactaacattggtgtatatgtatcaaatatgactgataaactggtaacaccaggaaagtatttttcagcagcagaataccatgctcaaagactaaaggcggtgatagtgatacagacttactacaggcaatggcatgctaaaatcttcgtagagaatttaagaagacagaaaagcttaagactggaatgggaaacacagcaagaactaaggaagataagagaaaaagaagaatggataaaattggactatcaccggaggcataatcctaaaacaaatgaagattttgaatttctttataatgcattagaattctggcggcaagaagaacttacacgtattaaccaatcttttactggagctgaaaggaaagctgctctgtgtgaacttctggaaaaagagactcagataattgcttccattgggagacatagatacattgcttatatggcaaatcaggaagcagcaatacaagcttttttggataagtgttcagctccaaaaatatggagaacccctaatggcaaaacaattgagatggatacgcagttcaccatcagagccagagagctgcaaaatatctataagtgcattatgctgaaaaatatctcccaagatgagaggctggatgtgctgttaactcttaaacacactgtaaaggaacatgaatgtaaactaactcaggaaattctagaattgattgacagagaggttgaccttatgatgagaggagtcaaacatcataaccttgaaggactcagaaaaagaattgcgacactcttttttcattatatcaaaacacctctgtttaatcctgaagttgcaaaataccttaagatgggtggagaatatctttccatggcattatag

SEQ ID NO: 3178 - DNA, 1399 bp, Homo sapiens
  source 1..1399: mol_type = genomic DNA
ctctaggccacaatgtccaagtacctgggacagggtctggcttaccaacatggtacaggacggcacttttaaaaccagggactcgacttggacgtgcgagtcaacaaggatggctgcagctcctccaagttactgttttgttgccttccctccacgtgctaaggatggtctggtggtatttgggaaaaattcagcccggcccagagatgaagtgcaagaggttgtgtatttctcggctgctgatcacgaaccggagagcaaggttgagtgcacttacatttcaatcgaccaagttccaaggacctatgccataatgataagcagacccgcctggctctggggagcagaaatgggagccaatgaacatggagtgtgcatagccaatgaagccatcaacaccagagagccagctgccgagatagaagccttgctggggatggatctggtcaggcttggtttagaaagaggggaaacagctaaagaagccttagatgtcattgtctccttgttggaagaacatggacaaggtgggaattactttgaagatgcaaactcctgccacagcttccaaagtgcatatctgattgtggatcgtgatgaagcctgggtgctcgagaccatagggaagtactgggctgccgagaaagtcacagagggagtgaggtgcatttgcagtcagctttcgctcaccactaagatggatgcagagcatccggaactcaggagttacgctcagagccaaggttggtggacgggagagggcgagttcaatttttccgaagtcttttctccagttgaggatcatctagactgcggtgctggcaaagacagcttagaaaaacaagaagaaagcatcacagtgcagactatgatgaacaccttacgggacaaagccagcggagtgtgcatagactctgagtttttcctcaccacagccagtggagtgtctgtcctgccgcagaatagaagctctccgtgcattcactacttcactggaacccctgatccttccaggtccatattcaagcctttcatctttgttgatgacgtaaaacttgtccccaaaacacagtctccctgttttggggatgacgaccctgccaaaaaggagcctcggttccaggagaaaccagaccgccggcatgagctgtacaaagcccacgagtgggcacgtgccatcatcgaaagtgaccaggagcaaggtcgcaagctgaggagcaccatgctggagctggagaagcaaggcctggaagccatggaagaaatcctgaccagctccgagccactggaccctgcggaagtgggggaccttttctatgactgtgttgacacggagattaagttctttaagtgaagtaagcgttccctttccccttcttatttaagacttcccacctta

SEQ ID NO: 3179 - DNA, 4329 bp, Homo sapiens
  source 1..4329: mol_type = genomic DNA
aagattatagagacttgctttagaaccacaagaagaaagaggaggccggcttttcagctagcatcatggcgtggccgtgcatcacgagggcctgctgcatcgcccgcttctggaaccagttggacaaagcggacatcgctgtgccgctggttttcaccaagtactcggaggccaccgagcacccgggcgccccgccgcagccaccgccgccgcagcagcaggcgcagccggcgctcgcgcccccctcggcgcgcgcggttgccatagagacgcagccagcccagggcgagttggatgcagttgcccgggcaacggggccagcgcctgggcctaccggcgagcgcgagccggcggcgggccccggccggagcgggccgggcccgggcctgggctccggctccacctccggccccgcggactcggtgatgcggcaggattaccgagcctggaaggtgcagcggcccgagcccagctgccggccgcgcagcgaataccagccctccgacgctcccttcgagcgcgagacccagtaccagaaggacttccgcgcctggccgctgccgcgccgcggggaccacccgtggatccccaagcccgtgcagatctctgcggcctcccaggcgtcggcgcccattctcggggcgcccaagcgccggccgcagagccaggagcgctggccagtgcaggccgccgctgaggcccgggagcaggaggcggcccccggcggagcgggtggcctggcggccggaaaggcgtccggggcggacgagcgcgacacgcgcaggaaggccgggcctgcctggattgtgcgccgcgccgagggcctggggcacgagcagacgccgctgcccgcggcccaggcccaggtccaggccaccggccccgaggctggcagggggcgcgccgcggcggacgccctcaaccggcaaatccgcgaggaggtggcgagtgcagtgagcagctcctacaggaatgaattcagggcatggacggacatcaagcctgtgaaaccaataaaggccaagccccagtacaagcccccagatgataagatggttcatgagaccagctacagtgctcagttcaaaggagaggccagcaagccaacaacagctgacaataaggtcattgatcgcagaagaatacgcagcctctacagcgaacccttcaaggaacccccaaaggtggaaaaacctagtgttcagagttccaaaccaaaaaagacctcagcgagccataagcccacgaggaaggccaaagacaagcaggcggtgtcaggccaggctgccaagaaaaagagcgcggagggcccgagtaccaccaagccagacgacaaggagcaaagcaaagagatgaacaataaactggctgaggcgaaagagtaaatttccctgcactttccttttactcttctctctctctccctccccccaactttttttttttaaaccaacaaaccaaaaaaggccacaaaattaattagaggcttctcatctgccttggtcctgagtgttccaggagctctttggtttggcttcttttgatggaagaatcctgcttcacagactgagtggcaggcctcctcctgagggcagcccctggagcaccaggaagcgttgccgctggctgtgccctcccctggcactctgactgcatgctgatgagcaaggcaggcaggtctgagaggcgaaacgaatctcccggcagtgcttggaagtgtctgtggggtctcctcctcccagatccccaagatctgtgtcactggtcgattttgaactttaggtacatgtgttcttttcaaaaattcagagaatcgtcatgtgccacagaagctcagcctgggcttcagcaattgacaaaatttgaagaaatattaaacaaaaataacaaaaaaagaaacaaccttggccttaatgtcaataaaagggagttgtgtctgttaagtggtcttttcatagaatcgtccattagaaatgtgtgcctgtgtttagcttcctatcagtgggctttaaattgtataccgagtcatagatacgccactgataactaaaactagatcagggctggtgaagaaggttaggtgttttaggtacattccagctgtcataggaagatcacagaaatgaggaggctgttttcctctgattctcctcggccgaccacctgtccaatgctgctggtttcgcagagcgaccggttggagatgtctgaggaagaaagttcaaggtgtagggatagtgtgtttggaatttgactttccatttctgagacccaagggggcgtagatgtagtggcaagtgtggcgatgtttactctcccttcctgaaccgctctggtctgctcctcagagagggcagcggtgccaggcctcaggtcagggagaatgtctgtgacttagctgcagactaggagactgccctgctaactaattagcaagcagctttgacctcattaatatataaaagcagctctcagtatattccgtgtcgtgtgtgtgtgtggccaaagcccccaagggtggcaagtgccaccttcgctgtgctagagttgtgttgtaggaattagtcagggagttgttgtgaaaaaaaaaaccccagtgcttgtgagggaactcaaaatagttaccagaaaaataatatttgccaatatgacgtgtatattgctcagcacactctgtatctcctgtccttaaaatcctcttgtccccggcattctgacacactgggctgccgtccggtgtcaagccccggcgcaggcttgctcttcttttacaatgaaaggggtgaagagtgagggtctcacagttccttacctcaaagtccctttaggtccttctggtttggaggaagtggagcctccacgaactctctcttactccgaccattcaggcagcaaagtctctgcttacatcattttggttgtcaccttggggctgagtgagaagtcttttgtaaattaattcggcgtgtgctacatgagccataattattaacagaacaggaatatcagaaacgaagttgttgatcaggcccactgcgaccttcctttctatctcagggtttaaaactgtgaggaaggagaagtatgaaggaaggtagaaaatgctggtgggtctccgtgtttatgagtcacagattttgaaagctatcaggaaatgactagagtggatcctggcactgattccaactctttgccagctaatcttaacatttagcagaaagctctagcaacatgatcttaattgtatccagaggatttgccaatgtatgttcagtctctcaagatttggcattagtcagacatgttgatgctagccacaatttggatttctccatagaataatcatttatttttgcagatcaaataaatcagagtttacaatgcacaggggatcatttatttagcattcccttgctagaagcccgtgtgccaggcactgtgctaggcgtggtgggcagtataaagaaatctgtctccacagccacacaaccagagggtgcacatgacttgatccctatgaccaagtcaagttggtgttgcccaaatcgcagtttgacataagggtcccacaggcttccccaccccccgcccccactcactgccccagggaccaacttcctaccctcacccaaggctttagaggacctgtagcatgtctttttcaacctgtcagtatccccttctgcttaacacacccactgagaaaaccctgtttgtagttcactttgactcttgaatgtgtcactttactggcaagagacttcctttgatttctactgtttacaaataaaactcagccagtctcattctatatcccaaacgtactgaatgaaactgattttggttccacaagcagtgtttgggtgttgccttcctgaaggtgaccaagcttccaaagctcgtcccactggcctctgtacatttccctgtggttctccgtccttccctggcgagggagctgggactgaagctttcccgctgtttccctgcctgcaaaagcagccccaagagctgcgcattggcttccctcagcaatctgtcctgtctgtgctcccattcggtccacatagctttctttgcctctctgaggcagacaggaagtgtctaattacgattttgtggcctgggttttgttgcataccacagattgtctatgtaacatgtagcgcacacctctcttggtgctatttcattcctgctgtaagagaatgacaaaaatattcatgtatagccaattgattgtgacgtgcttgtggtctgtgcttgctcagaaaaacaaacaaacaaacagtttttccaattataaataaatgctaaagacgaacacca

SEQ ID NO: 3180 - DNA, 1094 bp, Homo sapiens
  source 1..1094: mol_type = genomic DNA
ctcctggccacagcttgagctgggaggagggtggaggctgggccgcctcctggacccctgccctccctgcccggccttccaaggcccggcagcctcagtccactgctgggcctggaacacggagcagtggctgccctgcgaggaggtcctagagcagctccagcaggatggcggctccagcgtctctaaggcctgcagggggtccagccccatggggggcgccctaggcctccgacagctccccatctgtgctcctgcctgccggccatcctcaggccactcgccatgggcggctgcttctccaaacccaaaccagtggagctcaagatcgaggtggtgctgcctgagaaggagcgaggcaaggaggagctgtcggccagtgggaagggcagcccccgggcctaccagggcaatggcacggcccgccacttccacacggaggagcgcctgtccacccctcacccctaccccagccctcaggattgcgtggaggctgctgtctgccacgtcaaggacctcgagaatggccagatgcgggaagtggagctgggctgggggaaggtgttgctggtgaaggacaatggggagttccacgccctgggccataagtgtccgcactacggcgcacccctggtgaaaggcgttctgtcccgtggtcgggtgcgctgcccctggcacggcgcctgcttcaacatcagcactggggacctggaggacttccctggcctggacagtctacacaagttccaggtgaagattgagaaggagaaggtgtacgtccgggccagcaagcaggccctacagctgcagcgaaggaccaaggtgatggccaagtgtatctctccaagtgctgggtacagcagtagcaccaatgtgctcattgtgggtgcaggtgcagctggcctggtgtgtgcagagacactgcggcaggagggcttctccgaccggatcgtcctgtgcacgctagaccggcaccttccctacgaccgtcccaagctcagcaagtccctggacacacagcctgagcagctggccctgaggcccaaggagtttttccgagcctatggcatcgaggtgctcaccgaggctcaggt

SEQ ID NO: 3181 - DNA, 582 bp, Homo sapiens; identical to SEQ ID NO: 3048
  source 1..582: mol_type = genomic DNA

SEQ ID NO: 3182 - DNA, 2367 bp, Homo sapiens
  source 1..2367: mol_type = genomic DNA
acccttcgtagtccgatttgagcactaaaggttgctgactgtgtagtgggcaaaggatcaagtgatgccgtttcgcctgacacgttcacagctactccagcctgcaggagggaccttcccacccccaagacctttgtacttcgttctgtactgaagaaaccctctgttaagatgtgtctagagagcttacaggaacactgtaacaacctctatgatgatgatgggactcatccgagcttaatctcaaatctcccaaactgttgcaaagagaaagaagcagaagatgaagaaaattttgaagcacctgcctttctaaatatgaggaagaggaagagagttacttttggagaggacttaagcccggaagtgtttgatgaatctttgccagcaaatactccattgcgtaaaggaggaacacctgtttgtaaaaaagacttcagtggtctcagttccctgctgcttgagcagtcacctgttcctgagccattacctcaaccagattttgatgacaagggggagaatcttgaaaacatagaaccacttcaagtatcatttgccgttctcagttctcctaataaatcatcaatctctgagaccctttcaggcactgatacctttagttcttcaaataaccatgagaaaatatcctctcctaaagttggtagaataacaaggacttctaacagaagaaatcaattggtcagtgttgtagaagagagtgtttgcaacttattgaatacagaagttcagccttgtaaagaaaagaaaattaataggaggaagtctcaagaaacaaagtgtacaaagagagcacttcctaagaagagtcaggttttaaaaagttgcagaaagaagaaaggaaagggaaagaaaagtgttcagaaatctttatatggggaaagagacattgcttctaagaagcccctcctcagtcctattcccgagctgcctgaagtccctgagatgacaccttccattccgagcatccgaagactgggttcaggttatttcagttcaaatggcaaactggaagaagtgaagactcctaaaaatccagtgaaaagaaaggatcttttgcgtcatgacccagatttgcatatgcatcaaggctatgataaatatgatgtctctgaattctgctcttatataaaaagttcctcatcgcttggcaatgctacttctgatgaagatccaaatacaaatataatgaacattaatgaaaataaaaatattccaaaagcaaaaaataagtcagaaagtgaaaatgaaccaaaagctggaactgacagtcctgtttcttgtgcttctgtaactgaagaacgtgtggcatcagatagtcccaaacctgctctgaccctgcagcagggtcaagaattttctgctggtggtcaaaatgcagaaaacctttgtcagttctttaaaatttcaccagatttaaacataaagtgtgaaagaaaggatgacttcttaggagctgcagaaggaaaactgcaatgcaatcgtttaatgcctaattcacaaaaagactgtcattgtttaggagatgtcttaattgaaaatacgaaagaatctaaaagccagagtgaggatttgggaagaaaacccatggaaagtagcagtgttgtgagttgcagagacaggaaagatagaagacgttccatgtgttattctgatggtcgaagtttacatttggaaaaaaatggaaatcacacaccatcctccagtgtgggcagctctgtagaaattagtttagaaaattctgaactgtttaaagatttgtctgatgccattgagcaaacctttcagaggagaaatagtgaaaccaaagtgcgacgtagcacgaggctacagaaggatttagaaaacgaaggtcttgtatggatttcacttccacttccttccacttcccaaaaagccaaaagaagaacaatatgtacatttgacagcagtggatttgaaagtatgtctcccataaaagaaactgtgtcctccagacaaaaaccgcagatggcacctcccgtctcagatccagaaaacagccagggccctgctgctggttcttccgatgaacctggtaagaggaggaagagcttttgtatatctacacttgcaaatactaaagccacttcccagttcaaaggctaccggagaagatcctctcttaatgggaagggagagagctctctgactgccttggaaaggattgaacataatggagaaagaaagcagtaattgacatttcctgcagagtctgtggcaagagggaaagtaaccatctatgctgaaatgatctgtctagttcccattctctgttcaacctcagtgtttcaaaagttcctaataaataaactcatttgagttgaacct

SEQ ID NO: 3183 - DNA, 3652 bp, Homo sapiens
  source 1..3652: mol_type = genomic DNA
gtgcgcctgcgcgttggcggcggctgtggcggggcccggcggggagctccctcgcctggctctcggcggcctgatggagtaagaggggttggctgtgaatctgtgacgttgagtgcttcagatctggtcactatggtacgagaacgaaaatgcatattatgccacatcgtgtacagctcaaaaaaggagatggacgaacacatgcggagcatgttgcatcacagggaacttgagaacctcaagggcaggtttggcatagaaatggtaccccttgttcaaaatgaacaagaagccttagatttggatggggaacctgatctgtccagtctagaaggattccagtgggaaggtgtttccatttcctcgtcccctggcttggcaagaaagcgaagcctttctgagagcagcgtgatcatggacagagctccttctgtgtatagcttcttcagtgaggaaggtacaggcaaagaaaatgagccccagcagatggtttcacctagtaactcattgagggctggacagagccagaaagcaaccatgcacctcaaacaagaagtgacacctcgggctgcctccctccgaacaggtgaaagggctgaaaatgttgctacccaaaggcgacatagtgcacaattatcctctgaccatataatacctttgatgcatttggcaaaagacttgaacagccaggagaggtctataccaccgtcagagaatcagaattcccaggagagtaatggagagggaaactgtctgtcatcaagcgcatcctcagcccttgcgatctccagtttagcggatgcagccacagatagtagctgtacctctggtgctgaacaaaatgatggccaaagtattagaaagaaacgaagagccactggagatggatcttctcctgaactcccaagtcttgagagaaaaaataaaagaaggaaaattaaaggaaaaaaagaacgttctcaggttgaccagctgctgaatatttctttaagggaggaagaacttagtaagtcattgcagtgcatggataacaatcttctgcaagcccgtgcagcccttcagacagcttatgtggaagttcagaggctacttatgctcaagcagcagataactatggagatgagtgcactgaggacccatagaatacagattctacagggattacaagaaacatatgaaccttctgagcacccagaccaggttccctgtagcctcacacgagaacgaaggaacagtagatctcaaacatccattgatgccgcactgctgcccactccctttttcccactttttctggagcctccatcttcccatgtgtctccatcacccaccggagcctctcttcaaataaccacgtctcctactttccaaacccatggcagtgtccctgctccagactcatcagttcagattaaacaagagcccatgtctcctgaacaagatgagaatgtgaatgctgtgccaccaagctctgcctgcaatgtgtccaaggaattactggaagctaatagagagatcagtgacagttgtccagtttatccagtcatcactgctagattgtccttaccagagtcaacagaaagtttccatgagcctagccaagaactgaagttttctgtggagcaaagaaataccagaaacagagaaaactctccctcttcccaatcagctggtctttctagcataaataaagaaggggaagagccaaccaaaggcaatagtgggtctgaagcctgtaccagttcttttctaagattgtcttttgcttcagaaacccctttggagaaggaaccccactctccagctgaccagcctgaacaacaggcagaatccactttgacatcagctgagactaggggaagcaagaaaaagaagaaactccggaagaagaaaagtctacgggctgcccatgttcctgagaatagtgacactgaacaggatgttttgactgttaaacctgtaaggaaagtaaaagctggaaagttaattaaaggggggaaagtaacaacctccacttgggaagacagcaggactggtcgggagcaggagagtgtcagagatgagccagatagtgactcgtctctggaagtcctagaaattcctaatcctcagttagaagtagtagccattgattcttcagaatcaggagaagagaaaccagacagcccatctaaaaaggatatttggaactctacagagcaaaacccactagaaacgtctcgttctgggtgtgatgaagttagctctaccagtgaaattggcactcgctataaagatggcatccctgtaagtgtggcagaaactcagactgtgatctcctccataaaaggatcaaagaattcttcagaaatatcttcagagccaggagatgatgatgaacccacagaaggaagctttgagggacaccaagctgccgtaaatgcaattcagatatttgggaacttgctatatacctgttcagcagataaaactgttcgggtttataatctggtgagtcggaaatgtattggtgtctttgagggtcatacctccaaagttaactgcctcctggttactcagacctccgggaagaatgctgccctttacaccgggtccagtgaccataccatccgctgctataatgttaagagccgagagtgtgtggagcagttacagctggaagaccgggtcctctgcctccacagtagatggcgaatcctctatgcgggactggcaaatggcactgtggtcaccttcaacataaagaacaacaaacgacttgagatctttgaatgccatggccctcgggcagtcagctgtcttgctacagctcaggaaggtgcccgaaaactgctggtcgtggggtcttatgactgcacaattagtgtacgcgatgcccggaatggactgctcctcagaactctggagggccatagcaaaaccattctttgcatgaaggtggtgaatgatctcgtgttcagtggctccagtgatcagtcagtccatgctcacaacattcacactggtgagctcgtgcggatctataaaggtcacaatcatgcagtgactgtggtgaatatcctaggaaaagtgatggtgactgcttgcctggataaatttgttcgtgtctatgaattacagtctcatgatcgattacaagtttatggaggacacaaagacatgattatgtgtatgaccatccataaaagcatgatttacactggctgttatgatggcagtattcaggccgtgaggcttaatctgatgcagaattaccgctgttggtggcatggttgctctctgatatttggcgttgtagatcatttaaaacaacacttgctgaccgaccacactaatcccaacttccagactctgaaatgtcgctggaagaactgcgatgcttttttcactgctaggaaaggatccaaacaggatgctgcaggacatattgaacgacatgctgaagatgacagcaaaattgattcatgaagttttttgcctcccacgttgggaagtcattagttgaactattttcacattggccccccacacaggccactctcttccctttcttggtgaagtaaggaaggagaaagtggttactagccaggcatacccctagcataagtctgggcagctctatgggatgataaattacacttttaagttcttg

SEQ ID NO: 3184 - DNA, 567 bp, Homo sapiens
  source 1..567: mol_type = genomic DNA
tggttggttttgttttgttttgtttttgaggacccaaagcatcagaattgtacaaactattctctttcctattgcattttcccttgagaacatgaactgacaaggaacaagcatcttcagataataagaaacagatacctaatgaagcttctgctagaagtgaaagagacacatcagacctagagcaaaactggtcattgcaagatcattatagaatgtattcacccataatataccaagccctctgtgagcacgtgcagactcagatgtcactgatgaatgacttgacttcaaagaacatccctaatggaattcctgctgtaccatgccatgctccctctcattctgaatctcaggcaactcctcattctagttatggcttatgtacctccaccccagtctggtcacttcagcggccaccctgccctccaaaggttcattctgaagttcaaactgatggcaacagtcagtttgcatcacaaggtaaaacagtttctgcaacctgtactgatgttctacggaattcatttaataccagtcctggagttccatgtagcctgcccaaaa

SEQ ID NO: 3185 - DNA, 439 bp, Homo sapiens
  source 1..439: mol_type = genomic DNA
ctgcgaagagagcagaaggggtgctgctgtaggaaatcaatggctcggaagaccacactgaggaaggtgtgagttgatactggaagatctccaggtttgaggcatcttcagaggtatatggtggttttgtgtgtgttgagggtgtggtagcgcagcagctccctagggaattagaaggttttattgaacatttaccctgtgacaggcactgcaggcattcagcgcgcagtgtcatcttcattttacaggcatcatggccgccctcagaccccttgtgaagcccaagatcgtcaaaaagagaaccaagaagttcatccggcaccagtcagaccgatatgtcaaaattaagcgtaactggcggaaacccagaggcattgacaacagggttcgtagaagattcaagggccagatcttgatgcccaacattggttatggaagc

SEQ ID NO: 3186 - DNA, 519 bp, Homo sapiens
  source 1..519: mol_type = genomic DNA
gtgacctcgaggcagcctcagcacggcactctcttgggtcctcttccaggctcacactgggcgacagcggagaggctcttggacggggcagagctcgcgccgagacctgcatgtccgcgtcttgtgacgggtgtgtgggaagccgcccgcctgtgcatcttgcttccgggtattcgctggctgatttactggttttagagatggggatgggcacccagtgctggactgaagaccagagaaggtggagctccctgtggccttggtctcacctctcttcagtcctcctggctgacaaggagggtgggccgccggcagtggacgaggtgttggatgaggctgtgcccgagtaccgggcgccggggaggaagagcctcttggagatccggcagctggacccggacgacaggagcctggccaagtacaagcgggtgctgctggggcccctgccaccggccgtggacccaagcctgcccaatgtgcaggtgaccaggctgacactcctgtcggaacaggctccgg

SEQ ID NO: 3187 - DNA, 2148 bp, Homo sapiens
  source 1..2148: mol_type = genomic DNA
ccggaagttgcagcgaggtggttgcgcctgcgcagtgcatcaccgcaggcgggcctcgcgggtccgggagcgcggcggagacgatgcctgagatcagagtcacgcccttgggggccggccaggacgtgggccgaagctgcatcctggtctccattgcgggcaagaatgtcatgctggactgtggaatgcacatgggcttcaatgacgaccgacgcttccctgacttctcctacatcacccagaacggccgcctaacagacttcctggactgtgtgatcattagccacttccacctggaccactgcggggcactcccctacttcagcgagatggtgggctacgacgggcccatctacatgactcaccccacccaggccatctgccccatcttgctggaggactaccgcaagatcgccgtagacaagaagggcgaggccaacttcttcacctcccagatgatcaaagactgcatgaagaaggtggtggctgtccacctccaccagacggtccaggtagatgatgagctggagatcaaggcctactatgcaggccacgtgctgggggcagccatgttccagattaaagtgggctcagagtctgtggtctacacgggtgattataacatgaccccagaccgacacttaggagctgcctggattgacaagtgccgccccaacctgctcatcacagagtccacgtacgccacgaccatccgtgactccaagcgctgccgggagcgagacttcctgaagaaagtccacgagaccgtggagcgtggtgggaaggtgctgatacctgtgttcgcgctgggccgcgcccaggagctctgcatcctcctggagaccttctgggagcgcatgaacctgaaggtgcccatctacttctccacggggctgaccgagaaggccaaccactactacaagctgttcatcccctggaccaaccagaagatccgcaagactttcgtgcagaggaacatgtttgagttcaagcacatcaaggccttcgaccgggcttttgctgacaacccaggaccgatggttgtgtttgccacgccaggaatgctgcacgctgggcagtccctgcagatcttccggaaatgggccggaaacgaaaagaacatggtcatcatgcccggctactgcgtgcagggcaccgtcggccacaagatcctcagcgggcagcggaagctcgagatggaggggcggcaggtgctggaggtcaagatgcaggtggagtacatgtcattcagcgcacacgcggacgccaagggcatcatgcagctggtgggccaggcagagccggagagcgtgctgctggtgcatggcgaggccaagaagatggagttcctgaagcagaagatcgagcaggagctccgggtcaactgctacatgccggccaatggcgagacggtgacgctgcccacaagccccagcatccccgtaggcatctcgctggggctgctgaagcgggagatggcgcaggggctgctccctgaggccaagaagcctcggctcctgcacggcaccctgatcatgaaggacagcaacttccggctggtgtcctcagagcaagccctcaaagagctgggtctggctgagcaccagctgcgcttcacctgccgcgtgcacctgcatgacacacgcaaggagcaggagacggcattgcgcgtctacagccacctcaagagcgtcctgaaggaccactgtgtgcagcacctcccagacggctctgtgactgtggagtccgtcctcctccaggccgccgccccttctgaggacccaggcaccaaggtgctgctggtctcctggacctaccaggacgaggagctggggagcttcctcacatctctgctgaagaagggcctcccccaggcccccagctgaggccggcaactcacccagccgccacctctgccctctcccagctggacagaccctgggcctgcacttcaggactgtgggtgccctgggtgaacagaccctgcaggtcccatccctggggacagaggccttgtgtcacctgcctgcccaggcagctgtttgcagctgaagaaacaaactggtctccaggctgtcttgcctttattcctggttagggcaggtggtcctagacagcagtttccagtaaaagctgaacaaaagacta

SEQ ID NO: 3188 - DNA, 1551 bp, Homo sapiens
  source 1..1551: mol_type = genomic DNA
aacctggccggcaatcagagaggatggggccactgctggtcgccctttctctcagagtaaaagtaattgtccaggagagtggtgtttgggtgtggaagggacgaagtctggctctgtcgcccaggctggagtgcagtggcacgatcttggcccactgcaatctccacttcccaggttcaagcgattctcctgcctcagcctcccgagtagctgggactacaggctcaggtggccttccttcagggagagaggaaagggcaggagaatctaaagacggacctggtgcggcggatcaagatgctagagtatgcgctgaagcaggaaagggccaaatatcataaactgaagtttgggacagacctgaaccagggggagaagaaagcagatgtgtcagaacaagtctccaatggccccgtggaatcggtcaccctggagaacagcccgttggtgtggaaggaggggcggcagcttctccgacagtacctggaagaggtgggctacacagacaccatcctcgacatgcggtccaagcgcgtccgttccctgctgggccgctcgctggagctcaacggggcagtggagccgagtgaaggggcccccagggctccaccaggccctgcagggctcagtggtggggagtcgctgctggtgaaacagatcgaggagcagataaagaggaacgcggcaggcaaagatggcaaagagcgcttgggcggctcagtgctggggcagatccccttcctgcagaactgcgaggacgaagacagcgacgaggacgatgagctggacagcgtgcagcacaagaagcagcgtgtgaagctcccatccaaggctctggtgcccgaaatggaagacgaggatgaggaagacgactctgaggatgctatcaatgagtttgatttcctgggctcaggagaggatggggaaggggctccagaccctcggcggtgcactgtggatgggagcccccatgagctggggccagagcttcacagccccacagagtggcagggggccctcagtgtggggaaggcgtcacctatgccagactgggttggaactgctgggtgactccggccctatgcctcgaccctgcagaaagccgtcgggtcaaactccaaggcattctggctgacctgcgggatgtggatgggctgcccccaaaagtgactggcccgcctcctggcacaccccagccccggccacatgaaggttcctttggcttctcctcagacgtcttcatcatggacactatcgggggcggggaggtgagcctgggggacttggcagatctcaccgtcaccaacgacaacgacctcagctgcgatctgtctgacagcaaagatgcttttaagaagacgtggaaccccaagttcaccctgcgctcgcactacgacggcattcgttccctggccttccaccacagccagtcggctctgctcaccgcctccgaggacggcacgctcaagctctggaacctgcagaaggcggtcacggccaagaagaatgcggcgctagatgtggaacctatacatgctttccgggctcaca

SEQ ID NO: 3189 - DNA, 1869 bp, Homo sapiens
  source 1..1869: mol_type = genomic DNA
tttccggcggcgccgggcgagaagcgcgactggagtctggggctgcggcttcccagaggcgcgagtcgcttttccaggagccgaggcccaaacggggccgggcctgaagggtcccccgccagcccgcggccgcgccatcaatcgccgccgcctcgtcccgcttctcggctgaggcgccgcgcggccaggcagcgggtccaggcctcagccgcgcgcccaggggcctccggggccctcccgggtcagcatgcccggggtgaaactgaccacccaggcctactgcaagatggtgctgcacggcgccaagtacccgcactgcgccgtcaacgggctcctggtggccgagaagcagaagccgcgtaaggagcacctccccctgggcggccccggcgcccaccacaccctcttcgtggactgcatccccctcttccacggcaccctggccctcgcccccatgctggaggtggctctcaccctgattgattcatggtgcaaagatcatagctacgtgattgctggttattatcaagctaatgagcgagtaaaggatgccagtccaaaccaggttgcagagaaggtggcctccagaatcgccgagggcttcagcgacactgcgctcatcatgtgactactgtgaagactggccagaggcacagaggatctcagcctcgctcctggacagccggtcctacgagacgctcgtggatttcgataaccacctggatgacattcggaatgactggacaaacccagagatcaataaagctgtcctacacttgtgctaggcaggcaccgctgtgactgggctccgggcctttccactacgttgaagaagaaaacctatttttaaatgtaaataaaatatcttgtagcctgtgtggaaagctgaccgttttaagaagtggcatgtgccttgaaagggggcagaatgttcagtcggtcgtgtttttaacacagagtctctagaagaggtgcagacatcccgtctgactgtccctgtggactctctcagttgtatgttgctataatcctccaaatcaaagctctttctgcttgtgcaagattgttcctattaaacagttttaactaaccttttataatctggagagaatactttttaaggcttttgaactatctttttttaaaaaaaaaaaaaaaagcccacatcttatactccaatgagtgtgtttgtgagtttttatcctgtttgaattttgatgtcgtccaggcgtcctgggatcagggtagacacgtggagtgctggtgctgagctgtttgagaagctctgtgtgggtgtttctgtggtcaggtaggctgggctgtgaacagcactgctccacatggtgtcggctcacagagccaccgcaactctgcccagcgggagtgacaccactgatgccacagaagcctttatcgttaggggcaaaagcagacatctctggtagcaggagctcagtgtggtgctcttcagccacgcagaaagctcacgtgcctgcagggccaggaaagggaaatgatcgtttcttttgtattaggaaaaacaagacttagacttcccgagttgtgcagagtgacgtctgtactttttatacttagaacatttggtcaagttttgtaaccaaaccttagggaattgagagggaaactttatggtacgtttaccttttttcctttttatatgaattattttgtacaaagttcagagagcggtacctttcctactgtcttttctttgactccatggaggaatttgtaacgatcggtgtgacctgaaagggtttgtgatacagcggtcactattttctcttaacacataggaaaaaagttcagacatcgctacaataaatgtgctttatttgatccaccaaa

SEQ ID NO: 3190 - DNA, 699 bp, Homo sapiens
  source 1..699: mol_type = genomic DNA
gtacgggagctggaggctgagcttgatgcagagcagaagaagcacgccgaggcccttaagggcgtgcgcaagcatgagcgccgtgtcaaggagctcgcataccaggtgggcgacagggtctccctggggagtggccctggagctggcccagcccaagcaagccctgagtcccccttgcccgcccaggccgaggaggacaggaagaacctggctcgcatgcaggacctggtggacaagctgcagagcaaggtcaagagctacaagcgccagtttgaggaggcggagcagcaggccaacaccaacctggccaagtatcgcaaggcccagcacgagctggatgatgcggaggagcgggcagacatggcggaaacccaggccaacaagctgcgggcacggacccgggacgccctgggccccaagctatccctttctcctcagcacaaggagtgacggcctgaccccctgggctctaaagaggaatgtctgctgttgcacatctggctgaggccacctgccccgatcctgccatctctgcatcgccccctgctgccttcagccttccctgggccctgaataaacaccacagccagtttccttctcattcttttctttggggttcaggaggaaaaacacagtcctagggacaaaagccaggtccacagcagtcatttttaaaataaagttatttaatagtctcca

SEQ ID NO: 3191 - DNA, 3714 bp, Homo sapiens
  source 1..3714: mol_type = genomic DNA
ttatcagagacattgagaggcaaattcggaaaaaagaaaacattcgtcttttgggagaacagattattttgactgagcaacttgaagcagaaagagagaagatgttattggcaaaaggatctcaaaaatcatgacttgaatgtgaaatatctgttggacagacaacacgagtttgtgtgtgtgtgttgatggagagtagcttagtagtatcttcatctttttttttggtcactgtccttttaaacttgatcaaataaaggacagtgggtcatataagttactgctttcagggtcccttatatctgaataaaggagtgtgggcagacactttttggaagagtctgtctgggtgatcctggtagaagccccattagggtcactgtccagtgcttagggttgttactgagaagcactgccgagcttgtgagaaggaagggatggatagtagcatccacctgagtagtctgatcagtcggcatgatgacgaagccacgagaacatcgacctcagaaggactggaggaaggtgaagtggagggagagacgctcctgatcgtcgaatccgaggatcaggcatcagtggacttatcgcacgaccagagtggggattccctcaacagtgatgaaggagacgtgtcttggatggaggagcagctgtcctacttctgtgacaagtgccaaaaatggataccagccagtcagctgagggaacagctcagttaccttaagggtgataatttttttaggtttacttgttcggattgctcagcagatggcaaggagcagtatgaaaggctgaagctgacatggcagcaagtcgtcatgttggcaatgtacaacttgtctctggaaggaagtggacgtcaaggttatttcaggtggaaagaagatatctgtgcttttattgagaaacattggacttttttactagggaataggaaaaagacgtctacctggtggagcaccgtggcaggttgcctcagcgtgggaagtcccatgtacttccgttcaggtgctcaggaatttggagagccaggatggtggaaacttgttcataacaagcccccaacgatgaaacctgaaggagagaagttgtctgcctctactttgaaaataaaagcagcctcaaaaccaactttagatcccatcattactgttgagggacttagaaaacgagcaagtcggaatcctgtggaatctgccatggaattaaaagagaaaaggtctcgaactcaggaagcaaaagacattagaagagcccagaaggaggccgctggctttcttgacaggagcacatcttctacccctgtaaaattcataagccgaggccgcaggccagatgtgattctggaaaaaggcgaagtgattgacttttcctccttgagctcctctgaccgcaccccgctgacaagcccatctccttctccttctctggatttctctgcccctggtacacctgcctctcattctgccacacctagcttgctttcagaagcagatctgattccagatgtgatgcccccacaagccttgtttcatgatgacgatgagatggaaggcgatggagtcatagacccagggatggagtacgtcccaccccctgctgggtcagtagcttctgggccagtggttggggtcagaaagaaggtcagaggccctgaacagataaagcaggaggtagagagtgaggaggaaaaacccgacaggatggatattgacagtgaagacacagattcaaacacatctttgcaaacaagggctagagaaaagaggaagcctcagctggagaaggacacaaagccgaaagagcccaggtatactcccgtgagcatctacgaggaaaagctgctgctcaagaggctggaagcttgtcccggtgctgttgccatgactccggaagctcggagactgaaacgcaaactgattgtcagacaagcgaaaagggataggggattaccactttttgacttggatcaagttgttaatgctgctcttttgttagttgacgggatttatggagccaaagaaggaggaatttccagacttccagctggacaagccacgtacagaaccacctgtcaggacttcagaatccttgaccgataccagacttccttgccgtccaggaagggatttcgacaccagaccaccaagtttttgtatcgcttggtaggatcagaagatatggctgtggaccagagtattgtcagcccttatacctctcggatcttgaaaccttatatcaggcgtgattatgaaacaaagccacccaaactgcagctcctgtcacagattcgttcccacctgcacaggagcgaccctcactggacgccggagcccgacgcacctctcgattactgttatgtgcggccaaatcacatcccaacgatcaactccatgtgtcaggagtttttttggcctggcattgacctgtctgagtgtctgcagtacccagacttcagtgttgttgttctttataaaaaagtcatcattgcctttggcttcatggttcctgatgtgaaatacaatgaagcttacatttcatttctgttcgtccaccctgaatggagaagagcagggattgcaactttcatgatctatcatctgattcagacctgcatgggcaaggacgtaacccttcacgtctcagcaagcaaccctgctatgctactgtaccagaagtttggattcaagactgaagaatatgtattagatttctatgataaatattacccattggagagtacagagtgtaaacacgcattctttctgaggctccggcgctgatgcgaatacagctcacagagaaacgcatgtgctattggagaacaggtctttgtggagatctaaaggcagtgattgatttcacagggagctctaatctctgtgattacatggtccttcaaactcccaaccaaagtgagaaaagcggcatgcagtgaaatgagcagtgagcagccctttagcaaaatcgccctccagtccttcctggagatgccttcagccagcatcccagactccacagttatttatgaatgatgtcgtgattctccctccacctgacagtttgtaagagtgaaagagcatctaacctgatgctcttggagagagataacctgtctgtcataacttaaaggatgagaaaatgtggtgtagctattaaagattcatgcagtcccaaaaggcactgtcctgggatgatgagagattataaggtgatttcataaaaggaatccaaccctgtgcccggccattgatgtgttgtcattgaatccaggaggatttctagggcactgaagttttgttgtttcttttgctgactttggttacagtcagaaaaaataaactagatgtttgtgtctacatgttctacctgttgtacctattagcatcttcctgcagggacttgggcccatggcctgggaggttggtttgggattggggttgttgggcagcctgccattcacctggcctatcctggcccttctcatgcccaagacagttgtttcacaggagtggaagtgtgggtgatgcaagtagaaccctctagatgtaccctgtgtggtctgcaggactggactgtttgctgtgtttgtggatgttggcgatagactgtcaattaggttgtttgtgatccaacaagaacatttccaaaagtatctaggtgttctcaaataaaaagctttctttgcacaacccatggccagagcgtcaa

SEQ ID NO: 3192 - DNA, 616 bp, Homo sapiens
  source 1..616: mol_type = genomic DNA
agtgtaatcatcatctgctttccacatataaaaatcaccttggttatctatagttcaatcttctaaagccttcaagcctctgaaattcttcaaaattcagaagaagtagaaggaagtttttgatgatgagtgaggtggaggaagccatgcagtgtgtggaagagctgaatgcccagggcctactacatgtttttgtgagagtgggagtggagtccaccctggaaaggagccagatcaccagggatcacatgggccaattactctatcagctggtacagtcagaaaaactcagcaaacaggactttttcaaaggtttttcagaaactttggaattggcagatgacatggccattgatattccccatatttggttgtaccttgctgaactggtgacccccatgttaaaagaaggtggaatctccatgagagaacttaccatagaatttagcaaacctttacttcctgttggaagagctggggtcttgctatctgaaatattgcacctactatgcaaacaaatgagccataagaaagtgggagccttatggagggaggctgacctcagctggaaggactttttaccagaaggagaagatgtacataattttcttttgga

SEQ ID NO: 3193 - DNA, 582 bp, Homo sapiens
  source 1..582: mol_type = genomic DNA
aacagaccgccgtgagagaggaggggcgccggccgggattcgcggcccggagctcgggaccggagtcaggaatggagagaagggtaatggtgttacctcttattgtggaaacctgttgagatcacagagaatatactgacggcataaaagggcagaaccatagcagggtgcgaagtcctcaccagtgaacggagacctctctgaactaagaataccatggccacgtcagccccactacggagcctggaagaggaggtgacctgctccatctgtcttgattacctgcgggaccctgtgaccattgactgtggccacgtcttctgccgcagctgcaccacagacgtccgccccatctcagggagccgccccgtctgcccactctgcaagaagccttttaagaaggagaacatccgacccgtgtggcaactggccagcctggtggagaacattgagcggctgaaggtggacaagggcaggcagccgggagaggtgacccgggagcagcaggatgcaaagttgtgcgagcgacaccgagagaagctgcactactactgtgaggacgacgggaagctgctgtgcgtg

SEQ ID NO: 3194 - DNA, 7211 bp, Homo sapiens
  source 1..7211: mol_type = genomic DNA
attcccctccacttcttgcctgagccgcctgctcctcttggaaacacgttgagcctccccgctggagagggagccagaacagggaagaacggattcacacaggatggcttgcagaagacgctatttcgtcgagggcgaggcccccagcagtgagactggcacatccctggacagcccctcagcctacccccagggccccttggtgcccggttccagcctgagcccggatcactacgagcacacgtcagtgggagcctatgggctgtactcggggccgccggggcaacagcagcgcacgcggaggcccaagctgcagcactcgacctccatcctgcgcaagcaggctgaggaggaggccatcaagcgctcacgctcactctccgagagctatgagctctcctcggacctgcaggacaagcaggtggagatgctagaacgaaagtatggggggcgcctggtaacccgccatgcggcccgcaccatccagacggcgtttcgccagtaccagatgaacaagaacttcgagcgcttgcgcagctccatgtcagagaaccgcatgtcacgccggattgtgctgtccaacatgaggatgcagttctcctttgaggggcctgagaaagtgcacagctcctacttcgaggggaagcaggtctcagtgactaacgacggctcccagctgggagccctggtgtcccctgagtgtggtgacctcagcgagcccaccaccctcaagtctccggccccctccagtgactttgcggacgccatcaccgagctggaggacgccttctctaggcaagtgaaatcactggccgagtccatcgacgatgccctcaactgccgcagcctgcacactgaggaggcaccggccctggatgcggcgcgggcccgggacaccgaaccccagacagccctgcacggcatggaccaccgcaaactggacgagatgacggcctcgtacagtgatgtcaccctgtacatcgatgaggaggagctgtcgccccctctgcccctctcgcaggcaggggaccggccgtccagcaccgagtcggacctgcggctacgggctgggggcgcagccccagactactgggccctggcccacaaagaggacaaggctgacacggacacgagctgccggagcacgccgtcgctggagcggcaggagcagcggctgcgggtggagcatctgccgctgctcaccatcgagccacccagcgacagctctgtggaccttagtgaccgctcggagcgggggtcactcaagaggcagagtgcttacgagcgcagccttggcgggcagcagggcagtcccaagcatggtccccacagcggcgcccccaagagcctcccccgggaggagcctgagttgcggccccggccccccaggcccctggacagccacttggccatcaatggctcagccaaccggcagagcaagtctgagtcggactactcagacggtgacaatgacagcatcaacagcacgtccaactccaacgataccatcaactgcagctccgagtcatcgtcccgtgacagcctgcgggagcagacgctcagcaagcagacctaccacaaggaggcccgcaacagctgggactcgcctgcctttagcaacgatgtcatccgcaagaggcactaccgcatcggcctgaacctcttcaacaagaagcctgagaagggagtccagtacctcatcgagcgtggctttgtgcccgacacgcccgtcggggtggcccacttcctgctgcagcgcaagggcctcagccggcagatgatcggcgagttcctgggcaaccggcagaagcagttcaaccgtgacgtgctcgactgcgtcgtggacgagatggacttctctaccatggagctggatgaggccctcaggaaattccaggcgcacatccgtgtccaaggggaggctcagaaagtggagcggctcatagaggcgttcagccagcgctactgcatctgcaaccctggggtggtgcggcaattccggaacccagacaccattttcatcctggccttcgccatcatcctgctgaacaccgacatgtacagccccaatgtcaagcccgagcggaaaatgaagctagaggacttcatcaagaacctccgaggtgtggacgatggtgaggacattccccgtgagatgctgatggggatctatgaacggatccgtaagcgagagctaaagaccaatgaggaccatgtgtcccaggtgcagaaggtggagaagctcattgtggggaaaaagccgatcggatccctgcatcccgggctcggctgtgtgctctctctgccccaccgtcggttggtctgctactgccggctctttgaggttccagacccaaacaagccccagaaactcggactacaccagcgagaaatcttcctgttcaacgacctcctggtggtcaccaagatcttccagaagaagaagaactcggtgacgtacagcttccgacagtccttctccttgtacggcatgcaggtcctgctcttcgagaaccagtactaccccaatggcatccggctcacctcgtctgtccccggagcagatatcaaagtgttaataaacttcaacgcccccaaccctcaagaccggaagaaattcaccgatgacctgcgggagtccattgcggaagtccaagagatggagaagcacaggatagagtcggagctcgagaagcagaaaggcgtcgtgcggcccagcatgtcccagtgctctagcctcaaaaaggagtcgggcaacggaacactgagccgggcctgcctggacgacagctatgccagcggtgagggcctcaagcgcagcgccctcagcagctccctgcgggacctctcggaagccgggaagcgagggcgtcgcagcagtgcgggatcgctagagagcaatgtggaagggtccatcattagcagtcctcacatgcgccggagagctacatcaacacgagagtgtccatctcgcccacaccagactatgcccaactcatcttccctcctgggctccttattcgggagcaagagagggaagccccctccccaggcccacctgccctcagccccagccctgccacccccccacccaccggtggtcctgcctcacttgcagcactctgtggctggccaccacctggggcccccagaggggctgccgcaggccgccatgcacgggcatcacacccagtactgccacatgcagaaccctcccccgtaccaccatcaccaccaccaccacccaccccagcacatccagcacgcacaccagtaccaccacggcccccatgggggccacccagcctacggggcccatgcccacggccacccgccgctgccctcggcccacgtggggcacacagtgcaccaccatgggcagccccctgccccgccgccccccaccagcagcaaggccaaacccagcggcatcagcacaattgtgtagacagcctgggtaggggtcccaggctccctgaaacacctgcacaccacacagggcacgcccgggggtcgccagccgcacaccaaacccggggcacttctgttgccatctctcccctctgcccctcacggcccaaccggagccccaggagcccacagggctggtgttgtgtggaacaaaggcccagatttcatttcttgttggcaccctgggctctgctcacctcagtctgagggatgggtgggcctcagacaccatcagccttgaaacggtgagccagccaagtagtgttgaactgcctcccccactccagctctcagctccctgtgccctaatgtacatgcatatgaaaacccaacctagaaaacgaagaaatgagatacaaaaacagacaaaacaaaccccaaaacttgctgcattattgctcttttattgacaatgggcaaaaaaataagtagacctgatatggttgatgaaaatacgtaagtaaactttatataaatatataaatatataaatatatatatatatatactgtataggtagtacttgtgtgtgaaaggcaggcgtttcagtccacattagcaatacccaccttacaaggagctccacttacctaataggaagacagtaccttagctgggtgtgtgagacaatagaccaaaccctaaatgctaggaacaaattcagatacttcatattttcatacaaagaagtccctctaggactggctaaaatctttacacaatcattactaactgtgccaagtaacatagcatctaactgtttaaaaagtccagtattgctttgtataaatccttattttattaacagaatactatcataaatagtattataatgctgttatttcaggtaagcaaatagctaaactgcagtacactctacagtagcaactcaggacagctggttacaagctggttgtcttaggacattggttacacggattcttagacactttaatggctgcgataactgtgactctccatgatccatgtttcttttatgcgcatatgatttgacgcacactcattcagagtcctccgagaggggcacccatacacggcagaagtgttcatctccaacatgaaagtgaccagctctcatcctcgtctccccaacaccataacgtcctcatcccgcctccaacccacaccaggccgaagccctcagagagtgttttcatcaggaaccactctcgaacctgaaggttgactttagcgtttagcaacccagggcggtgtgtgtgtttcccgttttgttttctgagtggtagcagtgatcaccgtaattccatgtagccatgtgctagcagaacccctgtgtcctcaccgtggcccgtgtgaccccagccgacgagtgcccggcggagcccccgctgccttcccatggtccagtgagctgccagggcatcacatgactctcagctgtgctcttgtcgcttctgtgttgtggtgacaccatgcgctccccagggccagacctgcacgcggcaggtctgtgcccgagtcacccacgggccatactttgtagtttcagcctttcgagccactgcagccgtcagtgctgtgctcctaagccatgggacccgaggactgccccccggcgcctgcccaggcggaggccctttcagaaagggcgaagctcacgcctgactctgcgggccgcggggccgcgttcccagtggacagcgtggtgagccgtggccggacggcaggaggagaggggagccccctctggctgtgtgtcaccttggctggctggctggccagggttttgccgatttccctcctcacatccctcccaccctcggtcatatcattgagatcaccgtaccagcaaatctgcaaaccaagcactttgttaatctccagagagagcaaatacagcaatctagagtttagcctttttaaaaatgtgactttaacccgcccacctgtgtcctcccattggcgtggcatttctttggtgtctgctcagaaagaaacagcatgggaccgtgtgattgggtccaggctgggctgtcagggaagcgccctggtgtctccgactcatcaattctcgggtcttttttaaaagccaggctccccaaagcactctgtctcgcaattttgaggaggctgttccgacctggaagcgttaaactgctgcatgtcatctggcgtcagctgtgaggctgcgctctgcgtgttgtgcgtttgcaaaatgtattggcgtgactgtaaacacatcgttgaagtaaagcgattacatattgagtatgtcagcttttctcaccctcttctgtgctgggaggagagtctaactgtaacctttaggttgttccagaaaagattcaggccgtttggcacagaattgctctttctgaagggtagcagtaatgaataggaacagacagaaaaccccaggaggggctttcaggaaactctccctctccatcgccatcctgcaagctccacagcctcgggctgccagcctgtggcactgtcctcggtgtgtcctggagctgtgctgggcagcagggcctcgcgtaaggaactgctggaacccactgagcccttcccggggtttcccgccgcactcagtgtgttccttcaggctagtgaggtttcattctgttttatttgcaagcttatcaaaagtttgtggaagatacattgttgggttccagaggctggagtcatgctgcccacatcttgtttgggaaagcaaaagctcccagtgagctggtgtccccgtgtgtctttcatgggactgtcccctttagagatcccacctgtcagagccacagcttcggggtcctgtcatcacatcccctgggaggggaggcaggaggaggccgagggccccaggatgtctgcctggtcccttctcactgtgaggacgcccttggcacacctttctcaagtcacacaaattactgcagttacatacagaattgctgacaggagcaggagacgctgagggaaacagctggcaatgtgacaaaagtcttttctgggacaacaatcaaatcatgtatttgtatttttttaagtttaccaatgaattgtacaacaatgtaaaaataaagttcatcctaatatgctgtgcacatcttgcttaaaaatgtcttcagcacccagtgcagtgatctttccctcacacactgcatgcagcaggagcctcttgtttttcttaatgagctgaaaagacagcagatgttcacagctgatgctgggtgttgactcagcgccacgggaagctctgtgcccgcaggtaagcacgcacagtcttacagttctccttgtaaaatatcatcacccttcctgcctgagaaacgagtacatttgtattttatgtaacaacaatagtcaaggcagcattgcaacactgagcagggtgaggtgggggtgctgagcacaggacaagagggaggaggcctgccctccattcagatgcatctgcatcgcccttctgtgtgcagtcacatcgagactgcacacagcatgcatctcctcttggaaaatatcttttgcctccgagttgttttaagcaattagaatcaggtcctgaatccccagactgttcagagacttcaagggacacctccctcacaagaagcctggcacccccactgtgtacctttgagaggaaaggagtgcgtttgttttcatctgcattctgtttgtcagtggcaacagactctatcaatgtaaaaccatggttgtgatcatgtggggaaatcaaataaatcctttgaaactct

SEQ ID NO: 3195 - DNA, 975 bp, Homo sapiens
  source 1..975: mol_type = genomic DNA
ggcgacgcctgcgcagtgcggtcgcggggctgtcgttgtcccgcgagccgccgaccaggcctcgaacgggatggcagaggaggtgagcaccctgatgaaggccacggtcctgatgcggcagcctgggcgggtgcaggagatcgtgggcgccctccgcaagggcggcggagaccggttacaggtgatttctgattttgacatgaccttgagcaggtttgcatataatggaaagcgatgcccttcttcttacaatattctggataatagcaagatcatcagtgaggagtgtcggaaagagctcacagcgctccttcaccactattacccaattgagatcgacccacaccggaccgtcaaggagaagctacctcatatggtggaatggtggaccaaagcacacaatctcctatgtcagcagaagattcagaagtttcagatagcccaggtggttagagagtccaatgcaatgctcagggagggatataagaccttcttcaacacactctaccataacaacattccccttttcatcttttctgcgggcattggtgatatcctggaagaaattatccgacagatgaaagtgttccaccccaacatccacatcgtgtctaactacatggattttaatgaagatggttttctccagggatttaagggccagctcatacacacatacaacaagaacagctctgcgtgtgagaactctggttacttccagcaacttgagggcaaaaccaatgtcatcctgctgggagactctatcggggacctcaccatggccgatggggttcctggtgtgcagaacattctcaaaattggcttcctgaatgacaaggtggaggagcggcgggagcgctacatggactcctatgacatcgtgctggagaaggacgagactctggatgtggtcaacgggctactgcagcacatcctgtgccagggggtccagctggagatgcaaggcccctgaag

SEQ ID NO: 3196 - DNA, 1577 bp, Homo sapiens
  source 1..1577: mol_type = genomic DNA
gttgctccttcagcgcctatcgctggctcttggggcgcagagaggggccgcagtctccgcggctgcgtcgagctcccttgcagtcccctccatgttccccggcgccactactccccttcctaaggccgccgcttaccccggggtctatggaagtaatggaaggacccctcaacctgcatatctttctgaagccatgaagctgacacagtcagagcaggctcatctttcactggaattgcaaagggatagccatatgaaacagctcctcctcatccaagagagatggaaaagggcccagcgtgaagaaagattgaaagcccagcagaacacagacaaggatgcagctgcccatcttcagacatctcacaaaccctctgcagaggatgcagagggccagagtcccctttctcagaagtacagcccttccacagagaaatgcctgcctgagattcaggggatctttgacagggatccagacacactactttatttacttcagcaaaagagtgagccagcagagccatgtattggaagcaaagccccaaaagatgataaaacaattatagaggagcaggcaaccaaaattgcagatttgaagaggcatgtggaattccttgtggctgagaatgaaagattaaggaaagaaaataaacaactaaaggctgaaaaggccagacttctaaaaggtccaatagaaaaggagctggatgtagatgctgattttgtagaaacgtcagagttatggagcttgccaccacatgcagaaactgctacagcctcctcaacctggcagaagttcgcagcaaatactgggaaagccaaggacattccaatccccaatcttcctcccttggattttccatctccagaacttcctcttatggagctctctgaggatattctgaaaggatttatgaataattaaaatggaaggccacagaaaaggggaaaagaggaaataatacagtaatcgttaatccagcaaaaagaaatgaaaagggaaaaccacatagaagggtaatcccggaaatgcttcatctggtggactgtgggagcagaggcattgccaggacttgggaaacagtcactgtgaaatgcgctgcgtatctcattcactcacttcagctaatgattccgacttggcagacgctaaactcatggaggttcggtttctcctgatacaaaccaaatggctacctggaagaatttctttcaagcaacagttatttttcttatcttcagggttaaaatgtataaaagttatgtgtaattaatctataatgccataaatgataatgcaaaacctaaataatatggtggccggaggggctgccttatatttgaaacatgctttctatcatgcattgactgtatgcattttgttaatgcacattctgtttgtttaaggtgtgtaagatacacacccttctagatgaaactatatgtgccacactttgcactactcataatgataacctcaagactatcagaagaaatatttaaatttccattttatgaagaaaggaaccaaattattatgctttttaaaacaaattaccagtttacataattaatca

SEQ ID NO: 3197 - DNA, 390 bp, Homo sapiens
  source 1..390: mol_type = genomic DNA
ctgtgcggctgcaggaacctaggaaataactcggaacctgtaacgtcccactggtttggacatattcctctcctgatctggcctcatctgttccagggaggtgggattgagcctagtgcaggctacagtcaaacctcttctggacttctgcgacagccttttatttggtttcttgccgctccttgacctctaacattctcgtctctgcactgcagctaacatgatcgtcaaacacaaatcagaacatatgcagtaatgtcacctcaaaagagagttaagaacgtccaggcacaaaacaggacttcacaaggtagtagtagttttcagaccacgctttcagcctggaaagtaaaacaggatccaagcaactcgaagaacatctcaaaacat

SEQ ID NO: 3198 - DNA, 1700 bp, Homo sapiens
  source 1..1700: mol_type = genomic DNA
gcggaaggggttcgcacgccaagaaccgccatgcctggggatcaccgccgcatccgcggccctgaagaatcgcagccgccgcagctgtacgcggccgacgaggaggaggcgcccggcacccgcgacccaacgcggctacggcccgtgtacgcgcgcgccgggctgctgagccaggccaagggctcggcctacctggaggcgggaggcaccaaggtgctgtgtgccgtgtcgggcccgcgacaggccgagggcggcgagcgcggcggcggcccggccggagcaggcggcgaggccccggccgcgctgcgcggtcgcctgctctgcgacttccgccgcgcacccttcgcgggccgccggcgccgcgctcccccgggcggctgcgaggagcgtgagctggcgctggcgctgcaggaggcgctggagccggctgtgcgcctgggccgctacccgcgcgcgcagctcgaggtgtcggcgctgctgctggaggacggtggctcggccctggccgccgcgctcaccgccgccgcgctcgccctggccgacgcgggcgtggagatgtacgacctggtggtgggctgcggcctcagcctcgcgccggggcccgcgcccacctggctcctggaccccacgcggctcgaggaagagcgcgccgccgccggcctcaccgtggcgctcatgcctgtgctgaatcaggtggccgggctgctgggcagcggcgagggcggcctgacagagagctgggcggaggccgtacgcctgggcctcgagggctgccagcgcctctaccccgtgctgcagcagagcctggtgcgggccgcccgccgcaggggcgccgccgcccagccctgaaccagaagcctgagcaactacggacgcaagccgaggaccgtgctgccgccgtccacgaaaagacccgcgccatcggcctccagtttgcgtcgagaattcctggaagggccctgatatgactgtggttggactgacctgactgccagatggtgggacttggtctggagcagggactacttggaatgataaaggcaaaactcaacagcccctggagctgcgcttgtggtggagctggaccctgaaattacctggaccttttttttagagacagggtttctttctgcagtctcaaactcctagccttgattgatcctcctgccttggcctcccaaagtgctgggactacaggtgcatgcaaccacacctggctaattttcttttcttctttctttcttttttttttttttttttttttgatggagtcttgttctgttgcccaggctggagtgcaatggtgcaatcttggctcactgcaacctctgcctcctgggttcaatccattctcctgcctcagcctcccaagtagctgggattacaggcacatgcctccataccgggctaatttttgtatttttagtagagatggggtttcgccatgtgggccaggctgttctcgaatgcctgacctcaggtgatccacccgccttggcctcccaaagtgctggaattacaggtgtgagccactgtgcccagctgagtaaatttcttgattgcacagaatgtacggtgatattggcggacttaaggacatcgaattgtttatcaggaataaagtattatgtgtgttttctgcggccctggataatgctgtagcattcagggtcgattgagtaaaaaaaatgtagagatgg

SEQ ID NO: 3199 - DNA, 710 bp, Homo sapiens
  source 1..710: mol_type = genomic DNA
gctcgtccgctccctcccccgcgccgtgcacgtcttggttcgggccgggcataaaaggcttcgcggcccagggctcacttggcgctgagaacgcgggtccacgcgtgtgatcgtccgtgcgtctagcctttgcccacgcagctttcagtcatggcctccggtaacgcgcgcatcggaaagccagcccctgacttcaaggccacagcggtggttgatggcgccttcaaagaggtgaagctgtcggactacaaagggaagtacgtggtcctctttttctaccctctggacttcacttttgtgtgccccaccgagatcatcgcgttcagcaaccgtgcagaggacttccgcaagctgggctgtgaagtgctgggcgtctcggtggactctcagttcacccacctggcttggtatgagcaggggccaaagagggaggttgcagctaagctcacaccctcaggtcctagcagtgtggcttcgtggccattgctcaacctctggaacctgcgtttccccatcgtgaaaataatggaaacattgccgcccaagtctttaaggatgatgacagtaattagcatttgacaactagttgcctggtatatagagttgcagatgcaactcagatgcaactctatctactctatgtacttagttcccaggagggaggctgtgctgccctatttcatgaagatggaaactccagttcaccgaag

SEQ ID NO: 3200 - DNA, 1731 bp, Homo sapiens
  source 1..1731: mol_type = genomic DNA
agttggaagaggcgagtccggtctcaaaatggaggtaaaaccgccgcccggtcgcccccagcccgactccggccgtcgccgtcgccgccggggggaggagggccatgatccaaaggaaccagagcagttgagaaaactgtttattggtggtctgagctttgaaactacagatgatagtttacgagaacattttgagaaatggggcacactcacagattgtgtggtaatgagagacccccaaacaaaacgttccaggggctttggttttgtgacttattcttgtgttgaagaggtggatgcagcaatgtgtgctcgaccacacaaggttgatgggcgtgtagtggaaccaaagagagctgtttctagagaggattctgtaaagcctggtgcccatctaacagtgaagaaaatttttgttggtggtattaaagaagatacagaagaatataatttgagagactactttgaaaagtatggcaagattgaaaccatagaagttatggaagacaggcagagtggaaaaaagagaggatttgcttttgtaacttttgatgatcatgatacagttgataaaattgttgttcagaaataccacactattaatgggcataattgtgaagtgaaaaaggccctttctaaacaagagatgcagtctgctggatcacagagaggtcgtggaggtggatctggcaattttatgggtcgcggagggaactttggaggtggtggaggtaattttggccgtggtggaaactttggtggaagaggaggctatggtggtggaggtggtggcagcagaggtagttatggaggaggtgatggtggatataatggatttggaggtgatggtggcaactatggcggtggtcctggttatagtagtagagggggctatggtggtggtggaccaggatatggaaaccaaggtggtggatatggtggaggtggaggatatgatggttacaatgaaggaggaaattttggcggtggtaactatggtggtggtgggaactataatgattttggaaattatagtggacaacagcaatcaaattatggacccatgaaagggggcagttttggtggaagaagctcgggcagtccctatggtggtggttatggatctggtggtggaagtggtggatatggtagcagaaggttctaaaaacagcagaaaagggtaggtatctttaaatttttattatgatgataaaagaatatgtggaactgttcactgagtgtaataatttttttatcctgtattattcaacaggctacagttcttagcaggagagagagcgaggagttgtcaggaaagctgcaggttactttgagacagtcgtcccaaatgcattagaggaactgtaaaaatctgccacagaaggaacgatgatccatagtcagaaaagttactgcagcttaaacaggaaacccttcttgttcaggactgtcatagccacagtttgcaaaaagtgcagctattgattaatgcaatgtagtgtcaattagatgtacattcctgaggtcttttatctgttgtagctttgtctttttctttttcttttcattacatcaggtatattgccctgtaaattgtggtagtggtaccaggaataaaaaattaaggaatttttaacttttcaatatttgtgtagttcagtttttctacattttagtacagaaactttaacaaaatgcagtttcgaaggtgtttccttgtgagttaacaag

SEQ ID NO: 3201 - DNA, 319 bp, Homo sapiens
  source 1..319: mol_type = genomic DNA
tatccatgagcagtgggaaaaggctaatgtaagcagtccccaccgggagttcccccctgctaccgccagagaggtggacccactccggattcctccacaccacccacacaccagtcggcagcctccctggcctcggagaggtggcatgattgtggatcccctgagatctggcttcccaagagcacttattgacccttcctcaggcctcccgaaccgacttcctccaggcgctgtgcccccaggagctcgctttgacccctttggacccattgggaccagcccacccggacctaacccagaccatctccccccgccgggc

SEQ ID NO: 3202 - DNA, 647 bp, Homo sapiens
  source 1..647: mol_type = genomic DNA
agtggcaagcgcgggcaggaccgcgttgcgtcatcggggcgcgcgcctcagagagagctgtggttgccggaagttgagcggcggatccaattcctgtatcttcaccttgtctaccgggatttctagagcagccttgtgagagacatttctgagacctgtatgtcctgcgtctatgattcttccctgatcaaggcttctcaaaccccataatgctggtatccagtgcatccgttctcaaaaactgaagctgatggacaccagattgcatgtgaaggtgaaggatattatagcagaaggaaaccaaaataaaagaaaaacagctcctggaagtaaccaatgagaaggacagataagagtttgaagactgtggatgtgactgcttgttccctggttgacacactgaagaagaaatcatgttgattcagagttggcttggaggcaagaaataatggcggcagctacgggggatcctggactctctaaactgcagtttgccccttttagtagtgccttggatgttgggttttggcatgagttgacccagaagaagctgaacgagtatcggctggatgaagctcccaaggacattaagggttattactacaatggtgactctgctgggctgccagctcgcttaacattggagt

SEQ ID NO: 3203 - DNA, 2595 bp, Homo sapiens
  source 1..2595: mol_type = genomic DNA
acttctcaattctttgttctgtgaagtggttgtcactattgttcccattttacagatttgaggaactgataccccaagaccccgtgactttctcaaggccattccaagatccctagatgcacttacgcttaatgaactaattcttcacagcgaggcttcttgcttaaaatccaagaaaataccagataaagggcattctaaatatatttcttttctatagatgtggatctcctgttactggaaaacaggaattagcttgtctgcttgaggatgtggttggttctttataaaaaggatacagaagaaatttgcacagactgccagcttcattatgctgccgacagcttccagcaaaaggaggacgtttgcagccagatatttcacccgctccaaaagcctagtgatgggggagcagagccggagccctgggcggatgccgtgccctcacaggctgggccccgtgctgaaggcgggctggctgaagaagcagaggagcatcatgaagaactggcagcagcgctggtttgtgctgcgtggggatcagcttttctactacaaggacaaagatgagatcaagccccagggatttatttctctacaagggacacaggtgactgaacttcctcctggccccgaggacccagggaagcacctctttgagatcagcccaggtggtgccggggagcgggagaaggtgccggccaaccccgaggcgctcctgctcatggccagctcccagcgtgacatggaggactgggtgcaggccatccgccgagtcatctgggccccgctgggcggagggatctttgggcagcgcctagaggaaacagtccaccacgagcggaagtatggcccccgcctggcgcccctgctggtggagcagtgtgtggacttcatccgggagcgcgggctcactgaggaggggctgttccgcatgccaggccaggccaacctggtgagggacctgcaggattccttcgactgtggggagaagccactgtttgacagcacaacagacgtgcacacggtggcctccctgctgaagctgtacctgcgggagctccccgagcccgtggtccccttcgccaggtacgaggacttcctcagctgcgcccagctgctcaccaaggacgagggggagggcactctggagttggctaaacaagtgagcaaccttcctcaggcaaattacaacctgctcagatacatctgcaagtttctggatgaagttcaggcatactcaaatgtcaacaagatgagtgtccagaatctggcaaccgtttttggacctaacattctgcggccacaggtagaggacccagtaaccatcatggaaggcacttccctcgtccagcacctgatgaccgtcctcatccgcaaacacagccagctcttcacggcaccggtcccggaagggcccacctccccgcgcgggggcctgcaatgcgcagtggggtggggctccgaggaggtcaccagggacagccaaggagagcccggcggccccggcctgcccgcgcacaggacctcttccctggacggggcggccgtggcggtgctctccagaacagcccccacggggccggggagccggtgcagccctgggaagaaggtgcagaccctgcccagttggaagtcctccttccggcagccgaggtccctatcgggaagcccgaaggggggcggctcatccctggaggtgcccatcatctcctccggcgggaactggcttatgaacgggctgtcctccctgcgcggacaccgccgggcctcgtcgggagaccggctcaaggactcgggctccgtgcagagactctccacctacgacaatgtgcccgcgccgggcctggtccccggcatacccagcgtggccagtatggcgtggtccggggcctcgtccagcgagtcgtcggtggggggctcactcagcagctgcacggcctgccgcgccagcgactcgtctgcccgcagttccctgcacaccgactgggccctggagccctccccgctccccagcagcagcgaggaccccaagtccctggacctggaccacagcatggacgaggcgggcgcgggtgccagcaacagcgagcccagcgagccggacagccccacccgggaacacgcgcgccgctccgaggccttacaggggctggtcactgagctcagggccgagctgtgccgccagcggactgagtacgagaggagtgtgaaaagaatcgaagaagggagtgctgacctgagaaaacgaatgtcccggttagaagaagaactggaccaggaaaagaaaaaatacatcatgctggaaataaagctgcggaactctgaacgggcgcgggaggatgcggagaggaggaaccagctgttgcagagggaaatggaggagtttttttcgaccctaggaagcttgactgttggggcaaaaggtgccagggccccaaagtaaaaggaatggcagagctcacttctgtaccacgtctgctggtctccagccttgtatggagttagaagcgtctgtatctctggagcagccaggcgctctggagccagctggagagagagagatcctgatacctctgtggggactgtggggac

SEQ ID NO: 3204 - DNA, 890 bp, Homo sapiens
  source 1..890: mol_type = genomic DNA
taggaattagggcagagttaggagcggcctgcggaggggcccgctcaggccgatgccggtagtggaaacagaggaagccaccgccgcgctcttctcggaactggctaaaatagctccgtaaatgggccgagcgcaacacggaggggataccgctcactaccaggttcccgaactttggcttaccctcagcttgagccagcgcacatctcctccttaacagcctctcctgagaataggctggcttcaagggaatgggggaagtgaatgatctcaaactacagaaatggcagtgaacttgtctgtttcaattcgggagtgggctgcttcctgattggctgtgattgggctttcactgtgcttgtgaacaccttcttcagcttccttcgacgcaaaacagactttttcattggaggagaagaagggatggcagagaagcttatcacacagactttcagccaccacaatcagctggcacagaagacccggcgggagaagagagcccggcaggaggccgagcggcgggagaaggcggagcgggcggccagactggccaaggaagccaagtcagagacctcagggccccagatcaaggagctaactgatgaagaggcagagaggctgcagctagagattgaccagaaaaaggatgcagagaatcatgaggcccagctcaagaacggcagccttgactccccagggaagcaggatactgaggaagatgaggaggaagatgagaaggacaaaggaaaactgaagcccaacctaggcaacggggcagacctgcccaattaccgctggacccagaccctgtcggagctggacctggcggtccctttctgtgtgaacttccggctgaaagggaaggacatggtggtggacatccagcggcg

SEQ ID NO: 3205 - DNA, 1811 bp, Homo sapiens
  source 1..1811: mol_type = genomic DNA
agacggcagggcttaaagttccgggaatcaaagatcaactcccactgaggacaaatggacctgtaattccgggtgtgacgagagaacgagatttaccttcctgaattaaaaaacagactccctgcgacaaggactgtgtactgcatgaatgaggctgagatagttgatgttgctctgggaatcctgattgagagccgcaaacaggaaaaggcctgcgagcagccggccctggcgggggctgataacccagagcactcccctccctgctccgtgtcgcctcacacaagttctgggagcagcagtgaggaagaggacagtgggaaacaggcactggctccaggcctcagcccttcccagaggccggggggttccagctctgcctgtagcaggagccctgaggaggaggaggaagaggatgtgctgaaatacgtccgggagatctttttcagctagggcataaactgtgcactgaactgtctgccgagagcagctggaggacagctgagcttccactggtgctgctgggccgcccgcctgtgggaatggggctctctgtgctcctacctttgtgccttcttgggcctggcagattcacctcaggccagaagcccctggacactccgggccttggggctgccgttctgagtgtgcggaaggcaggactcaaaatgagatcccatttgactccctctgtatgtactgtgccctctcctggctcttgaggctctggagtcccaattgtctgtgttagtcagtgaccaggttccagggaaaatgatgtcatgtggtggtccaacttactggaaccaaagagacagtactttgcaaagaaaaggatcactgccaggtgcactggaattgctacagtttagtccgcatgatctctcctgaaggaggaagcctgtttcaaaaatagtttccatcatgagtctatcaatgagctcccacctctccagccagcctagaaagcaaacgagctgcccacagttctctgccctgtctgggaggttgaggccacagtgtatagactggtaagccagacaggcctcctcccgcaagctgctaccttgctttcacctgtaccttggtccccgggcagctagctataaagcaagagggacaggagcccagaagagacactgaggacaagagatcacaccagagtacatgtctctgcctctgttttcagtgtggctttggacaggaatatatgaataaatcactgccatacaggttttccaatacacaagtgctagaaaatacacacaattccccaatgcgtaagttgtgctaatgtctttccaagttctgggttgggaagtggagggtggcagcgtttgtttgtgtgcagccgtccagtcctgttcacagcgaggatttggagtcctccagggtctcatcatgggagtgatttgtcagcggacgcctctgccctgtctggcttcaggtccagggaagctttgaagcagtcaagccttgtctttgtaccccatgtgtcctgtctttgttgagtcactcagagatcactcctggacctctggggttggagttccagtgatggcttatggcggcccactcactatggtgggctgagtggaagctccttaaccatgtccccagagacactgaggtgctcgctcttttaatgtcctcgtttgttgccgtaagttctttgctaggtttcattttggcatttggcaaatcagcctggaagtctggccccatgacagcaatcactccctccccaccctcctgaagctagaggaagatttgctcagatccattaattaaagcaggaattggtgtgacaa

SEQ ID NO: 3206 - DNA, 434 bp, Homo sapiens
  source 1..434: mol_type = genomic DNA
tgatacaatctggtgattcccgagcatacacatcatattttatccccattttgccaatgaggaaactgagacccagatctgccggaggcgctgggcaatgaccccgggactccaggccagaggggtctgaagctgtttgggaaagcagcgggactccttgggaagatggccatggccccaagcccttccctggtgcaggtgtacaccagccccgcggctgtggccgtgtgggaatggcaggacgggctgggcacctggcacccctacagtgccaccgtctgcagcttcatcgagcagcagtttgtccagcagaagggccaacgttttgggcttgggagcctggcccacagcatccccttgggccaggcagacccctcgctggccccttacattattgacctccccagctggacccagttccgccaggacaccgg

SEQ ID NO: 3207 - DNA, 333 bp, Homo sapiens
  source 1..333: mol_type = genomic DNA
acggggctctgggagtaagcctgtctgcctggcgggccttcaggtgcggcgtgagagatggatgccaattcaaaagacaagccccctgaaaccaaggagtctgcaatgaataatgctggaaatgcctctttcattttgggaactgggaagattgtgactcctcagaagcatgccgaattacctcctaatccttgcacaccagatacttttaaatcacctttgaacttttccacagtaaccgtagagcaattgggaattaattgacatttcctgcagagtctgtggcaagagggaaagtaaccatctatgctgaaatgatctgtctagttccca

SEQ ID NO: 3208 - DNA, 1001 bp, Homo sapiens
  source 1..1001: mol_type = genomic DNA
cggagacggtggagtctccgcactgtcggcggggtacgcatagccgggcactaggagctttctcttgcataccctcgcttaggctggccggggtgtcacttctgcctccctgccctccagaccatggacggctccttcgtccagcacagtgtgagggttctgcaggagctcaacaagcagcgggagaagggccagtactgcgacgccactctggacgtggggggcctggtgtttaaggcacactggagtgtccttgcctgctgcagtcactttttccagagcctctacggggatggctcagggggcagtgtcgtcctccctgctggcttcgctgagatctttggcctcttgttggactttttctacactggtcacctcgctctcacctcagggaaccgggatcaggtgctcctggcagccagggagttgcgagtgccagaggccgtagagctgtgccagagcttcaagcccaaaacttcagtgggacaggcagcaggtggccagagtgggctggggccccctgcctcccagaatgtgaacagccacgtcaaggagccggcaggcttggaagaagaggaagtttcgaggactctgggtctagtccccagggatcaggagcccagaggcagtcatagtcctcagaggccccagctccattccccagctcagagtgagggcccctcctccctctgtgggaaactgaagcaggccttgaagccttgtccccttgaggacaagaaacccgaggactgcaaagtgcccccaaggcccttagaggctgaaggtgcccagctgcagggcggcagtaatgagtgggaagtggtggttcaagtggaggatgatggggatggcgattacatgtctgagcctgaggctgtgctgaccaggaggaagtcaaatgtaatccgaaagccctgtgcagctgagccagccctgagcgcgggctccctagcagctgagcctgctgagaacagaaaaggtacagcggtgccggtcgaatg

SEQ ID NO: 3209 - DNA, 620 bp, Homo sapiens
  source 1..620: mol_type = genomic DNA
ccttctctcttcctcggcgctgcctacggaggtggcagccatctccttctcgcttgctccgtagctggcgattggaagacactctgcgacagtgttcagtccctgggcaggaaagcctccttccaggattcttcctcacctggggccgcttcttccccaaaaggcatcatggccgccctcagaccccttgtgaagcccaagatcgtcaaaaagagaaccaagaagttcatccggcaccagtcagaccgatatgtcaaaattaagcgtaactggcggaaacccagaggcattgacaacagggttcgtagaagattcaagggccagatcttgatgcccaacattggttatggaagcaacaaaaaaacaaagcacatgctgcccagtggcttccggaagttcctggtccacaacgtcaaggagctggaagtgctgctgatgtgcaacaaatcttactgtgccgagatcgctcacaatgtttcctccaagaaccgcaaagccatcgtggaaagagctgcccaactggccatcagagtcaccaaccccaatgccaggctgcgcagtgaagaaaatgagtaggcagctcatgtgcacgttttctgtttaaataaatgtaaaaactg

SEQ ID NO: 3210 - DNA, 1709 bp, Homo sapiens
  source 1..1709: mol_type = genomic DNA
agtgcctgcggccctcggcggcctagtacacacgcacctgagtgagtggcaccagaggaccctctccatgtttagggacctcctgggcctcaggagcgtggcgcccgcccctgggcggactccccccatccgcgggcgcgaatggtccgggccgcgtccgcagtgctgctggctgctccctggttgctgggtgcaaagtgctgggttctgggtttctggattcgcgggccgttcacacgtagcctgtgccggctcctcggatgcaccgcgcgcccccgcgccctcaccgacgggtccagacctggtgggaagaaggtgcggggacgggtccctgaggatcccgatgcctacgagccaagatgctcagctttataggtgtgacctacacatgtgacttcacctcagttttgtgatccgtaaaatggacaaattcgaagctacttcacagtgctgttgagaggattaaatgaaacaatgcttgtaaagctctttgcaggagggagcctcggaagcagggcctggccggcagagcacacctgctgtcaccagggaccacaggcagcatgaagacccccgtggagctggccgtcagtgggatgcagaccctcggccttcagcaccgctgccgaggtggctaccgggtcaaggccaggacgtcatatgtggatgagactctgtttggcagcccagcaggcacccggcctaccccaccggacttcgatccgccctgggtggagaaggctaacagaaccagaggcgtgggcaaggaggcatcgaaggccttgggggcaaaggggagctgtgagaccaccccctcaaggggcagcacccccaccctcacaccaaggaagaagaacaaatacagacccatcagccacaccccgtcttactgtgatgagtcgctgtttggctcccgatctgaaggcgccagcttcggggccccgcggatggcgaagggggatgccgcaaagctccgtgctctcttgtggacgccaccacctacccccaggggtagccactcgccccgccccagggaggcaccactgcgagccattcacccagctggtccctccaagacagagccggggccagcggcagactcccagaagttatctatgggtgggttacactcttcacgccccctgaagcggggactttcccattccctcacccacctgaatgtccccagcactggtcatccagccaccagtgccccccacacaaatgggcctcaggatctcaggccttccacgtcaggggtgaccttccggagccccctggtgacttccagggctcgctcagttagcatttcagtgccatctaccccacgacgaggtggggccacccagaaaccaaagcccccttggaaatgatactctttcatcagggttgcctatggggccacggcgacaggtatggccccttgccagggtaggaggacattcatcacccagggaaccccaggtattaaagaagcccctgtgggggcagacagacatagcaggggtgggcagtgcctccctttatcctgacaatctctagtcgattcttgcctttttctcccgattgcggatttgggggccacctctaagatgcctctctccagccctgtctcaaccatactccaaattagtgccaacccaggggcctggcacctcccacatcatccattgtcttgctgccaagtgcgaataaacggcgtgattgcc

SEQ ID NO: 3211 - DNA, 1732 bp, Homo sapiens
  source 1..1732: mol_type = genomic DNA
agctggccgggacccgggcggagcgggcggggacccgggctactgcggtgtggactcgagggctgggcgcggggccggcgcagaagccgccagctggagacgatggtggaccacttggccaacacggagatcaacagccagcgcatcgcggcagtggagagctgcttcggggcctcggggcagccgctggcgctgccaggccgagtgctgctgggcgagggcgtgctgaccaaagagtgccgcaagaaggccaagccgcgcatcttcttcctctttaacgacatcctggtgtatggcagcatcgtgctcaacaagcgcaagtaccgcagccagcacatcatccccctggaggaggtcacactggagctgttgccggagacgctgcaggccaagaaccgctggatgatcaagacggccaagaagtcctttgtggtgtcggccgcctccgctacggagcgccaggaatggattagccacatcgaggagtgcgtgcggcggcaactgagggccacgggccgcccgcccagcacggagcacgcggcaccctggatccccgacaaggccacggacatctgcatgcgctgcacgcagacgcgcttctctgccctcacgaggcgccaccactgccgcaagtgcggcttcgtggtctgcgctgagtgctcgcgccagcgcttcctgctcccgcgcctgtcccccaagcccgtgcgcgtctgcagcctctgctaccgcgaactggccgcccagcagcggcaggaggaggcggaggagcagggcgcggggtccccagggcagccagcccacctggcccggcccatctgcggagcgtccagtggagatgacgatgactccgacgaggacaaggagggcagcagggacggcgactggcccagcagcgtggagttctacgcctcgggggtggcctggtctgccttccacagctgacccccggcctgcagaacatctgtccccaagccagctccactgcccaggcccccaagagggcagctccagaagctgcccagggctccgggaccccatcccatggtggcaggtgcagcggtggggagtggctctttctggactcccagtgcctttttgctggacactgtgtccttatggcttcactgcaggtaatgcctttcccttcaggaagccccagaacacccacaggtcttggtaacaaacgccaccttacactctgcaggctgcagcggcagctccagatggcctcctgagctggacgaccccaggtctccagacatctagggaccagagcaggtttgggaacacagagggaagacaggatgggagtgtagccacagaacccacctgcaccctgacaggcacaccccactgaagagcctgagtcccaggaggcctcctggaagcccaggactgcccacccaccacgctggtgcccaccgcctggccagccaagccctgccgatcagacatgtgggctccccgaagcccagccagagactgccgtgctgtgggtgccaccaggcccagggactgcagcctgagctccccgaggcccagggcagccgggtgaggactctgtcctgtgtcacctctctccaggtgtccagctgtctcatgcctttttgtcctgtcctcagctctccgtgtggtcagcgaaaccattgttttctgttaggactcagttgcaagaacagaaaccctgcccccacttaataataaaaaagaaagtttattgatgggtggttgc

SEQ ID NO: 3212 - DNA, 274 bp, Homo sapiens
  source 1..274: mol_type = genomic DNA
tagaagttctacaagtccatgtggcacatccaagagtccaaacagagagtgggaaggaaaatcagtcgcctatatgccttatgctgaggtcaaacgtgctctagaacaggaagcacagatgcacaatactgcagcaaggtcagcctcaccgtgtaggctttctccaagagaagtcagtaaagccgctccacagcctgatatgagtgcagcccgctatagtgtcccgccagtccttcagcctgctccacatcaagtgataactaatctccctgaa

SEQ ID NO: 3213 - DNA, 3101 bp, Homo sapiens
  source 1..3101: mol_type = genomic DNA
gatgagacatgacaaagctggctctgggaagcatgccctacctaggaccctgccctgtggcccagggtgtcgtccggcccacttgcagtcttaatctctgaattctgggccctggaacaggctgtgtctagttctcatttgccgtactcaccgggcccctttacatactctactttctctttccctctgggtttgagtgctagtaaccccaggctcgtgtgtccactgctgtcatgctgctgtgggacttccggcctctgagccagtctggtcacctctctgtgactcccttagaggaggctctggatgcttttacagggttaaatgataccacaagaggcagggcagcgggctcgacgagctctgttctggtgcgggcaggaggcgggagcccggatctgtgcgactgaaggtgggaagaggagtacacggtgcggatccagctgcaagaccgtgtaaatgagctccaggaggaagcccaggaggctgatgcctgccaggaggagctggcactgaaggtggaacagttgaaggctgagctggtggtcttcaaggggctcatgagtaacaacctgtcggagctggacaccaagatccaggagaaagccatgaaggtggatatggacatctgccgccgcatcgacatcaccgccaagctctgcgatgtggctcagcagcgcaactgcgaggacatgatccagatgttccagaagaagctggtcccatccatgggggggcggaagcgggagcgcaaggctgccgtcgaggaggacacctccctgtcggagagtgaggggccccgccagcccgatggggatgaggaggagagcacagccctcagcatcaacgaggagatgcagcgcatgctcaaccagctgagggagtatgattttgaggacgactgtgacagcctgacttgggaggagactgaggagaccctgctgctttgggaggatttctcaggctatgccatggcagctgcagaggcccagggagagcagcaggaagatagcctggagaaggtgattaaagatacggagtccctgttcaaaacccgggagaaggagtatcaggagaccattgaccagatagagctggagttggccacggccaagaacgacatgaaccggcacctgcacgagtacatggagatgtgcagcatgaagcgcggcctggacgtgcagatggagacctgccgccggctcatcacccagtctggagaccgaaagtctcctgctttcactgcggtcccgcttagcgacccgccgccgccgccaagcgaggctgaggactccgatcgcgatgtctcatctgacagctccatgagatagagacctgcctcccccttgcacccgaggccctcgcagcagggagctcagcgaggcagagggtggggctgcacagaggggaacatcagctgcagctctgcaccaggccggtccctggggactggggcgctcctccctcaggctttctccctcagtcttggcttctccagggctctggggtgtctggagctaggcttggccctaccattctggggccatttccaccacagttggggctctcctgccttcacgcgtgggtgtctgctacttccccatctttaaaatgctgccagagcgattgcggcccctcaccttgtccacgtatcaggaatgtgaatgtgggacctttcctccatccctgttgtccggagccagctcactgtcttccacactggtgctaactggcccaggcactggagtggaatagaatgcagctggaggctacgcatggcctctgcagcacacgcagctggagagggcttctgtccctgtcagcggcagagggcgttggggctggccggggcaccttgtccctgctatggtccacgtgctcacgctgtccacctgccaggtggagtgtatgtggctgtggccctccctcgtggaggtgccgtgctttaaagaggccttagtgcccgggatgggcacagtgttttgaagggaggtgggagctcttgctctcctggtcactgcagaatgacagagaaggtgaagctccatgcatgtgtgcgcgggtgtatgtgcgctcagggtctctgtttaagtatcagctaaagatgtgcttcctccgtgtctgtcatacactgagaccaacaggctacagtgtccctgattcttggaaaagcctggagaagctggggagatgcggttcacaatgcctcggtataggaggctgtgttgagctgacattcaaatggattctttaataataatgaaactggcgagtatttattgtgcactttggtgtcactgtctcaagcacttcctaatattcactagtttgaactctgaggtaggtactttttttttttttgagatggagtctcatactctgttgcctaggctggagtgcagtggtgtggtctcagctcactgcagcctctgcctccggggtgcaagcgattctcctgcttcagcatgcctgtagctgggactataggcatgtgccatgaagcctggctgatttttgtaattttagtagagacggagtttcaccatgttggccaggctggtctcaaactcctgacctcaggtgatacacccaccttggcctcccaaagtgctggggttacaggcgtgcgcgctctaccgaggtatgtacttttgtctccactaggtaagcacacgtgcaaagtgaggcccgggagtaactgcccaaagcaactgagccgttcagtggcagagccaggggtctggacctaggtcccagctacacgccttgcccctacccaagttcccctaaggacgatgatggaaataagtcaccctgacacatctcagttcatcttcctcaaaactatgcgagatagcctaggactggagcgaggagaggaaaaggccttgttctctgaagtagtggtgccagcttcctgtagcactcaagacgtctgagcgggaagcaaatggttctcgaagcaagcaaggctgtttggaggccctaccctcagtctgaggagaacataccaggtccctccccagcaagaatgtctcaccttgacacaagcccagcttccctcccctctgccccagaccctagaataagacaggacaagt

SEQ ID NO: 3214 - DNA, 3318 bp, Homo sapiens
  source 1..3318: mol_type = genomic DNA
gggagattacggggcggggacgagctgtcgcgctggttgctcgtgcaggagcgggacccggaacagaccgccgtgagagaggaggggcgccggccgggattcgcggcccggagctcgggaccggttgcttcattccagcctcgcagtcacctctgtgccctgctggttgtcttcccagcgctgctgtagttgccttccatggatctataggagagcaagtcctccaggagaagaagtcctcaccagtgaacggagacctctctgaactaagaataccatggccacgtcagccccactacggagcctggaagaggaggtgacctgctccatctgtcttgattacctgcgggaccctgtgaccattgactgtggccacgtcttctgccgcagctgcaccacagacgtccgccccatctcagggagccgccccgtctgcccactctgcaagaagccttttaagaaggagaacatccgacccgtgtggcaactggccagcctggtggagaacattgagcggctgaaggtggacaagggcaggcagccgggagaggtgacccgggagcagcaggatgcaaagttgtgcgagcgacaccgagagaagctgcactactactgtgaggacgacgggaagctgctgtgcgtgatgtgccgggagtcccgggagcacaggccccacacggccgtcctcatggagaaggccgcccagccccacagggaaaaaatcctgaaccacctgagtaccctaaggagagacagagacaaaattcagggcttccaggcaaagggagaagctgatatcctggccgcgctgaagaagctccaggaccagaggcagtacattgtggctgagtttgagcagggtcatcagttcctgagggagcgggaggaacacctgctggaacagctggcgaagctggagcaggagctcacggagggcagggagaagttcaagagccggggcgtcggggagcttgcccggctggccctggtcatctccgaactggagggcaaggcgcagcagccagctgcagagctcatgcaggacacgagagacttcctaaacaggtatccacggaagaagttctgggttgggaaacccattgctcgagtggttaaaaaaaagaccggagaattctcagataaactcctctctctgcaacgaggcctgagggaattccaggggaagctgctgagagacttggaatataagacagtgagcgtcaccctggacccacagtcggccagtgggtacctgcagctgtcagaggactggaagtgcgtgacctacaccagcctgtacaagagtgcctacctgcacccccagcagtttgactgtgagcctggggtgctgggcagcaagggcttcacctggggcaaggtctactgggaagtggaagtggagagggagggctggtctgaggatgaagaagagggggatgaggaggaagagggagaagaggaggaggaggaagaggaggccggctatggggatggatatgacgactgggaaacggacgaagatgaggaatcgttgggcgatgaagaggaagaagaggaggaggaagaggaggaagttctggaaagctgcatggtgggggtggctagagactctgtgaagaggaagggagacctctccctgcggccagaggatggcgtgtgggcgctgcgcctctcctcctccggcatctgggccaacaccagccccgaggctgagcttttcccagcactgcggccccggagagtgggcatcgccctggattatgaagggggcaccgtgactttcaccaacgcagagtcacaggaactcatctacaccttcactgccaccttcacccggcgcctggtccccttcctgtggctcaagtggccaggaacacgcctcctgctaagaccctgagccctgacatctgcccccagccccaaccctcagatgcttcacttctttggaattccaggactctcaatggggggacgggatgcctggcctaagcacctggagcaggggaccccatatccactggtagccacctccccattgctgtggccccctgaaatctcactcagtgctgttgctccatctactgccctaatggggctcttttcccacctcctgctggtttcccgagggaacttctgaccctggagtccatgagggctcctttcctttttgaccacgaccttggccctagctctgcactctctggaataagggcccgatgcagcattttcttgcccagtgtggcaagacctcagaaaaaccagtcaattacgcctaagatcattttgctgtccttaaaccccccaggttccttcttgcacaaatccactctgctgcccaccttccctggcattttaaacagacctaccccaccccaactcagagttaagcatacatggcaatgctgaaaataaacaaaatccactgaggcttcccaggccatttaaagcctggagtaccagcgcatatcatctcatggggtccagagtggagtccaggcttctctgaaaccagggctgagcatatttccatagccaaggaggtgggactccctggagctatctgtggtcttagggaaggatccagacatacacggctttggggtacaagctgtgatcactgatcaataaattatctctagattggtccttgtgaggggagttttaagaatccagaacatcttgctcttgatcagcacatccaaaaacaccaagacaaacatccagtggagcagaacctctcctgcctcgggagttctgaccgggttccccagcagggtgttaagcctctgtctctggccctaccagcatccaggttccactttcctaggagagagtggagatgggaagacagggaaaggaaggcagcaggaggccacaagcccaccaggtcttcatgtcaagagagggagtaacatgtcttctcattgcccacggacccaacctctgtccaggtgcccctcatcatcacagtttaacacaagctcccctgctccagccaaattgatctcccagtcttgtccttacccattccaagtgctctgccagcccctgttcatccaagttttaagtcctccaccctgttataagagactgttccaacggctctgggcctcagtggtcacttgaccaccattgtctcagagctgcccactttgtgtgtgtcacatgctgcctgagtcacatgtacatcttatttctgcctctagttttgtaagctcctggagggcggataacatcttatactactcttgtattctcatggcacctagtgcagtgctgggcacagagtaggtgctcaataaagacttgttgaatgaa

SEQ ID NO: 3215 - DNA, 1054 bp, Homo sapiens
  source 1..1054: mol_type = genomic DNA
gacaacaagatggcggcgctgcgggacggctagcggccctgcgtggaggcgaggaatccgcatctatggagatgtccctgcatcccatgactcggagctgatggccttcatgacgaggaagttgtgggacctggagcagcaggtgaaggcccagactgatgagatactgtccaaggatcagaagatagcggccctagaggacctggtgcagaccctccggccacacccagccgaggcaaccctgcagcggcaggaggaactggagacgatgtgtgtgcagctgcagcggcaggtcagggagatggagcggttcctcagtgactatggcctgcagtgggtgggcgagcccatggaccaggaggactcagagagcaagacagtctcagagcatggcgagagggactggatgacagccaagaagttctggaagccaggggactcattggcgccccctgaggtggactttgacaggctgctggccagcctgcaggatcttagtgagctggtggtagagggtgacacccaagtgacaccagtgcccggcggggcacggctgcgtaccctcgagcccatcccgctgaagctctaccggaatggcatcatgatgttcgacgggcccttccagcccttctacgatccctccacacagcgctgcctccgagacatattggatggcttctttccctcagagctccagcgactgtaccccaatggggtcccctttaaggtgataagctgctcctcaaaccacacctttggggattttgaagggagtggggatacacagcctccccagacacctcccattctgaggggaagccgctgcactccctgggggaccccagtctgatgccctccaggaggataagtctgaagccgggctgggaagggagcggagaggcccgaaacagagcagcaggcagcgccctctgctggcaccctggagacagcctcggctgcggggcccctgccttctagtcctccccagctttcaggacaccttgacaacctggggtccctgcagaagtggcccggctgtcccccaagtctcctg

SEQ ID NO: 3216 - DNA, 3533 bp, Homo sapiens
  source 1..3533: mol_type = genomic DNA
gttgcctgatgacgagagttgggagtgtggctggggctgcggatctccagcagtggcgttacttctagcggctggataccgggttctccgcgagatcgcgagatcccgagatattctccccgcacggaagcgacgactggcctggccagaggactcgcgtgggagcgaggtgccggccccgacaggacggtgagaaattgttttacagcctacccgtatattacaagaaatctcaagtcaaacactggaaaagatgtcagaagattcagaaaaggaagactattcagacagaacaatcagtgatgaagatgaatcggatgaggatatgttcatgaaatttgtaagtgaagatcttcatcggtgtgcacttttaacagctgactcttttggtgatcccttcttcccccggactacacagatactattagaatatcagctagggagatgggtgccacgtcttcgtgaaccaagggatttatatggtgtctcttcttctggtccattgagcccaacacggtggccataccattgtgaagtcatcgatgaaaaagtccagcatattgattggactccttcttgtcctgagccagtgtatatcccaacgggcttagaaacggaacccctttatccagactccaaggaagctactgtggtttatctagctgaagatgcttacaaagagccctgttttgtgtattcccgagttgggggtaaccgaacacctttgaagcagcctgtggattaccgtgacaatactttgatgtttgaagcaaggtttgagagtggtaatctacagaaggtagtcaaagtggcagaatacgaataccaattgactgtacgccctgacctcttcacaaataaacacacccagtggtactatttccaagtcactaatatgcgagcaggaatagtctacagattcactattgtcaacttcaccaaacctgctagtctttacagtcggggtatgcgcccactgttctattctgaaaaagaggccaaggctcatcacattggctggcagagaataggagaccaaatcaagtattataggaacaacccaggccaagatgggcgccattatttctctcttacatggacatttcaatttccacacaacaaagatacctgctactttgctcattgctatccatacacttacaccaacctgcaagaatacctttctggcatcaataatgatccagtacggtcaaagttttgtaaaatacgtgttttgtgccacacgcttgctaggaacatggtgtatattttaacaatcactacccccttgaagaactctgactcaagaaagcggaaggctgtgattctgactgcaagggtccatccaggggaaaccaacagctcttggatcatgaaaggcttcctagattatattttaggaaactcaagtgatgcacagttgcttcgggacacttttgtcttcaaggtggtacccatgctcaatccagatggtgtgattgtgggaaattatcgctgttccttagctggacgggatttaaaccgtaattatacatctctcctgaaggaatcttttccttctgtatggtatacccggaacatggttcatagactgatggagaaacgagaggttattttatactgtgatcttcatggccatagtaggaaagagaacatcttcatgtatggctgtgatggtagtgacagatctaagacattatacttacagcaacgaatcttcccacttatgctaagcaaaaattgtccagataaattttcattctcagcttgcaagtttaatgtccagaagagcaaagaaggaacaggaagggtggtaatgtggaaaatgggaatcaggaacagctttaccatggaggccaccttctgtggatctactctgggtaacaaacgaggcactcatttcagcacgaaagacctggaatcaatgggatatcatttttgtgattctctcttggattattgtgatcccgaccggaccaagtattatcggtgcctgaaagaattagaagaaatggaaagacatataaccctggaaaaagtctttgaggattcagacacacctgtgatagacattacattggatgtagagtctagtagccgaggctctgacagttcagaatccattgactctctgacttaccttctcaagttaacttctcagaaaaaacatttgaaaacaaagaaggaaaggaattctaccatagcaagccaccaaaatgccagaggacaagaggtttatgatagagggcatttgctgcaaagacacacacaatcaaattctgatgtgaaagatacaaggccaaatgaaccagatgattatatggttgattatttcagaagacaattacctaatcaaggtttggatctgcaccacaacttaaaaagcaaaataaaagaatgcatatctttccaaagcaagaagactggcataaattggacagatgatgaaaaaagaagctacaaggataaaggaatagttcaaactcaagaaatattgcagtatttgctccccatcgtgcatagcactaaaaacatgcaaaccactcagataaaacagctattcaatccaagaaccaacttccaaatccaacatcaactaaatccggctacttgcagaaatataaagaaatacagcacatcttggacagcacccagaaatcacccttttgtaatccaaggggatgttatggcaaactcttcagaatgggtccagtctaagccccacaggtcattggaaagtttatcacctctcaaaggccccaagaagaataaacattctcaaatctgggccataaagaatgaagacataaaacctctcagcagcaagtgggagactgcttcttcaagctttggaatggatgcaaatgttctaaaatataagagtcttcaagctgaagaaactaaccagcaaagctctaagcatacagccctccatctaactaaaaataaggatgagcaggccaataagaatgatggacaacccaccttatatctgaagttccaaagggagagttaatctagctttatactgctctgagaactgtgaatgaaggataacatatgcttatgtagtaaaaagaaaaaaaggaaagccctccccttcccctttccctatctctccccttacacatgcatatgcataaactaaaaattttagatatcccatcttctgtagtgggaacatctttcagagatttaaaaagaaatccagagaaaatatggaaaaatattaaagcagatatttatatttagtttttatcagcatggaaaaaaatctctgaagttttgatttcttccaaaactacttacacattcgacaccaaaaaaacttaagaactcaaagtaggaatgacatataatatgtcactgattttaacctccctactagacactttaatcaattagtcaacaaacatcatttcctgattttctgttatatcattagtgtgctaggaaccatttctctctactaggagattaccacataattgtacagataaaacatacctgaataaaatgattacagaataaga

SEQ ID NO: 3217 - DNA, 1487 bp, Homo sapiens
  source 1..1487: mol_type = genomic DNA
taacaacggctacattcctcccccagggccaagggaaatcctgagcgcaggccagggttgtttggttttgaggtgtgctgggatgaaaggcaccctggaagtggaaggttcggtcattcattaattaattacatctataattgagggtttgttcttaagagcgagtcctttgaaagtactttccttcaaacagtgactgccacaaaggcatcagatattcaccaccttctcggctgcctcagcacagcaagctttattctgggacctgagatcctgttctgagctggctttcccttctccaggctcgctcaccctccctttagagatagtggatggtaagatgaccaatgctcagattattcttctcattgacaatgccaggatggcagtggatgacttcaacctcaagtatgaaaatgaacactcctttaagaaagacttggaaattgaagtcgagggcctccgaaggaccttagacaacctgaccattgtcacaacagacctagaacaggaggtggaaggaatgaggaaagagctcattctcatgaagaagcaccatgagcaggaaatggagaagcatcatgtgccaagtgacttcaatgtcaatgtgaaggtggatacaggtcccagggaagatctgattaaggtcctggaggatatgagacaagaatatgagcttataataaagaagaagcatcgagacttggacacttggtataaagaacagtctgcagccatgtcccaggaggcagccagtccagccactgtgcagagcagacaaggtgacatccacgaactgaagcgcacattccaggccctggagattgacctgcagacacagtacagcacgaaatctgctttggaaaacatgttatccgagacccagtctcggtactcctgcaagctccaggacatgcaagagatcatctcccactatgaggaggaactgacgcagctacgccatgaactggagcggcagaacaatgaataccaagtgctgctgggcatcaaaacccacctggagaaggaaatcaccacgtaccgacggctcctggagggagagagtgaagggacacgggaagaatcaaagtcgagcatgaaagtgtctgcaactccaaagatcaaggccataacccaggagaccatcaacggaagattagttctttgtcaagtgaatgaaatccaaaagcacgcatgagaccaatgaaagtttccgcctgttgtaaaatctattttcccccaaggaaagtccttgcacagacaccagtgagtgagttctaaaagatacccttggaattatcagactcagaaacttttattttttttttctgtaacagtctcaccagacttctcataatgctcttaatatattgcacttttctaatcaaagtgcgagtttatgagggtaaagctctactttcctactgcagccttcagattctcatcattttgcatctattttgtagccaataaaactccgcactagc

SEQ ID NO: 3218 - DNA, 2345 bp, Homo sapiens
  source 1..2345: mol_type = genomic DNA
agtcaccggcccctgctcaagaatgccagtgtgtgtgtagcctccacagagaggtcgttttctcggagtccagaggggccgcctgagcttctgagaactagggaggagccatcccagccatgagcccctgctccggagggagaggtgagctcagggcagcctgcctgcagccagaggtgccgggagccccgggcctgtcatggtggccatctacagccggcctgaggcagtcacagacggatttgcagctgagcctgtctatctggtgtgggaagaagatggggagttacttgtcagtcccggcttacttcacctccagagacctgtttcggtgttcagaatgccaggattccctcaccaactggtactatgagaaggatgggaagctctactgccccaaggactactgggggaagtttggggagttctgtcatgggtgctccctgctgatgacagggccttttatggtggctggggagttcaagtaccacccagagtgctttgcctgtatgagctgcaaggtgatcattgaggatggggatgcatatgcactggtgcagcatgccaccctctactgtgggaagtgccacaatgaggtggtgctggcacccatgtttgagagactctccacagagtctgttcaggagcagctgccctactctgtcacgctcatctccatgccggccaccactgaaggcaggcggggcttctccgtgtccgtggagagtgcctgctccaactacgccaccactgtgcaagtgaaagaggtcaaccggatgcacatcagtcccaacaatcgaaacgccatccaccctggggaccgcatcctggagatcaatgggacccccgtccgcacacttcgagtggaggaggtggaggatgcaattagccagacgagccagacacttcagctgttgattgaacatgaccccgtctcccaacgcctggaccagctgcggctggaggcccggctcgctcctcacatgcagaatgccggacacccccacgccctcagcaccctggacaccaaggagaatctggaggggacactgaggagacgttccctaaggcgcagtaacagtatctccaagtcccctggccccagctccccaaaggagcccctgctgttcagccgtgacatcagccgctcagaatcccttcgttgttccagcagctattcacagcagatcttccggccctgtgacctaatccatggggaggtcctggggaagggcttctttgggcaggctatcaaggtgacacacaaagccacgggcaaagtgatggtcatgaaagagttaattcgatgtgatgaggagacccagaaaacttttctgactgaggtgaaagtgatgcgcagcctggaccaccccaatgtgctcaagttcattggtgtgctgtacaaggataagaagctgaacctcctgacagagtacattgaggggggcacactgaaggactttctgcgcagtatggatccgttcccctggcagcagaaggtcaggtttgccaaaggaatcgcctccggaatggcctatttgcactctatgtgcatcatccaccgggatctgaactcgcacaactgcctcatcaagttggacaagactgtggtggtggcagactttgggctgtcacggctcatagtggaagagaggaaaagggcccccatggagaaggccaccaccaagaaacgcaccttgcgcaagaacgaccgcaagaagcgctacacggtggtgggaaacccctactggatggcccctgagatgctgaacggaaagagctatgatgagacggtggatatcttctcctttgggatcgttctctgtgagatcattgggcaggtgtatgcagatcctgactgccttccccgaacactggactttggcctcaacgtgaagcttttctgggagaagtttgttcccacagattgtcccccggccttcttcccgctggccgccatctgctgcagactggagcctgagagcagaccagcattctcgaaattggaggactcctttgaggccctctccctgtacctgggggagctgggcatcccgctgcctgcagagctggaggagttggaccacactgtgagcatgcagtacggcctgacccgggactcacctccctagccctggcccagccccctgcaggggggtgttctacagccagcattgcccctctgtgccccattcctgctgtgagcagggccgtccgggcttcctgtggattggcggaatgtttagaagcagaacaagccattcctattacctccccaggaggcaagtgggcgcagcaccagggaaatgtatctccacaggttctggggcctagttactgtctgt

SEQ ID NO: 3219 - DNA, 600 bp, Homo sapiens
  source 1..600: mol_type = genomic DNA
gggacaccggggcgggggcaccgggaggaagctgccttggaagagtggactgacgccgcaggggcgagctagccggctccgcgcctctccgcgggatccagacgcctcctggggctgctggcggagggtctgaggcggcgcggccatggctcacctccggggatttgccaaccagcactctcgagtggaccctgaggagctcttcaccaagctcgaccgcattggcaagggctcgtttggggaggtctacaagggcatcgataaccacacaaaggaggtggtggccatcaagatcatcgacctggaggaggccgaggatgagatcgaggacatccagcaggagatcactgtcctcagtcagtgcgacagcccctacatcacccgctactttggctcctacctaaagagcaccaagctatggatcatcatggagtacctgggcggcggctcagcactggacttgcttaaaccaggtcccctggaggagacatacattgccacgatcctgcgggagattctgaagggcctggattatctgcactccgaacgcaagatccaccgagacatcaaagctgccaacgtgctactctcggagcaggg

SEQ ID NO: 3220 - DNA, 1953 bp, Homo sapiens
  source 1..1953: mol_type = genomic DNA
gattcccggggttggtggcagcggcggtagcagcaatggactttctcctggggaacccgttcagctctccagtgggacagcgcatcgagaaagccacagatggctccctgcagagcgaggactgggccctcaacatggagatctgcgacatcatcaacgagacggaggaagggtgctcgacggcacctctcggccctccaggtcttagaaacctgtgtcaagaactgcgggcaccgcttccacgtgctggtggccagccaggacttcgtggagagtgtgctggtgaggaccatcctgcccaagaacaacccacccaccatcgtgcatgacaaagtgctcaacctcatccagtcctgggctgacgcgttccgcagctcgcccgatctgacaggtgtggtcaccatctatgaggacctgcggaggaaaggcctggagttccccatgactgacctggacatgctgtcacccatccacacaccccagaggaccgtgttcaactcagagacacaatcaggacaggattctgtgggcactgactccagccagcaagaggactctggccagcatgctgcccctctgcccgccccgcccatactctccggtgacacgcccatagcaccaaccccggaacagattgggaagctgcgcagtgagctggagatggtgagtgggaacgtgagggtgatgtcggagatgctgacggagctggtgcccacccaggccgagcccgcagacctggagctgctgcaggagctcaaccgcacgtgccgagccatgcagcagcgggtcctggagctcatccctcagatcgccaatgagcagctgacagaggagctgctcatcgtcaatgacaatctcaacaatgtgttcctgcgccatgaacggtttgaacggttccgaacaggccagaccaccaaggccccaagtgaggccgagccggcagctgacctgatcgacatgggccctgacccagcagccaccggcaacctctcatcccagctggcaggaatgaacctgggctccagcagtgtgagagctggcctgcagtctctggaggcctctggtcgactggaagatgagtttgacatgtttgcgctgacacggggcagctcactggctgaccaacggaaagaggtaaaatacgaagccccccaagcaacagacggcctggctggagccctggacgcccggcagcagagcactggcgcgatcccagtcacccaggcctgcctcatggaggacatcgagcagtggctgtccactgacgtgggtaatgatgcggaagagcctaagggggtcaccagcgaagaatttgacaaattcctggaagaacgggccaaagccgcggaccgattgcccaacctctccagcccctcagctgaggggcccccgggtcccccatctggcccagcgccccggaagaagacccaggagaaagatgatgacatgctgtttgccttatgagtgtggggtctggcaccctgcagcccaggtccccactgctctcacacccttaggctgggacctccctccctcctctggtgttaaggctgctttgggggtggcttgttacccccttttcctcctctttgaagacggagctgccccagctgtggctgggggtgtggaggcagtgggatgaactgggggacaggtctgcgctgcagtgggatctggctgctctgcctcctttcccaccccagctgaccatgagactttgctgagaagtggaggccccaggacaggctggctggctggctggctgcttgacccagtgtgactctccttcactgagtgataccctgctccgggcccatgccccaaggagcccttcagagcccacactgccagtcgaggcctggctggaggctggccacagtggaaattctgccgagcctcttgtcccttccctgctctgctgcatggggccccatggctttggctggccactga

SEQ ID NO: 3221 - DNA, 559 bp, Homo sapiens
  source 1..559: mol_type = genomic DNA
cagaaccagactcatccaggattaggaagctggggcccggcgtggacggcaggctcggggccaggatagcagcatcaaggagcattgtgtacatgcagaagtgcacagtacctggagtgaaactgcttgtgttcgatttctgataccattcataactggctgtgtgatctcaaaacctctaaaatgcagacctccagctctagatctgtgcacctgagtgaatggcagaagaattacttcgcaattacatctggcatatgtaccggaccgaaggcagatgcataccgtgcacagatattacgcattcagtatgcatgggcaaactctgagatttcccaggtctgtgctaccaaactgttcaaaaaatatgcagagaaatattctgcaattattgattctgacaatgttgaatctgggttgaataattatgcagaaaacattttaactttggcaggatctcaacaaacagatagtgacaagtggcagtctggattgtcaataaataatgttttcaaaatgagtagtgtacagaagatgatgcaagctggcaaaaaattca

SEQ ID NO: 3222 - DNA, 470 bp, Homo sapiens
  source 1..470: mol_type = genomic DNA
gggcggtgccggggcggcggaggacggcttcaggcccaaaggggattgggcggcggctctaggtggcgggtcttggtttgcggaaggggctggagtcgctgcttctcggtgaccggcgcgtggcccggccaatcctgccgccgccacccacccgcaaccgcgtccgttgacggtcgggtccttggtcgccgggtccttgcgggcaccacagagcggggtggcgtccgctccctcgagtcctcggtgccagggaattcaccgctcaccaccccctgccccgccttgggtcctgctcggggaccaaaccactggaaggcagtggcgggaaacgggcgcctgtgccggagataatcctgatgtaaaccattgacatagccagaaaatcaccaggctgtgattttccaaactcagcttcataacctattctgtagttgagggaacatgagccatttgcagagcttattgttaga

SEQ ID NO: 3223 - DNA, 561 bp, Homo sapiens
  source 1..561: mol_type = genomic DNA
agaagtcgagggtcatttgttcaaaagttggagaaatatcctcttttgttgcttcttctactctgtagtggagaatggggaactggtagttgtgtgggagttatgtgtctctaagatttgtcgacccattttgatggcaagggcataaaatcttgttattttaatttgcatctgggagaatgtctgagcaaggagacctgaatcaggcaatagcagaggaaggagggactgagcaggagacggccactccagagaacggcattgttaaatcagaaagtctggatgaagaggagaaactggaactgcagaggcggctggaggctcagaatcaagaaagaagaaaatccaagtcaggagcaggaaaaggtaaactgactcgcagccttgctgtctgtgaggaatcttctgccagaccaggaggtgaaagtcttcaggatcagactctctgaaaactgcaaatggaaaggaattcaaaagaatttagattaaaagttaaataaaaagtaggcacagtagtgctgaattttcctcaaaggctctcttttgataaggctgaaccaa

SEQ ID NO: 3224 - DNA, 4216 bp, Homo sapiens
  source 1..4216: mol_type = genomic DNA
gcaggggcgccggcgggcggatcgagaggaaggtcggggccatgggccggcactgcgcctcgggagggtccggccaccgctggaacccgaggccggggctgggggcgctccgggctccgacccacgggccggccggccctgcccgggctgggtgaggggcgcccgcctcaagctagaggaggagcggaggccgcgcgcggcccgccgagcgccttcaggatgctcatcaaggaataccacattctgctgcccatgagcctggacgagtaccaggtggcccagctctacatgatccagaaaaagagccgggaggagtctagtggtgagggcagcggcgtggagatcctggccaaccggccctacacggatgggcccgggggcagcgggcaatacacacacaaggtgtaccacgtgggctcccacatcccaggctggttccgggcactgctgcccaaggctgccctgcaggtagaagaggaatcctggaatgcctacccctacacccgaacccggtacacctgccctttcgtggagaaattctccattgaaattgagacctattacctgcctgatggggggcagcagccaaacgtcttcaacctgagcggggccgagaggagacagcgcatcctggacaccatcgacatcgtgcgggatgcagtggccccaggcgagtacaaagcagaagaggacccccggctttatcactcggtcaagacgggccgagggccactgtctgatgactgggcacggacggcggcacagacggggccccttatgtgtgcctataagctgtgcaaggttgagttccgctactggggcatgcaagccaagatcgagcagttcatccatgatgtaggtctgcgtcgggtgatgctgcgggcccaccgccaggcctggtgctggcaggatgagtggacagagctgagcatggctgacatccgggcactggaagaggagactgctcgcatgctggcccagcgcatggccaagtgcaacacaggcagtgaggggtccgaggcccagccccccgggaaaccgagcaccgaggcccggtctgcggccagcaacactggcacccccgatgggcctgaggcccccccaggcccagatgcctcccccgatgccagctttgggaagcagtggtcctcatcctcccgttcctcctactcatcccaacatggaggggctgtgtctccccagagcttgtctgagtggcgcatgcagaacattgcccgagactctgagaacagctccgaggaagagttctttgatgcccacgaaggcttctcggacagtgaggaggtcttccccaaggagatgaccaagtggaactccaatgacttcattgatgcctttgcctccccagtggaggcagagggaacgccagagcctggagccgaggcagctaaaggcattgaggatggggcccaagcacccagggactcagagggcctggatggagccggggagctgggggctgaggcatgcgcagtccacgccctcttccttatcctgcacagcggcaacatcctggactcaggccctggagacgccaactccaagcaggcggatgtgcagacgctgagctccgccttcgaggccgtcacccgcatccacttccctgaggccttgggccacgtggcgctgcgactggtgccctgtccacccatctgcgccgccgcctatgcccttgtctccaacctgagcccttacagccacgatggggacagcctgtctcgctcccaagaccacattccactggctgccctgccactgctggccacctcatcctcccgctaccagggcgccgtggccaccgtcattgcccgcaccaaccaggcctactcagccttcctgcgctcacctgagggtgccggcttctgtgggcaggtcgcactgattggagatggtgttggtggcatcctgggctttgatgcactctgccacagtgctaacgcgggcaccgggagtcggggcagcagccgccgtgggagcatgaacaatgagctgctctctccggagtttggcccagtgcgggaccccctggcagatggtgtggaaggcctgggtcggggcagcccagaaccctcggccttgcctccccagcgcatccccagcgacatggccagtcctgagcccgagggctctcagaacagccttcaggcagcccccgcaaccacctcctcctgggagccccggcgggcaagcacggccttctgcccacccgctgccagttccgaggcacctgacggccccagcagcactgcccgccttgacttcaaggtctctggcttcttcctcttcggctccccactgggcctggtgctggctctgcgcaaaactgtgatgcccgccctggaggcccagatgcgcccagcctgtgaacagatctacaacctcttccacgcggctgacccctgcgcctcacgcctcgagcccctgctggccccgaagttccaggccatcgccccactgaccgtgccccgctaccagaagttccccctgggagatggctcatccctgctgctggccgacactctgcagacgcactccagcctctttctggaggagctggagatgctggtgccctcaacacccacctctactagcggtgccttctggaagggcagtgagttggccactgaccccccggcccagccagccgcccccagcaccaccagtgaggtggttaagatcctggagcgctggtgggggaccaagcggatcgactactcgctgtactgccccgaggcgctcaccgcctttcccaccgtcacgctgccccacctcttccacgccagctactgggagtccgccgacgtggtggcgttcatcctgcgccaggtgatcgagaaggagcggccacagctggcggaatgcgaggagccgtccatctacagcccggccttccccagggagaagtggcagcgaaaacgcacgcaggtcaagatccggaacgtcacttccaaccaccgggcgagcgacacggtggtgtgcgagggccgcccccaggtgctaagcgggcgcttcatgtacgggcccctggacgtcgtcacgctcactggagagaaggtggatgtctacatcatgacgcagccgctgtcgggcaagtggatccactttggcaccgaagtcaccaatagctcgggccgcctcaccttcccagttcccccagaacgcgcgctgggcattggtgtctaccccgtgcgcatggtggtcaggggcgaccacacctatgccgaatgctgcctgactgtggtggcccgcggcacggaggctgtggtcttcagcatcgacggctccttcaccgccagcgtctccatcatgggcagcgaccccaaggtgcgagctggcgccgtggacgtggtcaggcactggcaggactccggctacctgatcgtgtatgtcacaggccggccggatatgcagaagcaccgcgtggtggcatggctgtcgcagcacaacttcccccacggcgtcgtctccttctgcgacggcctcacccacgacccactacgccagaaggcaatgtttctgcagagcctggtgcaggaggtagaactgaacatcgtggccggttatgggtctcccaaagatgtggctgtatacgcggcgctggggctgtccccgagccagacctacatcgtgggccgtgccgtgcggaagctacaggcgcagtgccagttcctgtcagacggctatgtggcccacctgggccagctggaagcgggctcgcactcgcatgcctcctcgggacccccgagagctgccttgggcaagagcagctatggtgtggctgcccccgtggacttcctgcgcaaacagagccagctgcttcgctcgaggggccccagccaggcggagcgtgagggcccgggaacaccacccaccaccctggcacggggcaaagcacggagcatcagcctgaagctggacagcgaggagtgaggcccacaccagcctggacctgggttatttattgacacacccaaggggcccgaggggctgcgtgtgggaggctggggacccagacttttggccccagcgctggcccccccagccccacaccctatatctccgtgtgctcctcggtgttacttccctttcatatgaggggacccagcgccggggggagggaggagggcgtgggcatgggcgcagaggcttttccagtgtgtataaatccatgaaaataaacgccacctgcacccca

SEQ ID NO: 3225 - DNA, 1969 bp, Homo sapiens
  source 1..1969: mol_type = genomic DNA
caagatggcggccaaggtggcgaagcagcagccgcggcggcggcggcggctggagtgagcgtccgactcgccgcgccgaacgaggtcccggtgtagggccgcgcgccgtggccgcgtcccactcctcaggccggggcgcacgtcggctcccacgcttagccagctcccgagtttcactcttgttgcccaggctggagtgcaatggcacgatctcggctcaccgcaacctctgcctcttgggttcaagcgattctcctgcctcagcctctcgagtagctgggattacaggtggtttcctagaaacatgattgtttattggcattgatctcacagtctggtgaggacttctttactgataatgtcaagttcaggttatcctcccaaccaaggagcattcagcacagaacaaagtcgttatcctcctcactctgtccagtatacatttcccaacacccgccaccagcaggagttcgcagtccctgattatcgttcctctcatcttgaagtgagtcaggcatcacagcttttgcagcaacagcagcagcaacagcttcgaaggcgaccttccttgctttcagaatttcacccaggttctgacaggcctcaagaaaggagaactagttatgaaccgtttcatccaggcccatccccagtggatcatgattcactggaatcgaagcgaccacgtctggaacaggtttctgattctcattttcagcgtgtcagtgctgcggttttgcctttagtgcacccgctgccagaagggctgagggcttctgcagatgctaagaaggatccagcattcggaggcaaacatgaagctccatcctctccaatttcggggcaaccatgtggagatgatcaaaatgcttcaccttcaaaactctcaaaggaagagttaatacagagtatggatcgtgtagatcgagaaattgcaaaagtagaacagcagatccttaaactgaaaaagaaacaacaacagcttgaagaagaggcagctaaacctcctgagcctgagaagcccgtgtcccctcctcctgtggagcagaaacaccgcagtattgtccaaattatttatgatgagaatcggaaaaaagcagaagaagctcataaaatttttgaaggtcttggcccaaaagttgaactgccactgtataaccagccatcagataccaaggtgtaccatgagaacatcaagactggagtacctgcaaggcgcatgatgaaaaaccaggtgatgaggaaaaaactcattttattttttaaaagaagaaatcatgcaagaaaacaaagggaacaaaaaatctgccagcgttatgatcagctcatggaggcatgggagaaaaaagtggacagaatagaaaataatcctcggaggaaagctaaagaaagcaaaacaagggaatactatgaaaagcagtttccagaaattcgaaaacaaagagaacagcaagaaagatttcagcgagttgggcagaggggagctggtctttcagccaccattgctaggagtgagcatgagatttctgaaattattgatgggctctctgagcaggagaataatgagaaacaaatgcggcagctctctgtgattccacctatgatgtttgatgcagaacaaagacgagtcaagttcattaacatgaatgggcttatggaggaccctatgaaagtgtataaagataggcagtttatgaatgtttggactgaccatgaaaaggagatctttaaggacaagtttatccagcatccaaaaaactttggactaattgcatcatacttggagaggaagagtgttcctgattgtgttttgtattactatttaaccaagaaaaatgagaattataaagccctcgtcagaaggaattatgggaaacgcagaggcagaaaccagcaaattgctcgaccctcgcaagaagaaaaagtagaagaaaaagaagaggataaagcagaaaaaacagaaaaaaaa

SEQ ID NO: 3226 - DNA, 2684 bp, Homo sapiens
  source 1..2684: mol_type = genomic DNA
gaggaggaggcgagccgcagcgccgcggcgacgaacccagggagaaaaggaagcaaatgagctgatggaagatctgtttgaaactttccaagatgagatgggattctccaacatggaagatgatggcccagaagaggaggagcgtgtggctgagcctcaagctaactttaacacccctcaagctctacgccagcttctgttactgatgtaaggatgcagagtcctgtcaggagttaggtgtcaagtgaagtctccttgttatggggcagtgcagctgtaggccaagctgtatctgtttgggaagggagaaaaaacagtagctggcatccatatccacttctccgggtttgaggaactactggccaacctactaaatgaacaacatcagatagcgaaggaactatttgaacagctgaagatgaagaaaccttcagccaaacagcagaaggaggtagagaaggttaaaccccagtgtaaggaagttcatcagaccctgattctggacccagcacaaaggaagagactccagcagcagatgcagcagcatgttcagctcttgacacaaatccaccttcttgccacctgcaaccccaatctcaatccggaggccagtagcaccaggatatgtcttaaagagctgggaacctttgctcaaagctccatcgcccttcaccatcagtacaaccccaagtttcagaccctgttccaaccctgtaacttgatgggagctatgcagctgattgaagacttcagcacacatgtcagcattgactgcagccctcataaaactgtcaagaagactgccaatgaatttccctgtttgccaaagcaagtggcttggatcctggccacaagcaaggttttcatgtatccagagttacttccagtgtgttccctgaaggcaaagaatccccaggataagatcctcttcaccaaggctgaggacaatttgttagctttaggactgaagcattttgaagggactgagtttcttaaccctctaatcagcaagtaccttctaacctgcaagactgcccgccaactgacagtgagaatcaagaacctcaacatgaacagagctcctgacaacatcattaaattttataagaagaccaaacagctgccagtcctaggaaaatgctgtgaagagatccagccacatcagtggaagccacctatagagagagaagaacaccggctcccattctggttaaaggccagtctgccatccatccaggaagaactgcggcacatggctgatggtgctagagaggtaggaaatatgactggaaccactgagatcaactcagatcaaggcctagaaaaagacaactcagagttggggagtgaaactcggtacccactgctattgcctaagggtgtagtcctgaaactgaagccagttgccgaccgtttccccaagaaggcttggagacagaagcgttcatcagtcctgaaacccctccttatccaacccagcccctctctccagcccagcttcaaccctgggaaaacaccagcccaatcaactcattcagaagcccctccgagcaaaatggtgctccggattcctcacccaatacagccagccactgttttacagacagttccaggtgtccctccactgggggtcagtggaggtgagagttttgagtctcctgcagcactgcctgctatgccccctgaggccaggacaagcttccctctgtctgagtcccagactttgctctcttctgcccctgtgcccaaggtaatgatgccctcccctgcctcttccatgtttcgaaagccatatgtgagacggagaccctcaaaaagaaggggagccagggcctttcgctgtatcaaacctgcccctgttatccaccctgcatctgttatcttcactgttcctgctaccactgtgaagattgtgagccttggcggtggctgtaacatgatccagcctgtcaatgcggctgtggcccagagtccccagactattcccatcgccaccctcttggttaaccctacttccttcccctgtccattgaaccagccccttgtggcctcctctgtctcacccttaattgtttctggcaattctgtgaatcttcctataccatccacccctgaagataaggcccacatgaatgtggacattgcttgtgctgtggctgatggggaaaatgcctttcagggcctagaacccaaattagagccccaggaactatctcctctctctgctactgttttccccaaagtggaacatagcccagggcctccaccagtcgataaacagtgccaagaaggattgtcagagaacagtgcctatcgctggaccgttgtgaaaacagaggagggaaggcaagctctggagccgctccctcagggcatccaggagtctctaaacaactcttcccctggggatttagaggaagttgtcaagatggaacctgaagatgctacagaggaaatcagtggatttctttgagctaggagaataagagtctggagactgggagccttcacttcggcctccgattggtggcgcatagggtgtaaccaataggaaacccctaaagggtacttaaaccccagattttgcaactggggctcttgagcagcttgctttagcctgctcccactctgtggaatatacttttgcttcaataaatctgtgcttttattgcttcattgtttca

SEQ ID NO: 3227 - DNA, 2872 bp, Homo sapiens
  source 1..2872: mol_type = genomic DNA
agcagcgcaggtgagcgccgcttccggggtcgggcgcctggatagctgccggctccggcttccacttggtcggttgcgcgggagactatggcgtcctcctcggtcccaccagccacggtatcggcggcgacagcaggccccggcccaggtttcggcttcgcctccaagaccaagaagaagcatttcgtgcagcagaaggtgaaggtgttccgggcggccgacccgctggtgggtgtgttcctgtggggcgtagcccactcgatcaatgagctcagccaggtgcctcccccggtgatgctgctgccagatgactttaaggccagctccaagatcaaggtcaacaatcaccttttccacagggaaaatctgcccagtcatttcaagttcaaggagtattgtccccaggtcttcaggaacctccgtgatcgatttggcattgatgaccaagattacttggtgtcccttacccgaaacccccccagcgaaagtgaaggcagtgatggtcgcttccttatctcctacgatcggactctggtcatcaaagaagtatccagtgaggacattgctgacatgcatagcaacctctccaactatcaccagtacattgtgaagtgccatggcaacacgcttctgccccagttcctggggatgtaccgagtcagtgtggacaacgaagacagctacatgcttgtgatgcgcaatatgtttagccaccgtcttcctgtgcacaggaagtatgacctcaagggttccctagtgtcccgggaaccagcgataaggaaaaggttaaagaattgcccacccttaaggatatggactttctcaacaagaaccagaaagtatatattggtgaagaggagaagaaaatatttctggagaagctgaagagagatgtggagtttctagtgcagctgaagatcatggactacagccttctgctaggcatccacgacatcattcggggctctgaaccagaggaggaagcgcccgtgcgggaggatgagtcagaggtggatggggactgcagcctgactggacctcctgctcttgtgggctcctatggcacctccccagagggtatcggaggctacatccattcccatcggcccctgggcccaggagagtttgagtccttcattgatgtctatgccatccggagtgctgaaggagccccccagaaggaggtctacttcatgggcctcattgatatccttacacagtatgatgctaagaagaaagcagctcatgcagccaaaactgtcaagcatggggctggggcagagatctctactgtccatccggagcagtatgctaagcgattcctggattttattaccaacatctttgcctaagagactgcctggttctctctgatgttcaaggagctaggggaagggggttgtttgccttcttcaggacctgactggacagatggacctggctcaagcaactactctggatgcactttgctgtgtgggatgaactaaaagtgtctgaattttgctgataactttataaaactcactatggcatgcttccctcctggtgggccctaggatggatgacactcaagatactacagatgtgggtgcaggcatgcacacacacgatggaatatggccattcctacacaggtggggtagagagtgggtcagcagcctggcacctcacagaggtgggacctaagaggactcatgattatgcagagaattggattgggtctctgtcatagattgagtaatctcttcccttacctcaattccatctccacccatctctacatctgggcacagcaacccagagatggccaaaagcattcaagcctgggggaagatgtttgactattgctgctcttcaccagaacctcacacctctcctgggactggaacccttcagtgggtgtgtggccagttttggaggctggaatgatgggccagggtgtaggattcattctccatgtaaagtttcctttcatcctgcctagccatccccaaggtttatttccagaagaaaggaatatctctacttggatcaattctggtcatttcaagaggatggaggcctcaagtgtgggaacttcccctactccctggatgtgtgtacctagcacacttccttctcccacccctttttccagttggatttgtttttctgttctcttctgtcctgtcttatactgcaactgtgtctcctaggggacagatggccttctttgtcatcttcactctccacccccagagaggagtcagagccataactcaatcactcagcccctccaaagatagttgatgtgtgataatctcataatgttgagaaccctgatgagatacattgtcttcctctccctacaatgcctctggggccaaggcacccattcttcttgctatcctccatcccccttgaggcttccactttttttttttttagacataaagctgggcatcagcaactggcctgtggtgatgcaaagctgctttgctctgtatctggctggactgatctgtctcacaagaagccatgaggccatagggagaagctccctctccccttcatcttctgctccaaaggtggtagcaagaggagtacccagttaggggttggagcccccatataacatcttcctgtcagaagactgatggatctttttcattccaaccatctccctttcccccgatgaatgcaataaaactctgtgacaccagcaaccattgctctttagaaatgggttttctgatcatatggctgatgtgttatgggcagtatggatgtcttcatttgttgcttctgtttttcatcttttttgttttattaataaaaatttatgtatttgctcctgttactataataatacagggaataaattattcaatcc

SEQ ID NO: 3228 - DNA, 874 bp, Homo sapiens
  source 1..874: mol_type = genomic DNA
ctcagcagccgggccaagaaaggtctttgggggcgcaagtctttggagggcaggtctttggggagcgctttgagtaatattagagctttcactaaaccctggcctattacgtcccctcccctgagatttacctttatatactcaagttctttcatgccaggaaggtaggctgaaggcttcgaaaacctgcagctcatacccaaagctagcactgtctatccctggagacccagcgcccaaaagctccactgggcgcatagcgcacggcacgcctcctcccccgagccgcagactgagtaactggccccggactaacctgaccagaagcaagagataaagtaataatgggtactgtggggaaaaacacagaagaacaattcggtaatatagtggtgatttacaagtcaagttaaaatgtccccagaagtggccttgaaccgaatatctccaatgctctcccctttcatatctagcgtggtccggaatggaaaagtgggactggatgctacaaactgtttgaggataactgacttaaaatctggctgcacatcattgactcctgggcccaactgtgaccgatttaaactgcacataccatatgctggagagacattaaagtgggatatcattttcaatgcccaatacccagaactgcctcccgattttatctttggagaagatgctgaattcctgccagacccctcagctttgcagaatcttgcctcctggaatccttcaaatcctgaatgtctcttacttgtggtgaaggaacttgtgcaacaatatcaccaattccaatgtagccgcctccgggagagctcccgcctcatgtttgaataccagacattactggaggagccacagtatggagaga

SEQ ID NO: 3229 - DNA, 489 bp, Homo sapiens
  source 1..489: mol_type = genomic DNA
ccccgctcccgacctggcttacgcggtcccgaccccgcccagctccgtggcctcacctctgactcctaggccctccctgcctaatcccctgccgcgggagcccgtctcgaccccttccatgcctcccagtcccaccctgcccagggcaagcccgctcggtgtgacggttccccgcgagtcgagggtggagaagccagcctccttcccccgagtgggactctagcagcccacctcttttaggggtgctgagaacacccattactcatccacagctactagggtagctttctcagggtgcagtgcttacggggcggagggggatggaaacagacccatgccctggctggaagggagctccagtcgctagctctcagggccagagcggggcaggaggatgctttcccagccccaccatggagctgcgctgtgggggattgctgttcagttctcgctttgattcagggaatctagcccacgtggagaaggtgg

SEQ ID NO: 3230 - DNA, 2970 bp, Homo sapiens
  source 1..2970: mol_type = genomic DNA
aactacaaaattgaaagtagagaggagggggcagccaatggaaaaaaaaatttgcacagcagccaatcctcctgcggcgttttgtgcctttgcccaacaggaaaatgtgtctcatgcagaggggcgttacccagtctccaatgggcgggagccggtggaacggaggagccaatgagtgcgagatgttgagtgacagctgtccaatggaggccctccgtgctagtacggcttgcggcttaagcgccgccgcggtctgcggaatgtcaactattcaacatggaggcggaggtcgataagctggaactgatggtgagtgcaaagtgaaggagatctactgggtagtttatttttcccccatggcctcggaggtggggcacaatttggagtcgccggaaactccgggcggcggaggctggaccagagtcgagttccctcctcctgcaccaaagggagccgccaccgtctggtgtctaaaccgcctcggttccagaaagctgagtctgatctggattacattcaatacaggctggaatatgaaatcaagactaatcatcctgattcagcaagtgagctgtcaccactgactaaagaagagaaaactgcggcagagcaattcaaatttcacatgccagatttatgaagaaatggacttggaaaggaaattctaacagagaagagcttaattccggagaaatttaggaagatgtcttgttaacccttgatgtctagagattgggggctggtgaagggggtttggcttcaatgactggataatgatatctttcatgagagagattataagaagaagggcagataatatatgaataaagttcagccaaaaggatcaaatgagaataaaacgatttaaatatatgtacacacgcatgcacacacacacttagtcttgtaatttcaggccagaaattctcaacactattttgcatctgttttctttttctaagtcatgataatatagatgttctggtctatcataaaagaatgtttatgtacatttcagtcattcggtatgtggctttgtaaattaaagtataggcaaaacatttgtgttatacatgatatataatttcattttgtaaatgttgattgcacatgtggtcacattattgttgagactgcttttatgtgacctgtagtctcccacagaacctaaagtaataagctggcttttctgtgatagccacgtttgcgtatttctttccctatttcccttgcctgctaatgttgaacagcatgaacttgctttctgatgctgttttagactgtccctgttgtatctcaataatatctttgttttccttcagcctttattactataattgttcattctacatgaaagctaggaaactgaaattagaagagcacttatctgctacttgccagttttgcgtgagtgtgttatatgtatgtgtcaatttccctttaaaataactatttattttaaaataactattggcaataaggaaactgttcaaagtagaggcagatcttgatagaaagatgttaatcacagggttgtttataatagcaatatacatacacatttggctagtactaggtgaataggaaaataaatcatgctgtatgtatacaataagaggtcaagttgccaataaattattactgttaatgttctgggaaatgctgaaactatgctaagtgggggagagggaaagcaggtattgcagttttgtagtgaagattgggctttggagtcatatctgagatgtaagtagcagcttttaaattctagctatgaccctgtgcagatcacttaacttttgagtgtcaggatgtttggaaggacaagacaggaaagtgttttaatacagggttcagtatttagtaagccttcaataagtgatattacatacatgtaataaaaactaagcattgaaaggactaggaaaaatgcatcaaatgttagttctgcaggttatagaattatacttttatgtaattttaaaatttcagttatgaacatgtttgtccattaacaaacttataatagctgaaaaacagggttgtgagaacagcttcagttaaaattgtcctgtctagtttgaatatttcaagaacagaaagcctttttttttttttttttttttttgagacggagtctcactctgttgcccaggctggaatgcagtggtacgctctcagctcactgcaacctccacctcccaggttcaagcagttctctgccccaccctcccgagtagctgggattacaggcgcccgccaccacgcccggctatttttttgtatttttagtagagatggggcttcaccatcttgaccaggctggtctttaactcctgatggtgatccacccacctcggcctcccaaagtgctgggattacaggcatgagctaccgtgcctggcccccttttttttaattacagagaaataagttacaccttagtatcagatattaattttcttcagtgttcaggcaattagtatttagaaagctcttgtcatgagatggctctgggatgtgatgatgattgttgggattgaaaaaacggtagtatcatggagagatcataataaattcttagtattaaaagtggttttgctttcagttagggagaaaaattagattgtactatttttcctctatgatttccttcagttatcttccaaatgttgttttttccccacagcccccttaacattgttctctatgcacttctcaatacattttcatttgtttctcaagcctctttgtggatgactcctaaatataacttcttccactagctctagatccgtatttccaataaaatcccctacctgaatattcaagttaaacatgtccagaatacttactgattttattgttaatagccactattctgttgtctggaattaaaacctgtataactaatttgcatccctttatcttcttagtcaataaaacctacaatcctctttctaaaatggt

SEQ ID NO: 3231 - DNA, 3250 bp, Homo sapiens; identical to SEQ ID NO: 3151
  source 1..3250: mol_type = genomic DNA

SEQ ID NO: 3232 - DNA, 1306 bp, Homo sapiens
  source 1..1306: mol_type = genomic DNA
gagcgaagcgcacgctgaggaggatcggcggccggtgagggggaagcaagtctggtctctgtgattgaagaagtcggctctgggctccagtgcgggaatcacacacatacctcagaatgccgggtctaagttgtagattttatcaacacaaatttcctgaggtggaagatgtagtgatggtgaatgtcagatccattgctgaaatgggggcttatgtcagcttgctggaatacaacaacattgaaggcatgattcttcttagtgaattatccagaaggcgtatccgttctatcaacaaactcatccgaattggcaggaatgagtgtgtggttgtcattagggtggacaaagaaaaaggatatattgatttgtcaaaaagaagattaactttgtgggaaacagagtccaatttaaggaacacagagcagcgcttcctggctgtaaatcctagacttgaaagttttccagtattgaaaacttcaaagctgaatattttttatttctaagtatttaaatgttctaacagatcagaacatgaaatgccctcctaaatgtcagctgttgtcacacagtagctccaacactttgagcatttttaagggagtggcctcatttcactagagacaaatctttaagaatagttctaaaattgggcttgtgatttccatttctgatgtctccagattggcacccctttctagttcaatgcctcacgagatttgccaggggcatccaaggcaaacaatcccaatctttctatataaaatgtattcaagcaaacatcaaataaatttctgggatatttaactataggcttcttccttcttgtcaccagttaaaagcattttaatactaagaccctaattcttttatctttattttagtcttgatgtggaactgtaggagcaggtgaataaaggatctctataacagatcctttcaaaagaagagttttagagaaaataaatttaactttaaccacagtgaaagttgacccttagcgggacaaagccttaaaatgcattgaaagaattagatcggttctgtgccttttatctatttgagattgatgacaacctgtgtgagagaatttatcacaccacgtccttattggaataataagctacttgccttgagtttataattcagggtggtaaagtatgtttttaaattttaaaaagcagctgcattttttatttagttggaatatcacccaattttttatttttattgctattaaaatatccactagatgccacctagagctccagttctttataacaaaacagggatctgtttgaacact

SEQ ID NO: 3233 - DNA, 4599 bp, Homo sapiens; identical to SEQ ID NO: 516
  source 1..4599: mol_type = genomic DNA

SEQ ID NO: 3234 - DNA, 3484 bp, Homo sapiens
  source 1..3484: mol_type = genomic DNA
attgcaaagccacagggaacataccaggtgttacctccaaacacaggctctctttatattgacaaggattgttcagctgtgtactgccatgagtcaagcagtaatatatactatccttttcaaaagcgtgagcagctgcgagctggcaggtacatcatgaggcatacttcagaggttatctgtgaggttctggatcctgagggaaacacttttcaggtcatggctgatggtagcatatcaactatattacctgaaaaaaaattggaagatgatttaaatgagaaaactgagggctatgatagtctgtcctctatgcaccttgaaaagaatcatcagcaaatctatggtgaacatgtccccaggttttttgttatgtatgctgatggatcaggaatggaacttcttcgagacagtgacatagaagaatatctatctttggcatataaagaatcaaatactgttgttctccaagagccagtgcaggaacagccaggcaccctaaccatcacagtccttcgccctttccatgaagcatcaccatggcaagtaaaaaaggaagatacaattgtccctcctaatctccggtcaaggtcatgggaaacatttccctcagttgagaaaaaaactccaggacctccgtttggtactcagatttggaaaggcctttgcattgagtccaaacagctagtgagtgccccgggtgccatactcaagagccccagtgtgctacagatgcgccaattcattcagcatgaggtcataaagaatgaggtgaaactgaggctgcaggtttcccttaaggattacataaactatattctaaagaaagaagatgagctgcaggaaatgatggttaaagattccagaactgaggaggagagaggcaatgctgctgatctcctcaagctggttatgtctttccctaaaatggaggaaactacaaaaagtcatgttactgaagttgcagctcacctaactgatttattcaagcagtctttggctacgcctccaaaatgcccaccagacacatttggtaaagatttctttgaaaagacatggagacacacagcatcctcaaaacgctggaaagaaaagatagacaaaacgaggaaggaaattgagacaacacagaattacctaatggatattaagaaccgcataataccacccttttttaaatctgaattgaaccagttatatcagtctcagtataatcacctggacagtctttccaaaaaactgccttcttttacaaagaaaaatgaagatgcaaacgaaacagctgttcaagatacatctgatcttaatctagatttcaagccacataaggtttcagaacagaaatcctcaagtgtgcctagtcttccaaaaccagagatttctgcagataagaaggatttcactgctcagaaccaaactgaaaatttaacaaaatctcctgaagaagcagaatcttatgagcccgtgaaaattccaacccagtccttgctgcaggatgttgcgggacaaacaagaaaagaaaaagtgaagttgcctcattatttgctgagttccaagcctaagtctcaacctcttgcaaaggtgcaagattctgttggaggaaaagtgaacacatcctctgttgcatctgctgccattaataatgcaaagtcatccctttttgggttccatcttctcccatcatcagtcaagtttggagtgcttaaggaaggacatacctatgccacagttgtaaagctcaagaatgttggagtggacttctgcaggtttaaagtaaagcagcccccacccagcacaggactgaaagtgacttacaaacctggacctgtggcagctggtatgcagacagaactgaatatagagttatttgccacagctgttggagaggatggggccaagggatcagcacacatctctcacaatatcgagattatgacagagcatgaggttctgttcctacctgtggaagcaaatatcctttaaagttcaacttgagtaatcatatatagtgcagaaattacacgagtgaggaaaacatggaagtcaaaatgcatctctactttattaattctatcttcaaaatcagagttaaatttattaagacaaagagcatcttcattcatctttgaaagcacctagccaaatctaaaaaaatacctgacacatagtatatgtgcagtaacttcagattgaataaatgtaaatgttattggctatctacggaatatcagacagaataataaaacagcaagtatctatcacaaaaaaattataattttatggaaggataggaaataccttattattataaaggttgggtattcactgaattatgcatgcattcctccttatcagtgtcttcagccaaacagatattagatagatatcaagaacctattacctccaaggtactgtataaaatagtttatcatatataaaaatggataattggactctgtcttaaaaggtattatataatttgtagcagaaataaagtcttcacattttatttctattttgtactttctccagtggcatgaattgtgtgctgcttgtgttacagttctctatttatttgatttttgagctggatcttatagaatgtgaaaacttgattgacgggaactttaagtaaaaataatgaacaaaaccatggcaacaggaaagctccaggtgtttgggatgattggcagggagttcaacttgccaaaagcttgagtattaggaatatagtgggaaagtaggttggagtcaagttatgaaagatcttaaatccttggcttgaattttattatttaagcagcagtgaaccactgcagattcctgaccctgtgggtgacatgatcagcatatctttattaagatgaatccagggttattgtgcaggacatgtcaaaggggaacaactggatgtgtaaaagtaccattagaagtctacctgaatgggccatgtgtgaggacaagaactgggagtgggggaacagtcaacataaaagagggacatgaatgaaagacatggtgggggaaggaaactgcaaaatctgaggtagaagccattgatggatggaagaaagaggacatcgagttcaacttcaaagttttgggctgaggtaatgaatcatgtatatgtaatattagatctcaactgagaagtcagaattggagatataataattttaagcatcgtttacacagaggtgatggctgaatgtatgggcaaggaacagaaatctggagtcggtttagggagcaggaggaagaagagccagtggagacaaaagcagcaattagaaaatggtgaaatacttcaaaagccttaggaagaatttcaaggaaaagacggacacaattgacggatgctattgagatgtcaaagaaaattcagatttaaagtgttaaatttggttgggataaaaactaaattgcaaaaggtaaagaatgactgtattaagaaagcagaaacattagttatggatattctttc

SEQ ID NO: 3235 - DNA, 3381 bp, Homo sapiens
  source 1..3381: mol_type = genomic DNA
agctttcaaaaatagcatagttgatgaaactggaaatttaggtgcgggctcttttaagaaatcatttgtcttcagtcttaagaatagactgacaacagatactgctaccagagggctctcaactatttcttaagaccccctaggaaatatcagaagaaaagcctccttctcaataaagcataagtaggacatctcgttttcagtgaatcagacacttggattggacttaatcttaaacctctggagttcaagaccttttaaaaagggctaaataaacaatctctacatgtaaaaggccactgactcctacttcctctgtatagagcaactgttgaactcagctgcctgtagggcgtgattctcagtcaccagactcagcaaaaggttttagaagcgttcgaccaaacctacaagataaaagatcaccaactcaggcaccccctccaccagaaagaaaagagagctttcatagctctttgataaccagtcacacaaagggtgtcattttagaccagttagtaactaacacacaaattccctccagtacagagtactttgctaacaaaaaacctcttcagggaactatgtattccaatgaagattcgagacagacaattgtatattctgaagaatctaacacaaccatgtcatatacacaaaaaatcactaatccactaccagcagcttccagcacggatcctgcaccattcgctaacatcaacaccccagttctacaagaggactacaggcaagattctcaaactcggaggatttctaccttgaaactaacccataaccaggatctaggaagtagcagccccattagtactccacagttctccaaatctgtcgaagtaccgtcatttctcaaaaggccccgctcactgacccctaatccagtgcctgagacacacacagcatctctttccattcagatagctcccctttcaggacaggatcttgaaagccacaaacagctacctgagctttctccagagactgcaaagatacctcttcagcaagagagacaaaaatctgcagttgcagcggcctctcagtcctcagactgcagagtgagccagataacagtgaatggaaactcaggaggtgccgtgagtcccatgagttactatcagaggccgttttccccctcggcatattctctcccagcctcactcaactccagcattgtcatgcagcacggcacatccctcgattccacagacacatatccccagcatgcgcagtctctggatggcaccaccagcagctctatccccctgtaccgatcctcagaggaagagaagagagtgacagtcatcaaagccccgcattacccagggatcgggcccgtggatgaatccggaatccccacagcaattagaacgacagtcgaccggcccaaggactggtacaagacgatgtttaagcaaattcacatggtgcacaagccggatgatgacacagacatgtataatactccttatacatacaatgcaggtctgtacaacccaccctacagtgctcagtcacaccctgctgcaaagacccaaacctacagacctctttccaaaagccactccgacaacagccccaatgcctttaaggatgcgtcctccccagtgcctcccccacatgttccacctccagtcccgccgcttcgaccaagagatcggtcttcaacagaaaagcatgactgggatcctccagacagaaaagtggacacaagaaaatttcggtctgagccaaggagtatttttgaatatgaacctggcaagtcatcaattcttcagcatgaaagaccaccccctctcccaacaactccgacacctgttccaagggaacctggccggaagcctctttctagctcccgactcggagaagtcactggtagcccctcccctccgccccggagtggcgcccccacaccaagctcgcgcgccccggctctgtctcccacccggcctcctaaaaagcctctggactatgttcaagatcattcttctggtgttttcaatgaggcctccttgtatcagtcctctatagacagaagcctggaaagacccatgagttctgcaagcatggccagtgacttcaggaagcggaggaagagcgagcctgcagtgggtccaccacggggcttgggagatcaaagtgcgagcaggactagcccaggccgagtggacctcccaggatcaagcaccactcttacaaagtctttcactagctcttctccttcttccccatcaagagcaaaagaccgtgagtcccctagaagttactcatccactttgactgacatggggagaagtgcaccaagggaaagaagaggaactccagaaaaagagaaattgcctgcaaaagctgtttatgattttaaggctcagacatctaaggagttgtcatttaagaaaggagatactgtctacatcctcaggaaaattgatcaaaattggtatgagggagaacaccacgggagagtgggcatcttcccgatctcatacgtagagaaactcacacctcctgagaaagcacagcctgcaagaccacctccgccagcccagcccggagaaatcggagaagctatagccaaatacaacttcaacgcagacacaaatgtggagctgtcactgagaaagggagatagagttattcttcttaaaagagttgatcaaaactggtatgaaggtaaaatcccaggaaccaacagacaaggcatcttccctgtttcctatgtggaggtcgtcaagaagaacacaaaaggtgctgaggactaccctgaccctccaataccccacagctattctagtgataggattcacagcttgagctcaaataagccacagcgtcctgtgtttactcatgaaaatattcaaggtgggggggaaccgtttcaggctctgtataactatactcccaggaatgaagatgagctggagctcagagaaagtgatgtcattgatgtcatggaaaagtgtgatgacggctggtttgtggggacctcaagaagaaccaaattctttggtactttccccggaaactacgtcaagaggctgtgaattgcgctccctccttctgtagaggccgcctgccagccatgcacctgcgtcaacgcgcctgaaacaccccgcgggcctcccgttgtcatgccttacggtttccaatgcgccgtcaccatctccacctgccaccaaaccaccagcagagtagccgccgctgctgtgagcctggggacgacatggcaggctggtccccctccgtgaaagtgtggattcctacttcctgctctaagctttgacacgtcaaaatgtgggatcagaaagaaaaaaatcatgatatttaaaaatggtcaaatatttgaggcaaaaaaaaaaaaaaaaa

SEQ ID NO: 3236 - DNA, 225 bp, Homo sapiens
  source 1..225: mol_type = genomic DNA
atgagatactatggcagctactacagaggcctgggatatggctgtggaggctttggtggtctgggctatggctgtggctgtggaggctacagatatggctctggctatggaggctatagatatggctgctgccgcccatcatgccgtgaaggatatggattctctggattcaaaaaacttgctgattctcatactctaactccaagatcttgcccgtatgcttca

SEQ ID NO: 3237 - DNA, 563 bp, Homo sapiens
  source 1..563: mol_type = genomic DNA
ctttgttgtgagctgcggcagagactggtggctggaggagacgccggcgctggagagtgcgctgcgccgcccgccgctgagggaccgcggggttagccactgctggctgcttccagtgttcgccgagaggtaccgggggtgacagctccgggaccggccgaaaggcgaggaaccggtgtggaaattaaaagaacacacatattttgactggggctttgatcaaccaaatgctaaaaaggctggagtgcaatggtgcgatctcggctcactgcaacctccgcctcccgggttcaagtgattctcctgtctcctgggttcaaccacataaagaagatccctaatagtcatttctcaacaattatatagtcaactgatgtaacaatggtactaatattgggacgcagactaaacagagaggatcttggggtgcgtgattccccagcaactaagcgaaaagtttttgaaatggaccccaaatctctgacaggtcatgagttttttgacttctcttcaggatcatcccatgccgaaaacatactccagatatttaatgaatttcgtga

SEQ ID NO: 3238 - DNA, 1083 bp, Homo sapiens
  source 1..1083: mol_type = genomic DNA
acttcctgccgggctgcgggcgcctgagcggctcttcagcgtttgcgccggcggctgccgcgtctctctcggctcccgcttcctttgaccgcctcccccccccggcccggcggcgcccgcctcctccacggccactccgcctcttccctcccttcgtcccttcttcctctcccttttttccttcttccttcccctcctcgccgccaccgcccaggaccgccggccgggggacgagctcggagcagcagccagacggagtctcgctcttttgccaggctggagtgcagtggcgcgatcctgagtcactgcaacctccacctcccaggttcaagcgattctcctgcttcagcctgccaagtagctgggactacagagtttattaaccacttaacctctcagaactgaacaaagacaacattgttcctggaacgccctctttttaaaaaagaaagcataacccctactgtagaactaaatgcactgtgcatgaaacttggaaaaaaaccaatgtataagcctgttgacccttactctcggatgcagtccacctataactacaacatgagaggaggtgcttatcccccgaggtacttttacccatttccagttccacctttactttatcaagtggaactttctgtgggaggacagcaatttaatggcaaaggaaagacaagacaggctgcgaaacacgatgctgctgccaaagcgttgaggatcctgcagaatgagcccctgccagagaggctggaggtgaatggaagagaatccgaagaagaaaatctcaataaatctgaaataagtcaagtgtttgagattgcacttaaacggaacttgcctgtgaatttcgagtctttccctctgaaacaggtggcccgggagagtggcccaccccacatgaagaactttgtgaccaaggtttcggttggggagtttgtgggggaaggtgaagggaaaagcaagaagatttcaaagaaaaatgccgccatagctgttcttgaggagctgaagaagttaccgcccctgcctgcagttgaacgagtaaagcctagaatcaaaaagaaaacaaaacccatagtcaag

SEQ ID NO: 3239 - DNA, 2865 bp, Homo sapiens
  source 1..2865: mol_type = genomic DNA
agtgccccccgcgccccgctccggcagctccacgctcgcgcccgccatgccggagcagttcagcgtcgccgagttcctggccgtcaccgcggaggacctcagctccccggctggggccgccgccttcgccgccaagatgccccggtaccgaggggcggcgctggcgcgggaggagatcttggaaggagaccaagccatcctgcagagaataaagaaggctgtgcgggcaatccatagctccggccttggccatgtggagaatgaagagcagtaccgagaggccgtggaatccttaggcaacagccacctgtcccagaacagccatgagctgtccacaggcttcctaaacttggccgtgttcacccgcgaggttgctgcgctcttcaagaacctgattcagaacttgaacaacattgtctctttccccctggacagtctgatgaaggggcagctgagggacggtcgacaggcttctctttccttggggtctagggccaagctggagaaggagcgcgatcgggccagggtgacaggagggatccctggggaggtggcccaggacatgcagagagagcggcgcatcttccagctgcacatgtgtgagtatctgctcaaagccggggagagccagatgaagcaaggtcctgacttccttcagagcctcatcaagttcttccacgcccagcacaactttttccaagatggctggaaggctgcccagagcctgttccccttcatcgagaagctggcggcctcagtacatgcactccatcaggcccaggaggacgagctacagaagctgacccagctccgggactccctccgagggacactgcagcttgagagcagagaggaacacctgagccggaagaactcaggatgtggctatagcatccaccagcaccaaggcaacaagcagtttgggacggagaaagtgggctttctatacaagaaaagtgacggaattcgaagagtctggcagaaaaggaagtgtggagtcaagtatggctgcctgaccatctcacacagcacgataaaccggcccccggtgaagctgaccctgctgacgtgccaagtgaggccaaaccctgaggagaaaaagtgcttcgacctggtgacccacaaccggacgtaccactttcaggcagaggacgagcacgagtgtgaggcgtgggtgtcagtgttgcagaacagcaaggacgaagccctgagcagcgccttcctcggggagcccagcgctggcccggggtcctgggggtccgccggccatgatggggagccgcacgacctcacaaagctgctcatcgcggaggtgaagagcaggcctgggaatagccagtgctgcgactgcggggctgcagaccccacgtggctcagcaccaacctgggcgtgctcacctgcatccagtgctcgggcgtccaccgcgaactgggcgtgcgcttttcgcgcatgcagtcactcaccttggacctgctgggcccctccgagttgttgctggccttgaacatgggaaacacgagcttcaatgaggtcatggaggcccagctaccctcacacggcggccctaaaccctcagctgagagtgacatgggcacccgcagggactacattatggccaagtatgtggagcataggtttgcacgccggtgcacacctgagcctcagcgactctggacagccatttgcaacagggacctcctgtcggtactggaggcctttgccaatgggcaggactttggacagccgctgccagggcctgatgcacaggcacctgaagaactcgtcttgcatttggctgtcaaagtcgccaaccaggcttccctgcctctggtggatttcatcatccagaacggtggtcacctggatgccaaggctgctgacgggaacacggctctgcactacgcagcactctacaaccagcccgactgcctcaagctgctgctgaaggggagagctttggttggcacagtaaatgaagcaggcgagacagctctggacatagccaggaagaagcaccacaaggagtgtgaggagctgctggagcaggcccaggcggggacctttgccttccctctacatgtggactactcctgggtaatttccacagagcctggctctgacagtgaggaggatgaggaagagaagcgctgcttgctgaagctcccggcccaggctcactgggccagtgggaggctggacatcagcaacaagacctatgagactgtcgccagcctgggagcagccacccctcagggcgagagtgaggactgtcccccgcccttgccagtcaaaaactcttctcggactttggtccaagggtgtgcaagacatgccagtggagatcgttctgaagtctccagcctgagttcagaggcccctgagacccctgagagcctgggcagtccagcctcctcctccagtctgatgagccccttggaacctggggatcccagccaagccccacccaactctgaagagggcctccgagagcccccaggcacctccagacccagcctgacatccgggaccaccccttcggagatgtacctccccgtcagattcagctccgagagcactcgctcctatcggcggggggcgcggagccctgaagatggtccctcagccaggcagcctctgcccagaaggaacgtgccggttggcatcactgaaggagatggctcaaggactgggagtctcccagcaagttctgtgcaacttttgcaagactagctccttgctggcccccacatgccccatgctaggccccaatgttcagagctgggacttgagctcacaaaactggggagctgagacatttgttctcttggatctcactctctctgtcccttgtgcctctgtagctg

SEQ ID NO: 3240 - DNA, 1220 bp, Homo sapiens
  source 1..1220: mol_type = genomic DNA
cagtgtttatagcatagtccactgggactgccgctctgacaaagactgtgtcactactttgtggaatgttattttagaacttccagaatgcctcagtaaatcctgactgccatgtaactgtgtactgtgctgctgagctcttaacatgaagcagcagcagtgaccctggcgggccaggctgacgtgcgtgggaacagtgggagtgaccctggctgggaagcagggaggcctggatattgtttctcctggctctgtgtcctgccattctcatccctgtgctcagagctctcaagcacccacgatggccttctcaggccgagcgcgcccctgcattatcccagagaacgaagaaatcccccgagcagcccttaacactgtccacgaggccaatgggaccgaggacgagagggctgtttccaaactgcagcgcaggcacagtgacgtgaaagtctacaaggagttctgtgacttttatgcgaaattcaacatggccaacgccctggccagcgccacttgcgagcgctgcaagggcggctttgcgcccgctgagacgatcgtgaacagtaatggggagctgtaccatgagcagtgtttcgtgtgcgctcagtgcttccagcagttcccagaaggactcttctatgaggaacgaacgtgatggttaagctaccttcattaagcagcatgaccgcttcctgagctcctgctgccgcatttaggccctgtcagctgtgaggccactggtgctgagtcagagggaaaagctcagaacagccttgagcagcgaagaataaagcatgactcatctcgtcctgcccacccctcacactggactataaataccctccctgggtctgtgtgctgttattccaaaagatgcgatgaatacccagaactaggctattcatgggctgttgcccagttcaagctctattgggtcctgaggaagattactattttggctacattgtttatcattaaaaccagcccagggatgtgtaaacctgcatctggagaataagacatttctttttggttaaatgatattagagaaaaaaaaaactatccaaggctgctaacaaataatcttcactttcaattatatccagcaataagttgttctccagaaaagaaagcttggaaacttacccagtttgccttccatttgggacatgactgatgtgcttcagtctttgtataataaatgcatcttcgccactcta

SEQ ID NO: 3241 - DNA, 2007 bp, Homo sapiens
  source 1..2007: mol_type = genomic DNA
gtgatttggcgggagtcttgaccgccgccgggctcttggtacctcagcgcgagcgccaggcgtccggccgccgtggctatgttcgtgtccgatttccgcaaagagttctacgaggtggtccagagccagagggtccttctcttcgtggcctcggacgtggatgctctgtgtgcgtgcaagatccttcaggccttgttccagtgtgaccacgtgcaatatacgctggttccagtttctgggtggcaagaacttgaaactgcatttcttgagcataaagaacagtttcattattttattctcataaactgtggagctaatgtagacctattggatattcttcaacctgatgaagacactatattctttgtgtgtgacacccataggccagtcaatgtcgtcaatgtatacaacgatacccagatcaaattactcattaaacaagatgatgaccttgaagttcccgcctatgaagacatcttcagggatgaagaggaggatgaagagcattcaggaaatgacagtgatgggtcagagccttctgagaagcgcacacggttagaagaggagatagtggagcaaaccatgcggaggaggcagcggcgagagtgggaggcccggagtggctctgggagtgaacctgtggccgctgcattggagaagagctccaggttgttcgccggtcccatgagtgacaggacagccccaaggtctcccagaagagacatcctctttgactacgagcagtatgaatatcatgggacatcgtcagccatggtgatgtttgagctggcttggatgctgtccaaggacctgaatgacatgctgtggtgggccatcgttggactaacagaccagtgggtgcaagacaagatcactcaaatgaaatacgtgactgatgttggtgtcctgcagcgccacgtttcccgccacaaccaccggaacgaggatgaggagaacacactctccgtggactgcacacggatctcctttgagtatgacctccgcctggtgctctaccagcactggtccctccatgacagcctgtgcaacaccagctataccgcagccaggttcaagctgtggtctgtgcatggacagaagcggctccaggagttccttgcagacatgggtcttcccctgaagcaggtgaagcagaagttccaggccatggacatctccttgaaggagaatttgcgggaaatgattgaagagtctgcaaataaatttgggatgaaggacatgcgcgtgcagactttcagcattcattttgggttcaagcacaagtttctggccagcgacgtggtctttgccaccatgtctttgatggagagccccgagaaggatggctcagggacagatcacttcatccaggctctggacagcctctccaggagtaacctggacaagctgtaccatggcctggaactcgccaagaagcagctgcgagccacccagcagaccattgccagctgcctttgcaccaacctcgtcatctcccaggggcctttcctgtactgctctctcatggagggcactccagatgtcatgctgttctctaggccggcatccctaagcctgctcagcaaacacctgctcaagtcctttgtgtgttcgacaaagaaccggcgctgcaaactgctgcccctggtgatggctgcccccctgagcatggagcatggcacagtgaccgtggtgggcatccccccagagaccgacagctcggacaggaagaacttttttgggagggcgtttgagaaggcagcggaaagcaccagctcccggatgctgcacaaccattttgacctctcagtaattgagctgaaagctgaggatcggagcaagtttctggacgcacttatttccctcctgtcctaggaatttgattcttccagaatgaccttcttatttatgtaactggctttcatttagattgtaagttatggacatgatttgagatgtagaagccattttttattaaataaaatgcttattttaggctccgtcccc

SEQ ID NO: 3242 - DNA, 4426 bp, Homo sapiens
  source 1..4426: mol_type = genomic DNA
atgccatcggaaaagaaaattagcagtgcaaatgactgcatcagcttcatgcaagctggctgtgagttgaagaaagtccggccaaattctcgcatttacaaccgttttttcactctggacacagaccttcaagctcttcgctgggaaccttcaaagaaagacctcgagaaagccaagcttgatatttctgccataaaagagatcagactggggaaaaacacggaaacatttagaaacaatggccttgctgaccagatctgtgaggactgtgccttttccatactccacggggaaaactatgagtctctggacctagttgccaattcagcagatgtggcaaacatctgggtgtctgggttacggtacctggtttctcgaagtaagcagcctcttgattttatggagggcaaccagaacacaccacggttcatgtggttgaaaacagtgtttgaagcagcagatgttgatgggaatgggattatgttggaagacacctctgtagagttaataaaacaactcaaccctactctgaaggaagccaagatcaggttaaagtttaaagaaatccagaagagcaaggaaaaactaaccacccgcgtgaccgaagaggaattttgtgaagctttttgtgaactttgcaccaggccagaagtgtatttcttacttgtacagatatctaaaaacaaagaatatttggatgccaatgatctcatgctctttttagaagctgagcaaggagtcacccatatcaccgaggatatatgcttagacatcataaggagatacgaactttctgaagagggacgtcaaaaagggtttcttgcaattgatggctttacccagtatttattgtcatcagaatgtgacatttttgatcctgagcaaaagaaggttgcccaagatatgacccagccattatctcactactatatcaatgcctctcataacacctatctaatagaagaccagttcagggggccagctgacatcaatgggtacattagagctttgaaaatgggctgtcgaagcgttgaactcgatgtaagtgatggttcagataatgaaccaatcctttgtaatcgaaataacatgacaacccatgtttcctttcgaagtgtcatagaggtaataaataaatttgcctttgttgcttctgaatacccactcattctttgcttgggaaatcactgctccttgccgcagcagaaggtaatggctcaacagatgaaaaaggtctttggcaataaactctatactgaagcacctttgccctcagaatcctacctcccatcaccagaaaaattaaaaagaatgatcattgtgaaaggaaagaagttgccttctgatccagatgtgttagaaggagaagtaacagatgaagatgaagaagctgaaatgtctcgaaggatgtcggtagattacaatggtgagcagaagcaaatccgactctgtagggagctctctgatttggtgtctatttgtaaatctgttcaatacagggattttgaactatctatgaaaagccaaaactattgggaaatgtgttcatttagtgaaacagaggccagccgcattgcaaatgagtacccagaggattttgttaattataataagaagttcttatcaagaatctatccaagtgccatgaggatcgattccagtaacttgaatccacaggacttttggaattgtggctgtcagattgtagcaatgaattttcagactccgggtccaatgatggaccttcacacgggctggtttcttcaaaacgggggatgtggttatgttctaaggccgtctataatgcgagatgaagtttcttacttcagcgcaaatacaaagggcattctacctggggtgtctcctctagctcttcatatcaagatcatcagtggtcagaatttcccaaagcccaagggagcttgtgccaaaggggatgtcatagatccctatgtttgtatagagatacacggaattccagcggattgttcggaacaaagaactaaaactgtacagcaaaacagtgataatcctatttttgatgaaacttttgagttccaagtaaacctacctgagctggccatgatccgttttgttgttctggatgatgactacattggggatgagtttatagggcaatatacgataccatttgaatgtttgcagcctggatatcggcatgttcccctgcgttcttttgtgggtgacatcatggagcacgtaaccctttttgtccacatagcaataactaatcgaagtggaggaggaaaggcacagaagcgcagtctttcagtgagaatggggaagaaagttcgggaatataccatgctcaggaatatcggtcttaaaaccattgatgacatctttaaaatagcggttcatccattacgagaagccatagatatgagagaaaatatgcagaatgcaatcgtgtctattaaggaactatgtggactccctccaattgccagtctgaagcagtgcctgttaactctgtcatctcggctcatcaccagtgacaatactccttcagtctcacttgtgatgaaagacagctttccttacctggagcctctgggtgcaattccagatgtgcagaaaaagatgctgactgcttatgatctgatgattcaagagagccggtttctcatagaaatggcggacacagtccaggaaaagattgtacagtgtcagaaagcagggatggagttccatgaagaacttcataatttgggggcaaaagaaggcttgaagggaagaaaactcaacaaagcaactgagagctttgcttggaacattacagtattgaagggccaaggagatctgttgaagaatgccaagaatgaagctatagaaaacatgaagcagatccagctggcatgcctgtcctgtggactgagtaaagcccccagcagcagtgctgaggccaagagcaagcgcagcctggaagccatagaggagaaggaaagtagtgaggagaatgggaagctgtgactctgggcattatcgacacgttcacccatcttatcaaggactctggtttctcattcttgttttctttctttaaatgttttataagttcacaaaatggtgccctatatggggtattggacatagatattttcacaatgtcagtatttcagtgtagttaatttatctaaattaaagcctttagtatcagtgttttaaattctgagacatgtgtcaacacccctgtgtggatgcctgtggaagagtgtgtgtgtgtgtgtgtgtgtgtgtgtgtggcagagagagagaaagagagagagagagagaaattctgttaaaatctattctgtgttgcattattcatttagtgagttattccttgatcattttgggacaattgttttaatctgaaattctaaagagcacttactgtaacctgttgctgtgtttaatttgacttctctgcctttgacatttaatttagtgatcttagcatagcttattattgaaggaagccaaatttatcaaagcatagatgttttggtagattaaatatagattagaaaaattcctaagaatcagagtagaaataaaagtgaatgaaagattaaacagatgatgagaatttctaaaaagattagcaaggtcatttcttcagtcagaaaactttaaaaaatatttattaaataaaatcaatttttaggaagttttctgtagtcatttactaaacatatgatttcactagaaaagctgatcataagtgaatttatacctacctgtgtggtactctgaaacacactgaaagctctgttgcaattaggattttgatgtgacaataatattgttgtataatttcgagatttgtaggaaggtctcattcttccaagctgagagtctagcactcattttctataacagatatggcagcttagaggtgttggctttgtttggatgtaatttagggtactaaatttaaatttaaagatattgttcaaacaatatcatatcatcacattgagctgatataaattctgtgggtccgataatatctttgtgataatttaagagctaaccagttaccacacatctatgatataaccctaacacacacagaaaagcatacatgcaaaaagaaatgactaattagggtacatttataattgcatctaggtaatttttaccctaatgtcttcataaagtacttgagtgtaatgtttgttacctccaacagaactaaatgttctatggttatgaaagaatatatttatttaaagcattgcttttattttgaaaagcttcttaattaatttgattaacaaatatgctaatttggggaaacctagagaagataattgttgaaattttgcaaatataaacatctcctatagcttctgtgttatttctgacttcttaacactattatgtttatgttgcacattactgaaagagtaaagat

SEQ ID NO: 3243 - DNA, 787 bp, Homo sapiens
  source 1..787: mol_type = genomic DNA
aattagctggcatggtggtgcacgcctgtggtcccagctacccgggaagctgaagtgggaagatctattgagcctgggaggttgaggctacagtgagctgtgactgcgcttgaacctgtgcctgcgcttgaacctgtgcctgaatactaccctagacagtgtggacaacagtgagtatatgcggaatggagacttcttacccaccaggctgcaggcccagcaggatgctgtcaacatagtttgtcattcaaagacccgcagcaaccctgagaacaacgtgggccttatcacactggctaatgactgtgaagtgctgaccacactcaccccagacactggccgtatcctgtccaagctacatactgtccaacccaagggcaagatcaccttctgcacgggcatccgcgtggcccatctggctctgaagcaccgacaaggcaagaatcacaagatgcgcatcattgcctttgtgggaagcccagtggaggacaatgagaaggatctggtgaaactggctaaacgcctcaagaaggagaaagtaaatgttgacattatcaattttggggaagaggaggtgaacacagaaaagctgacagcctttgtaaacacgttgaatggcaaagatggaaccggttctcatctggtgacagtgcctcctgggcccagtttggctgatgctctcatcagttctccgattttggctggtgaaggtggtgccatgctgggtcttggtgccagtgactttgaatttggagtagatcccagtgctgatcctgagctggccttg

SEQ ID NO: 3244 - DNA, 556 bp, Homo sapiens
  source 1..556: mol_type = genomic DNA
atcgtcttaaggaggtatttggtggaggctctttgaagttgggttcaggagtgtagaattggcaaagttattgccagcttcctgggttatatcctgtgttgtgacctcatggtttaagtgggaataaagatgagtataagcagtgatgaggtcaacttcttggtatatagatacttgcaagagtcaggattttctcattcagcatttacctttggtatagaaagccatatcagtcagtccaatataaatggtgccctcgtcccacccgctgcattgatttctatcatccagaaaggtctacagtatgtagaagcagaagttagtattaatgaggatggtaccttgtttgatggtcgaccaatagagtctctgtccctgatagatgccgtaatgcctgatgtagtacaaacaagacaacaagcttatagagataagcttgcacagcaacaggcagcagctgctgcagctgccgcagctgcagccagccaacaaggatctgcaaaaaatggagaaaacacagcaaatggggaggagaatggagcacatactatagcaa

SEQ ID NO: 3245 - DNA, 1736 bp, Homo sapiens
  source 1..1736: mol_type = genomic DNA
agacacgccgggctctcggggcaccacagccatgtgctcgttagcgtcaggcgctaccggttattcacatctgctgaagaaacattttcacactgtaagtctgagcatcagtttaatattgacagcatggttcataaacatgaatcctacagttgagtacatgaattccatatacaacccagtgccttgggagaaagaagagtatttgaagccagtattagaagatgaccttttacttcaatttgatgtagaagatctttatgaaccggtgtcagtacccttctcataccccaatggactcagtgaaaatacatctgttgttgaaaaattgaaacatatggaagccagggcactgtctgctgaagccgcattggccagagcacgtgaggatctgcaaaaaatgaaacaatttgctcaggattttgtgatgcacacagatgtcagaacctgctcgtcatctactagtgtcattgcggacctccaggaggatgaggatggtgtttatttcagctcatacgggcattatgggatacatgaagaaatgctaaaggacaaaatacgaacagaaagctaccgagatttcatataccaaaatccacatatcttcaaagacaaggtagttttggatgttgggtgtggaactggaattctctctatgtttgctgctaaagctggggcgaagaaggttcttggagttgatcaatctgaaatactttaccaggcaatggatattataagactaaataaacttgaagatactattacactaattaaaggaaagattgaagaagttcatcttcctgtagaaaaagtagatgttatcatatctgagtggatgggctattttcttctgtttgagtctatgttagattctgtcctttatgcaaagaacaaatacttggcaaaaggaggctcggtctaccctgacatttgcactatcagccttgtagcagtgagtgatgtgaataaacatgctgatagaattgctttttgggatgatgtctatggcttcaagatgtcctgcatgaagaaagcagttattccagaagctgttgtggaagttttagatccgaagactcttatttcagaaccttgtggtattaagcatatagattgccatacgacgtctatctcagatttggaattttcatcagattttaccctgaaaatcacaaggacatccatgtgcacggcaattgctggctactttgatatatattttgagaagaattgccacaacagggtcgtgttctctacgggccctcagagcaccaaaacacactggaaacaaacagtatttctactggaaaaaccattttcagttaaagcaggtgaagccttgaaaggaaaggtcacagttcacaagagtaagaaagatccacgttctctcaccgtgaccctcacgttgaataattcaactcaaacttatggtctccagtgaaacagccataaaagcacactaccttgtagtttttaatgtgggggtagagtgggtcagcaggagggagctggttttatgtgagcagatggatggatgatggaccctttcctaatgagcctcctcaataagagagaagttctcattgtgggaatctgacatagttcagctgaggaagagaatcagctgatcctcatggtctgccacgtaatcattttcttagacgtttgctccaccagatttaaccaaatgtaactcccacattgagtttatctatattgaaaatcatttacattgg

SEQ ID NO: 3246 - DNA, 747 bp, Homo sapiens
  source 1..747: mol_type = genomic DNA
gtgcgcttgtcacgcgtggcggtgcgtggttgctaggggcgcctgaggctgccgggtagcccagcaggccgagggaggaagtagcgtggagccggtgccgagccggggcgaagctggatcccctagactgacagacttcaaggatgcagctgctactaccggaggtgtgtggcaccttacctcagcaaggccatgagaccgtgtggccatgatgtgggcccctcatggcctcagcaggaacacagcactatagtattggcctccgccagaaaaacagcttcaagcagagtggtccctcaggcacagtacctgccacgccacctgagaaaccctcggagggcagagtctggcctcaggcccatcagcaagtgaagccaatctggaagctggaaaagaagcaagtggagacactgtcagcagggttgggcccaggcctcttgggcgtcccaccccagccagcatatttcttttgccccagcactttatgtagctctgggaccacggctgtcattgcaggccacagcagttcctgttacctacactctctcccggacttgttcaacagcaccctgctataccgccgctccagctataggcaaaaaccgtaccagcaactggagtctttctgcttgcgttcgagcccgtcagaaaaaagccctttttctctccctcaaaagagcctccctgtcagtctcactgccaacaaggccacttcttccatggtcttctccatggcccagcccatgg

SEQ ID NO: 3247 - DNA, 3691 bp, Homo sapiens
  source 1..3691: mol_type = genomic DNA
atgcagaaggaaagagagctccaggagaccatatatttcaagaacacgtggcctgcttgtatgttcttaatagttgctcctctttctgtcctctacaactggaaggatgaattggacacctggggatatttcagagtcactgttttacatggaaacagaaaagataatgaattaattcgtgtaaagcagaggaaatgtgaaattgctctaacaacttatgaaacactacgcttatgcctggatgaacttaacagtttggaatggtcagctgtcattgtggatgaagctcatagaatcaagaatccaaaagctagagtaacagaagttatgaaagctttgaaatgtaatgtccgcattggcctcactggaaccatccttcagaacaacatgaaggaactgtggtgtgttatggactgggctgtgccaggccttttagggagtgggacctacttcaagaagcagttttctgacccagtagaacatggtcagagacacacggcaacaaagagagaactagccactggccgaaaggccatgcaaagacttgccaaaaagatgtctggctggtttctcaggcgcaccaagactcttatcaaggatcagttgcctaagaaggaagaccggatggtgtattgttctttgacagatttccagaaagctgtctatcaaacagtgttagaaacagaggacgtgactttgatacttcaatcttctgagccttgtacctgtaggagtggccaaaaaaggagaaattgttgttataagaccaattctcatggtgaaacagtgaaaaccttgtatctcagttaccttacagtccttcagaaggtagctaaccatgtcgcgctactgcaagctgctagtacttccaaacaacaggaaacacttatcaaaaggatatgtgatcaggtattttccagattcccagattttgtgcagaaaagcaaagatgcagcctttgaaacactttctgaccctaaatacagtggaaaaatgaaggtccttcagcagcttttaaatcattgcaggaaaaacagagataaagttcttctcttttctttttccaccaagttgcttgacgtgctacagcagtactgtatggcgtctgggcttgattaccgacgacttgatggaagtacaaaatcagaggaaagactcaagattgtaaaagagttcaacagtacacaagatgttaacatttgccttgtctctacaatggctggtggactaggcctcaattttgtcggtgccaatgttgttgtattatttgatcctacttggaatccagccaatgatcttcaagccattgacagagcatataggattggacaatgtagagatgtcaaagtgcttaggctgatatccttgggaactgtggaggaaatcatgtatttacgacagatatacaagcagcaacttcactgtgtggtggttggaagtgaaaatgccaaacgatattttgaagcagttcaaggatctaaagagcatcaaggagagctttttgggatccataacctcttcaaatttaggtcccaagggtcttgtcttacgaaggacatcctggaggtgtgaacttcttctctgaccttttcaataatattttaaatacagtttttcttcctcaggaaatctgaaatacaattgctgttgccttttcagagaaacttttggttttctttatcaaaaatgccttggaatttttacttttagagaataagaaatgaattattgtacctctaaactaagattttcccatgcataattacaaataatgcacacacacaaatgtatatgctgggtagtatgaactccaaggcaattttaaataggcagagagaagtttatagttttgaaaacagctgctgaagtcaggaactaaaaaaagaggttttcctaaataaacaaaaatataaaatgtgttttaattaaaagttaccaaatactccctgagatgtactctcatgtctcatggagatttttgttttctgttcccaataaaaattccacaccagtattttaaactctccctgttgtgttcatcctcagcatacagatgtttcttattcctcaaacaaaatattttatatccttttttaaaaaaatctttaagttcttttatataccggaatactaaggatattaacctattttctaattgatattcatataggtatcataaaatcctggagtatcatctttttcaacctcctcatggtatagatgaggaaactgagtcttagagaacttcaggatatttctcttgacttccaggactttgtagtaaaatcttaatgtacttcatttattcagtaagtaccataaaggcagttcaaggagcaattggttcctgtccttgaggaacttaaaccatcttgaccggaggtggaagagaacgtttacataataaccatgcaatgtcaggaatcgtatgctgaacaagttaaacagtagaccatggatggctgggggagaggaaggtatatattatttgaatcctataaatgttgttactattatacagtttctgatatatactgctgagtttctattttatagtaactatatttgattctgaattcagtggcccatttggagtcctactttttggggttttttccccttgctttttaaatacgctgtttctttcatgaatttgttctttccagtttcccttttcatatcaataactttgtttgccctccagctcccaaacccagctgctacctccatctcagagtactacttgacatgcctatattgatgttaaagtcaattgtctataaaaatattagcattttattatttatcctgttttctgtcatatatgacatagttacctgtttttatcagaataaccacctatttctttgttaaacaagtgttatataagacatatcaggatgacaggttattaagtagaaaaagttcccttgtttatcgtgccactgcactccagcctggggaacaaagcaagagacttgtctcaaaaacaaaaaacaaaaacaaaaaaaagttctcttgttcactggttattctaagaatatcttgtttcaccttcagaagtgtttattaatgacaggaccatccatgtcttacattttcttttttaaaaatatcttttaagttctttaatataccagaacactaagaatattaacctattttctaattgatattaataaggggtgacaaggccatccatgccctacatttgtcttgctaggcatatcattggcacttgattattaagttaaattttgaattaaaattactcatttgtcatcaatcagaatgtaaatttattcaggattggttagattcatgctgctttgggccaaaaggtgcttctaaatattattattagccccatataatgggagtacctatcataaagtaaaaggagtatttcacttcatgtgagacatttttaatttttaaaggttgtataaaatctcttttaaaatgttttaagatgtaaaaatttgaatatttacacttataatcttatgatttctgggcaatttcattctgttttgcattgactttccattatctatattatggtttctcttcaaagatagatattgagagttcattttacaagtatttgttgagcatctgctaaatgtcaggtactgttcatagagctttgcatacataaaagaacaaaataaacaaaacgatcctgtct

SEQ ID NO: 3248 - DNA, 2870 bp, Homo sapiens
  source 1..2870: mol_type = genomic DNA
gtgaacaaaaattgtttgctggcccccaggatactaactagacctttggcctgactcacaggacactaaggctccttttctgaagaagccttttaccagtctcatttaggggatgggaacaacatgtcttcacctagggactttagagcagagcctggtttttgaaaataaagttaattcagagaaggtaaaactttctcttcggaatttcccacataatgattatgaggatgtttttgaagagccttcagaaagtggcagtgatcccagcatgtggacagccagaggccccttcagaagagacaggtggagcagtgaggatgaggaggctgcagggccatcacaggctctctcccctctactttctgatacgcgcaaaattgtttctgaaggagaactagatcagttggctcagattcggccattaatattcaattttcatgagcagacagccatcaaggattgtttgaaaatccttgaggaaaaaacagcagcgtatgatatcatgcaggaatttatggctttagaacttaagaatctgcctggtgagttcaactctgggaatcaaccaagcaacagagaaaaaaacagataccgagatattcttccatatgattcaacacgcgttcctcttggaaaaagcaaggactacatcaatgctagttatattagaatagtcaattgtggagaagagtatttttatatcgctactcaaggaccactgctgagcaccatagatgacttttggcaaatggtgttggaaaataattcaaatgttattgccatgataaccagagagatagaaggtggaattatcaaatgctaccattactggcccatttctctgaagaagccattggaattgaaacacttccgtgtattcctggagaactaccagatacttcaatatttcatcattcgaatgtttcaagttgtggagaagtccacgggaactagtcactctgtaaaacagttgcagttcaccaagtggccagaccatggcactcctgcctcagcagatagcttcataaaatatattcgttatgcaaggaagagccaccttacaggacccatggttgttcactgcagtgccggcataggccggacaggggtgttcctatgtgtggatgtcgtgttctgtgccatcgtaaagaactgttcattcaacatcatggatatagtggcccaaatgagagaacaacgttctggcatggttcaaacgaaggagcagtatcacttttgttacgatattgtgcttgaagttcttcggaaacttctgactttggattaagaaagacttctgttgcctctcacttgaaattaccaagtgggtttgcacctcctcataaagaacatgtttgcactgtgctgaagggctttgctatgcatacaatctgctttcttggtttatcagtttattttctttctaaaagctccctgaagggcaatatcatttggcttggggtgatcagtgtttacttattgatcttgctagacaatatcaaaataacttcccacattttccagtgaaacagatgttacataaaacgattgcagcttggctatttggttgaagggattacagagcccaataaaggatttaaaatatattcattaagattttatttggaaaggtggctggagagagctgaggatttccaggactttgtaagttcttattctgggagaacataaggccaataatcatgacctcttccaggcatttttaagacagatgtctattcatgttctttagctagagcctgtactttttgctggcatttgaataacccagtttaaaaagagtccagttagggtggactaactttggacacaaattggcttccatttcctacattttcatactgctgccttcctacagctgctagaccaagacctgttggtctgggaagcatttcatggatagggagagctcctctcggtgaacagtccaaaactaaaatagatgtttatatagaaagcccaagaggagatttttgccatgcctgagttctttcctatcccaccctaacacttaacatattacttagtctgctttgttaaaagcaagtattacctttaacttgcctcttactctttgccctttagctaactaataaagtttgatataggcattattatataattctgagtcattcatggtatatctcatgtttgatgtatttttcaaactaagatctatgatagttttttttccagagttccattaaatcatttatttcctttactttctcacctctgttgaaacatttagaaactggatttgggaacccaattttggaaaaccagattcatagtcatgaaaatggaaacttccatattctgtttttgaaaagatgtggccattattacagtaattttattataggactttgcctcgtacaattaatagtgatattttggacaaggagttctggtgacaagctatacctaattataagctataaaacaatagatatgagtgtttgtacagtttaactcaatggagatcagaatattctatgtattgagaaaatgtttaatatcaatctataaatcttgaatttctaagaggcttattttgttcttttggctgaatgagtatatttgaattggttgaataattaataattctcattgtaaaaataattatatgccaaaaatatatttgatgttaaatcaaatagatgattctgtttacattgttcatatgaataataatctgtgttaatttcattttgataattggcctttaatatttgtatctctaattttattttctctctgttactgtaaaataatagctataatgtataacaattttcttcagaagaattctatgctattattaaaataaaatatttactgtg

SEQ ID NO: 3249 - DNA, 3139 bp, Homo sapiens
  source 1..3139: mol_type = genomic DNA
gtcggtgcctgcagggctctccgtggccgctcgggagaggtgctcttcgctcaggctcccccggagacttgagggggtgcgcgctggcgtgcatggggcctgttctgtccttggtttggggatgctcctaaggggggagaaagggatacctcgggtgcttggaggtcgagagacggatacgtaagtgcgcaagggccactgattagggcacgggaagggctcgctagaatgagctcttaaactggttgggtgtaagcggttttgggctagtctaaaccaaacaactgagaataaacgcggggttcctgcaggttgagagagtacctgtctgcaaatgtccagtagtgatggattgccttgtaggccccagagcaatcggggaagttagcattcttgttcaagaagctgctggttcacttagagctataaaagaatgttgtgagtttggattttcttccaaacgttcaggattgaggttagggctggtggtgagggatcatgtaaagaggtttgagtggctcagccttaggtcccggtgtggaaagcttattcttttggtgtcatcacgtggccgtgggaattatttagaatgtgatctgccctcatgagaagaaaggagctctgaagccgttgcagttcttcctccctatgtggaaaatcgaatttctggaaacatcctccgtattgggagattttgcctatgtaaaggctatccttattggctagcggcactaattactttaaaagtaggatggaagtacaagtatctcaagcatcattgggtttcgagctcacttctgtggaaaagagtttaagggagtggtctagactttccagggaagttattgcctggctgtgtccctctagtcctaattttatacttaactttcccccacctccttcagcctcatctgtttcaatggtgcaactcttttcatccccttttggttaccagtcaccttcaggccattcagaggaggaaagagaggggaatatgaagtcagccaagccccaagtgaaccacagtcagcatggggaaagccagcgggccttgagccccctgcagtctactctgagttctgctgcatctccttcccaagcgtatgagacctatattgaaaatggactcatatgccttaaacacaaaattagaaacatcgagaaaaagaagctcaaactggaggattataaggatcgcctgaaaagtggagagcatcttaatccagaccagttggaagctgtagagaaatatgaagaagtgctacataatttggaatttgccaaggagcttcaaaaaaccttttctgggttgagcctagatctactaaaagcgcaaaagaaggcccagagaagggagcacatgctaaaacttgaggctgagaagaaaaagcttcgaactatacttcaagttcagtatgtattgcagaacttgacacaggagcacgtacaaaaagacttcaaagggggtttgaatggtgcagtgtatttgccttcaaaagaacttgactacctcattaagttttcaaaactgacctgccctgaaagaaatgaaagtctgagtgttgaagaccagatggagcagtcatccttgtacttttgggaccttttggaaggtagtgagaaagcagtggtaggaacgacatacaaacacttgaaggatctactgtctaaattgctgaactcaggctattttgaaagtatcccagttcccaaaaatgccaaggaaaaggaagtaccactggaggaagaaatgctaatacaatcagagaaaaaaacacaattatcgaagactgaatctgtcaaagagtcagagtctctaatggaatttgcccagccagagatacaaccacaagagtttcttaacagacgctatatgacagaagtagattattcaaacaaacaaggcgaagagcaaccttgggaagcagattatgctagaaaaccaaatctcccaaaacgttgggatatgcttactgaaccagatggtcaagagaagaaacaggagtcctttaagtcctgggaggcttctggtaagcaccaggaggtatccaagcctgcagtttccttagaacagaggaaacaagacacctcaaaactcaggtctactctgccggaagagcagaagaagcaggagatctccaaatccaagccatctcctagccagtggaagcaagatacacctaaatccaaagcagggtatgttcaagaggaacaaaagaaacaggagacaccaaagctgtggccagttcagctgcagaaagaacaagatccaaagaagcaaactccaaagtcttggacaccttccatgcagagcgaacagaacaccaccaagtcatggaccactcccatgtgtgaagaacaggattcaaaacagccagagactccaaaatcctgggaaaacaatgttgagagtcaaaaacactctttaacatcacagtcacagatttctccaaagtcctggggagtagctacagcaagcctcataccaaatgaccagctgctgcccaggaagttgaacacagaacccaaagatgtgcctaagcctgtgcatcagcctgtaggttcttcctctacccttccgaaggatccagtattgaggaaagaaaaactgcaggatctgatgactcagattcaaggaacttgtaactttatgcaagagtctgttcttgactttgacaaaccttcaagtgcaattccaacgtcacaaccgccttcagctactccaggtagccccgtagcatctaaagaacaaaatctgtccagtcaaagtgattttcttcaagagccgttacaggcagcaattcccccaggcaagcaaccgtcttcactagcttctccaaatcctcccatggcaaagggctctgaacagggcttccagtcacctccagcaagtagtagttcagtaaccattaacacagcaccctttcaagccatgcagacagtatttaacgttaatgcacctctgcctccacgaaaagaacaagaaataaaagaatccccttattcacctggctacaatcaaagttttaccacagcaagtacacaaacaccaccccagtgccaactgccatctatacatgtagaacaaactgtccattctcaagagactgcccctggcaaccaccattctactttctga

SEQ ID NO: 3250 - DNA, 682 bp, Homo sapiens; identical to SEQ ID NO: 2784
  source 1..682: mol_type = genomic DNA

SEQ ID NO: 3251 - DNA, 1103 bp, Homo sapiens
  source 1..1103: mol_type = genomic DNA
attcacaagtgtgtgtaaagggggtgtggatgggacaactgcatctgcctcttgtgcatgccttggggcataaaatcttgttattttaatttgcatctgggagaatgtctgagcaaggagacctgaatcaggcaatagcagaggaaggagggactgagcaggagacggccactccagagaacggcattgttaaatcagaaagtctggatgaagaggagaaactggaactgcagaggcggctggaggctcagaatcaagaaagaagaaaatccaagtcaggagcaggaaaaggtaaactgactcgcagccttgctgtctgtgaggaatcttctgccagaccaggaggtgaaagtcttcaggatcagactctctgaaaactgcaaatggaaaggaattcaaaagaatttagattaaaagttaaataaaaagtaggcacagtagtgctgaattttcctcaaaggctctcttttgataaggctgaaccaaatataatcccaagtatcctctctccttccttgttggagatgtcttacctctcagctccccaaaatgcacttgcctataagaaacacaattgctggttcatatgaaacttaggaaatagtgaataaggtgcatttaactttggagaaatacttttatggctttggtggagatttctcaatactgcaaaagttgtccagaaatgaatctgagctgatggtgactttaagttaatattattaatatatcactgcatatttttacccttatttttgctccttacagcaagattagtaggttataaaaatttaaatttaaacaaaattatttcatgacaaaatgggaaacttcacatcatacttatttttgtttgcctttcaggcatcatattagcttttataaaaaatggtcttgctgctgaaattgtacttattttatcagaggctgggtgcagtcaagacaaaagtaaaatggtttacctgagcccaggggagggaaaattgattaagatatcattatttttgtttggtttggttttgcttttttcctcttactttaattgaaatactctgaattcccctcatggaaacagagagcattgagagcactttctttaaaag

SEQ ID NO: 3252 - DNA, 1356 bp, Homo sapiens
  source 1..1356: mol_type = genomic DNA
atggcggagggcgcccagccgcatcagccgcctcagctcgggcccggcgccgccgcccggggcatgaagcgggagtcggagctggagctgccggtgcccggagcgggaggagacggagccgatcccggcctgagcaagcggccgcgcactgaggaggcggcggccgacggtggcggcgggatgcagaacgagcctctgactccaggttatcatggattcccagcgcgggacagccagggtaaccaggagccgacaacaactcctgacgcaatggttcagccttttactaccatcccatttccaccacctccgcagaatggaattcccacagagtatggggtgccacacactcaagactatgccggccagaccggtgagcataacctgacactctacggaagtacgcaagcccacggggagcagagcagcaactcacccagcacacaaaatggatctcttacgcagacagaaggtggagcacagacagacggccagcagtcacagacacaaagtagtgaaaattcagagagtaaatctaccccgaaacggctgcatgtctctaatattcctttccgcttccgggaccctgacctccggcagatgtttgggcagtttggcaaaatcctagatgtagaaataatctttaatgaacgtggctctaagggattcgggttcgtaactttcgagaatagtgctgatgcagacagggccagggagaaattacacggcaccgtggtagagggccgtaaaatcgaggtgaataatgctacagcacgtgtaatgaccaataagaagatggtcacaccatatgcaaatggttggaaattaagcccagtagttggagctgtatatggtccggagttatatgcagcatccagctttcaagcagatgtgtccctaggcaatgatgcagcagtgcccctatcaggaagagggggtatcaacacttacattcctttaatcagtctccctttagttcctggcttcccttaccctactgcagccaccacggcagccgctttcagaggagcccatttgaggggcagagggcggacagtatatggtgcagtccgagcggtacctccaacagccatccccgcctatccaggtgtggtttaccaggacggattttacggtgctgacctctatggtggatatgcagcctacagatatgcacagcctgctactgcaaccgcagccaccgctgctgcagccgctgcagccgcttacagtgacggttatggcagggtgtacacagccgacccctaccatgcccttgcccctgccgctagctatggagttggcgctgtggcgagtttataccgaggtggctacagccgatttgccccctactga

SEQ ID NO: 3253 - DNA, 859 bp, Homo sapiens
  source 1..859: mol_type = genomic DNA
gccgcgggatgttctcccgaaggagccacggggatgtgaagaagtccacccagaaggtgctggacccgaagaaggacgtgctgacccgcctgaagcacctgcgggcgctgctggataatgtggatgcaaatgatcttaagcagttttttgagaccaactattctcagatatatttcatcttctatgaaaattttatagcactggaaaatagtttgaaattaaaagggaataataagtcacaaagggaggagctggactccatcctcttcctttttgaaaaaatactgcagtttctacctgaacgaattttctttcgatggcattaccagagtataggctcaactttaaagaagcttctacacactggaaattctattaagataagatgtgaaggaatcaggctgtttcttctgtggcttcaagcacttcagacaaactgtgcagaagagcaggttctgatttttgcttgcctggtgcctggtttcccagcagtcatgtcatccaggggcccttgcacactggagacactcatcaatcccagccctagtgtagctgatgtaaagatatatccagaagaaatcactccactcctaccagccatatcaggggagaagattgctgaggaccaaacctgcttttttcttcaaatactgttgaagtatatggttattcaggctgcgagcttggagtggaagaataaggagaatcaagatactggttttaaatttctttttacattgtttcgaaagtattatcttcctcatttatttccatcatttactaagttaacaaacatctacaaacctgtacttgacatcccccatttgagaccaaagcctgtgtacattactaccactcg

SEQ ID NO: 3254 - DNA, 1150 bp, Homo sapiens
  source 1..1150: mol_type = genomic DNA
aagcgcaggcggccaatggaacccgggagcggtcgctgctgctgaggcggcagtgtcggcagtccaaccgcgactgcccgcaccccctccgcgggggtcccccagagagttgagtccacgctccatgagaatgctgaacaccatccaaagcagcaaattgagattccttgatttggggaagaggtttgggaggaacccttcaataattggcatgggacaagaggggacccagtccaagtgtatttgggactcgcagtagggaggaacaattcagagagagcttggaagctcgaagtctggctgtggccatgggagatacagtagtggagcctgcccccttgaagccaacttctgagcccacttctggcccaccagggaataatggggggtccctgctaagtgtcatcacggagggggtcggggaactatcagtgattgaccctgaggtggcccagaaggcctgccaggaggtgttggagaaagtcaagcttttgcatggaggcgtggcagtctctagcagaggcaccccactggagttggtcaatggggatggtgtggacagtgagatccgttgcctagatgatccacctgcccagatcagggaggaggaagatgagatgggggccgctgtggcctcaggcacagccaaaggagcaagaagacggcggcagaacaactcagctaaacagtcttggctgctgaggctgtttgagtcaaaactgtttgacatctccatggccatttcatacctgtataactccaaggagcctggagtacaagcctacattggcaaccggctcttctgctttcgcaacgaggacgtggacttctatctgccccagttgcttaacatgtacatccacatggatgaggatgtgggtgatgccattaagccctacatagtccaccgttgccgccagagcattaacttttccctccagtgtgccctgttgcttggggcctattcttcagacatgcacatttccactcaacgacactcccgtgggaccaagctacggaagctgatcctctcagatgagctaaagccagctcacaggaagagggagctgccctccttgagcccggcccctgacacagggctgtctccctccaaaaggactcaccagcgctctaagtcagatgccactgc

SEQ ID NO: 3255 - DNA, 906 bp, Homo sapiens
  source 1..906: mol_type = genomic DNA
attttgggttcgctttgcgaggggaaacgatcccagtgtcggttgcgggatccgcctcctctcagtttgcccctttagccctccacctttcccttctcctctctcgcatttccgccagtcggcttacccgctggccgcctcctgacaagcgggagggatccgcggtggacccagggaagcggaggagcctggcggccaccccctcttcctcacttccctgtactctcatcgctctcggcctccgacacgaaaaggaagcaaatgagctgatggaagatctgtttgaaactttccaagatgagatgggattctccaacatggaagatgatggcccagaagaggaggagcgtgtggctgagcctcaagctaactttaacacccctcaagctctacggtttgaggaactactggccaacctactaaatgaacaacatcagatagcgaaggaactatttgaacagctgaagatgaagaaaccttcagccaaacagcagaaggaggtagagaaggttaaaccccagtgtaaggaagttcatcagaccctgattctggacccagcacaaaggaagagactccagcagcagatgcagcagcatgttcagctcttgacacaaatccaccttcttgccacctgcaaccccaatctcaatccggaggccagtagcaccaggatatgtcttaaagagctgggaacctttgctcaaagctccatcgcccttcaccatcagtacaaccccaagtttcagaccctgttccaaccctgtaacttgatgggagctatgcagctgattgaagacttcagcacacatgtcagcattgactgcagccctcataaaactgtcaagaagactgtttgttagctttaggactgaagcattttgaagggactgagtttcttaaccctct

SEQ ID NO: 3256 - DNA, 3250 bp, Homo sapiens; identical to SEQ ID NO: 2921
  source 1..3250: mol_type = genomic DNA

SEQ ID NO: 3257 - DNA, 1085 bp, Homo sapiens
  source 1..1085: mol_type = genomic DNA
gttactacagaaaaaacttatacaagcactagcaacaactctatatctggatcattgaagcgcttggaagatactactgcacgatttacaaatgcaaatttccaggaagtctctgcacacacctctagtggaaaagatgtttcagagactagagggtcagagggcaaagggaagaaatcttcagctcacagctcaggtcaaaggggaagaaagcctggtggtggaagaaatccaggaacaactgtgtcagcagctagcccttttcctcaagcaggatataagcgggctcaaacttctggcatagaagaagaaactgtaaaggaaaagaaaaggaaaggaaataaacaaagtaagcatgggcctggcagacccaaaggaaacaaaaatcaagagaatgtttctcatctctcagtttcttctgcttcaccaacatcatctgtagcatcagctgcaggaagcataacaagctctagtctgcagaaatctcctacattgctcaggaatggaagtttacagagcctcagtgttggctcatctccagttggttcagaaatttccatgcagtatcggcatgatggagcttgcccaacaactacgttctcagagttgctgaatgcaatacacaacgacagaggtgacagttctacactaacaaagcaagaacttaaattcataggtatttataacagcaatgatgtagcagtatcgtttccaaatgtagtatctggctcgggatctagtactcctgtctccagctctcacttacctcagcagtcttctgggcatttgcaacaagtaggagcgctctctccctcagctgtgtcatctgcagcccctgctgttgctacaactcaggcaaatactctatctggatcttctctcagtcaggcaccatctcatatgtatggcaatagatcaaattcatcaatggcagctcttatagctcagtctgaaaacaatcaaacagatcaagatcttggagacaatagccgcaacctagttggcagaggaagctcaccccgaggaagtctctcgccacgatcccctgtaagcagcttacagattcgctatgatcaaccaggcaa

SEQ ID NO: 3258 - DNA, 560 bp, Homo sapiens
  source 1..560: mol_type = genomic DNA
atattagataatggagaagcaaatggcaaggatggttaccttggctaccaagataaagaaccttgaaaagggaagaagatgaaatcagcttcggatatcaggcaggcagctgggtctgtgggtcagaggcttaaggatggctgcagctcctccaagttactgttttgttgccttccctccacgtgctaaggatggtctggtggtatttgggaaaaattcagcccggcccagagatgaagtgcaagaggttgtgtatttctcggctgctgatcacgaaccggagagcaaggttgagtgcacttacatttcaatcgaccaagttccaaggacctatgccataatgataagcagacccgcctggctctggggagcagaaatgggagccaatgaacatggagtgtgcatagccaatgaagccatcaacaccagagagccagctgccgagatagaagccttgctggggatggatctggtcaggcttggtttagaaagaggggaaacagctaaagaagccttagatgtcattgtctccttgttggaagaacatggacaaggtggga

SEQ ID NO: 3259 - DNA, 683 bp, Homo sapiens
  source 1..683: mol_type = genomic DNA
ggcagctggcagcactgaaagaaattcaggctgaagttcaggaaaaagaaagtgatgctgtgaagccaaagaatcaggacattcaaggagggaaagcagcccctgctgaagctctgggaatcccggatgagcactatctagataatttgtgtattttttgtggggaaaggagtgaatccttcacagaggaaggtctggatctccactactggaagcactgtctcatgctgacaagatgtgaccactgcaaacaggtggtcgagatatccagtctgacggagcacttgctgacggaatgtgacaaaaaagacgggtttggaaagtgttaccgttgcagtgaggctgttttcaaggaagagctgcccagacacataaaacacaaggattgcaaccctgccaaaccggagaagctggcaaaccggtgtcccctgtgtcatgagaacttcagccctggagaagaggcatggaaagctcacctgatgggcccagccggctgcacgatgaacctgcgcaagacacacattctgcagaaggccccggcactgcagccaggtgagggacagcgccgctgagcaggtgtagtctgcatccctccattttgacttattcaaaaaagcatccccgtccagggcaacatggcaagaccccatccctttaaaagcaaaataaagcatccaagcctg

SEQ ID NO: 3260 - DNA, 1008 bp, Homo sapiens
  source 1..1008: mol_type = genomic DNA
aactccagggctagtgagctggaccggaagtaggtttctacccgaccgcattttacgtggtgctgcatttccggtagcggcggcgggaaatcggctgtgggagagaggctaggcctctgaggaggcgaatccggcgggtatcagagccatcagaaccgccaccatgacggtgggcaagagcagcaagatgctgcagcatattgattacaggatgaggtgcatcctgcaggacggccggatcttcattggcaccttcaaggcttttgacaagcacatgaatttgatcctctgtgactgtgatgagttcagaaagatcaagccaaagaactccaaacaagcagaaagggaagagaagcgagtcctcggtctggtgctgctgcgaggggagaatctggtctcaatgacagtagagggacctcctcccaaagatactggtattgctcgagttccacttgctggagctgccgggggcccagggatcggcagggctgctggcagaggaatcccagctggggttcccatgccccaggctcctgcaggacttgctgggccagtccgtggggttggcgggccatcccaacaggtgatgaccccacaaggaagaggtactgttgcagccgctgcagctgctgccacagccagtattgccggggctccaacccagtacccacctggccgtgggggtcctcccccacctatgggccgaggagcaccccctccaggcatgatgggcccacctcctggtatgagacctcctatgggtcccccaatggggatcccccctggaagagggactccaatgggcatgccccctccgggaatgcggcctcctccccctgggatgcgagggccccctcccccgggaatgcgcccaccaaggccctagactcatcttggccctcctcagctccctgcctgtttcccgtaaggctgtacatagtccttttatctccttgtggcctatgaaactggtttataataaactcttaagagaacattataattgca

SEQ ID NO: 3261 - DNA, 2065 bp, Homo sapiens
  source 1..2065: mol_type = genomic DNA
cagctcggtgctgattatcacaactgtttggtgacctacttcactgacctgtgaggattccttcccttcaggtactggattcttgatctttctgcatcatcaagaatggaaacagactgtaatcccatggagctaagcagtatgtcaggatttgaagaaggttcagagctgaacggttttgaaggaactgacatgaaagacatgaggctcgaagctgaagcagttgtaaatgatgttctctttgctgttaacaacatgtttgtctcgaaaagcctgcggtgtgcggatgatgtggcctatatcaatgtggaaacaaaggaaagaaacagatattgcctagaactcactgaagcagggctcaaggtggtaggctatgcttttgaccaggtagatgatcatttacagactccctaccatgaaacagtctactccttgttggatacactcagccccgcctaccgagaagcatttggaaacgcactgcttcaaagactggaagctttgaaaagagatggacagtcatgactacactttttcctttcagaggggctggtgctggtacagaatgttgatataaagcttaaaattcttgcatatggtcatagaaaatgcatctttggttttgtgtttttatcacttgcttccaacttaggcttttggctcagaagattattgaataatgatttgtcttagtttctgtttcagtaagggaattctgaggccgttgctatgataccatcattaagacattcacatgtcttcatataatatctcttcatttcaaatcctaatcactatttcatactattacagggctttgatgctgccagcactgtcttttacataggaaattctagatttgcacagtaatagaggaattagaagtacctaactatacactttgattcagcctgctaaatcaggggttcaatactagcttggacaaactttgtagtaattaattgctaccagccttattggaaacaaattatcaactagtttcccctgcacaaattttgaaattcactgcttcacttaatctatttatattactaataatggattaataaagatgaattaattatatattacttaactagtattaaatgaaaaacagggactgaaatagttctgtattccgtgtttgcaacagccagccaactaagcagaggataaaccgttagcaaatgaatgtaataattactcatttccaagatatctaagcacataagcaaatacaggaacagacttcattctttttcttaacaaaaaagcatcttcagtgtgtgatttaaaagaaagaagattctggtttcctagaaaacaatattttggcctgtgttgattcttattctgaatgtgtgtttacataatgtacagtatatattcagaaagtatttttgcttcaacgtttactttctatgatgtagtgctttggtattcctacagcaccccaccttccccaacagatgtacagtgttctgtctccattcgaaatctacaatgtaatatgagtgcattgtatgggtttgaaaccaaaggatgaatgaagcattcagagacttaatatttgaaaaaggaatagtcagtattttatattttattacaggtactgatatttataaatttaataaactgtaccatgctgctgcatgttttcaagtacatgttgaacagtaaggattggggagttgttttttaatggtcacctaaagcagctgctatagaaatgttgaactaaaattttgcatctggtcataccttcatgcatttatcatttgcagatatttttccatcattattaaaaaacaggaacttttaggctctgaagatcatgtggaccagagcaaattaaagttcagtttgtgtcacaattcattgccagacttcattggaatgctttgtttgatgatgtatgttcattctcagctttattttcagatgcttaactgggcaacgaagtctaacttcaggttgaactttctcatgtttaatctcaggctaaatgtaaatgatatttgtaaagtttgaataaaattctgtttactcattttgagttagtatg

SEQ ID NO: 3262 - DNA, 1179 bp, Homo sapiens
  source 1..1179: mol_type = genomic DNA
attttggtctcaggtgtggactcggcaagaaccagcgcaagagggaagcagagttatagctaccccggccgcggagccggctcactgcactacccccgcccccttctttcctccagacgccgaagtcgcgggcgctcatggcgggcctggaggtactgttcgcatcggcagcgccggccatcacctgcaggcaggacgcgctcgtctgcttcttgcattgggaagtggtgacacacggttacttcggcttgggtgtcggtgaccagccgggtcccaatgataagaagtcagaactgctgccagctgggtggaacaacaataaagacctgtatgtcctccggtatgagtataaggatgggtccagaaagctccttgtgaaagccatcaccgtggagagcagcatgatcctcaatgtgctggaatatggctcacagcaagtggcagacttgaccctgaacttggatgattatatcgatgcagaacacctgggtgacttccacaggtgtgatcccctgggcccgtttgttgtcgggggagaagacttagacccttttgggcctcggagaggtggcatgattgtggatcccctgagatctggcttcccaagagcacttattgacccttcctcaggcctcccgaaccgacttcctccaggcgctgtgcccccaggagctcgctttgacccctttggacccattgggaccagcccacccggcccgaggcctgacagacgcgggcagtgatgagccctgttctggagtggaaagagcacgatagagcaccaggctaagaggcacgagatcaaggcggtagtcacttccgctctgcagctagcatttcaaccatatgtggatcctttcatttctcagctccctggattccttcccctaaattaggacctattatttacctgtaggtaagcaagctactgtagctcttctgaggtatctgccaggctgttttctgtagcctcagattgcctatctgcttagcctgagaacaggtagatgaaaactaaactgatgcctaggcccagggtcagtctcagatggaagctgggcctgggtggggaggctagcatgcgtggctccctgggtatttctgtcagtccccatggcaagcagtgatttagtaaaacaccccagagtcagggaagccaaccaccttgaaacctttaga

SEQ ID NO: 3263 - DNA, 1124 bp, Homo sapiens; identical to SEQ ID NO: 2733
  source 1..1124: mol_type = genomic DNA

SEQ ID NO: 3264 - DNA, 4599 bp, Homo sapiens
  source 1..4599: mol_type = genomic DNA
actttgccagagcggccgggtccccattcccattccttcaaatcccctttttcccggcagccgacctgtagacccaagggagacaggttgaagctagaaagagtcggggcagcagctctggtaggggagggagcatccaaaacctctggcttctgagcgcctctcctgccgcccatccacaaagccccccacagcctggcggctgccctcgaccccgcaaaacaaaggacttcagaggctggacctacagacccagatgagaaggcaaaagcgtagggaggagcggcaggagatgggaagggcgggccccgctcggagcagctgccgcttcctcccaaagtcccacgaggggcctgagtcacgggccaccgccctgggtcggcgagctgggggaagggatctggacacctggcgtgtccgggcgggaagctggtgagggcccctggggacagagcggaggaccagtggttggggcgagaagagggcagtcccgcagcgagtcccacgcggggtgggagggatctaggccccgccctctcctcggctccgccctgcgcccccttccctctcctcattgtccttagacaaagcggtcgccgcccccgcccggccccctggtctctgtctccgtccctcctcctttgctgcctctttccctcctcctctccctccctcctcccctccctccagtctccggatctccctcggtccctctctcctcctcttcctctctctggacgcccggctcctccgcaccccctcccccgggggtcccgcggcctgtgagttgactgaggggctcagacttggggagtgggtgtctcctcgcccctgtccttgctcccgtccctggcccggaccttggctgtctcctctttgtgccgagattgtcagtctgtgcggctacagcggggtggagacggccggctctgtcacggcttcatgagagcggggacggggcgcaggacttgcaggcgccggggagaagagacatggagccggcccttggcactctggggtcgcgtggggcagtcggtgggggaggcaggcggtggtgacaggacagggtgggggtggacgccagggttctgggaacgcgctggcagccctgacgcccgggttccgaaagtctcgggggtgggtatttcccccgacccgcctcgggggcggagtgcggggcagaggggtgggggctggggagaggcgtggcccgagcggtgctggaagcggagccgggacctttggggcccgcgctgagacgcgcccggctgctgccgccgccctcctttcccctcttccctggtttcccttctcctctagacctgttcgctctccgcccctccttgcctccccaacaccccctcaggtcccgttgcctcctggtcctttcagggattcctggtccttccttcccacactagcctccctggggtatcgctgaggcagcctggcctgcacccaggttcccctcacccctgccacatttctctcttctccctcacgccaactttccttttcgcccttctctctctttctcacatcctagagacggtctttaatacgcattaaccctgtgctgccacatctggctcctgccctcattgcctccaatccggactcttcctctcacatcacccccaccacccccaacttgggctcacaacttctcttcactttttccatttccccagttctctgccttccgtctttccctctgtcctcatccttagcccctctgccctgctttgtgtcccacctctccccctccacttcctctcctcccaccctcagtctcacccccgggctgtctcactctctggagcctctccttcctgttctctgtccccagtgctccctaccctcacctcaagacgaccatggccaccatcccagactggaagctacagctgctagcccggcgccggcaggaggaggcgtccgttcgaggccgagagaaagcagaacgggagcgcctgtcccagatgccagcctggaaacgagggctcctggagcgccgccgggccaagcttgggctgtcccctggggagcctagccctgtgctagggactgtagaggctggacctccagacccggatgagtctgcggtccttctggaggccatcgggccagtgcaccagaaccgattcatccggcaggagcggcagcagcagcagcagcaacaacaacggagtgaagagctgctagcagagagaaagcctgggcctctggaggcccgggagcggagacccagccctggggagatgcgggatcagagccccaagggaagagagtcaagagaagagagactaagtccgagggagaccagagagaggaggctggggatagggggagcccaagagttgagcctgaggcctctggaggctcgggactggaggcaaagcccaggagaggtgggagacaggagctcccgactgtcagaggcatggaaatggaggctgagtcctggagaaactccagagcggagtctgagactagcagagtctcgagagcaaagccccaggagaaaagaggtggaaagtagactgagcccaggggaatctgcctaccagaagttgggcctgacagaggcccataaatggagacctgactccagagagtctcaggaacagagtttggtacaactggaggcaacagagtggaggctgaggtcaggagaagaaagacaagactactcggaagaatgtgggagaaaagaagagtggccagttccaggggtagctccaaaagagactgcagagctgtccgagaccctgacaagggaggcccaaggcaacagttccgcaggagtggaggcagcagagcagaggcctgtggaagatggcgagaggggcatgaagccaacagaagggtggaaatggaccctgaactccgggaaggctcgagaatggacacccagggacatagaggctcaaactcagaaaccagaacctccagagtcagcagagaagcttctggaatctcccggtgtggaggctggagaaggggaggctgagaaggaggaggcgggggctcagggcaggcctctgagagccctgcagaactgctgctctgtgccctcccccctcccaccagaggacgctgggactggaggcctgagacagcaggaagaggaagcagtggagctccagcccccaccaccagcccctctgtctcccccacccccagccccaactgccccccaacctcctggggatcccctcatgagccgcctgttctatggggtgaaggcagggccaggggtgggggccccccgccgcagtggacacaccttcaccgtcaacccccggcggtctgtgccccctgcgaccccagccaccccaacctctccagccacagttgatgctgcagtcccgggggctgggaagaagcggtacccaactgccgaggagatcttggttctggggggctacctccgtctcagccgcagctgccttgccaaggggtcccccgaaagacaccacaaacagcttaagatctccttcagcgagacagccctggagaccacgtaccaatacccctccgagagttcggtactggaggagctgggcccggagcctgaggtccccagtgcccccaaccctccagcagcccaacccgacgacgaagaggatgaggaagagctgctgctcctgcagccagagctccagggcgggctgcgcaccaaggccctgattgtggatgagtcctgccggcggtgaccatcttccaacatagggatatacctccctccttcttataactgaagatcctggagcccggaagattcagggcagacagaccctgataatgagcctggcagggaagggcaaccaacatcttgtaacttgctttccccaccctgtttctgggggcagagccaattgcccaatttctaccctaatccaaagtccctggtgtgggtggggttaaacgtgctggtgcatcctaggtcatccaagagtgagcgccaagtcctgagaaggggcacagaactccctggagggtggagatggagcacctgccccccatggcagggtacactctccccacagccttcctccccaccatcccgtggggactctcgggatttaagcactcgtctctctgggaggcccagaccccactccatttataggcacatctccttcatttcctaggtcactgcccctttgtttacagctcctgcctcctcccttgaccacagcctggtttacaaattccatcagctcccagccccacctgccaaagtcccaggtttacaagccacgcttacttgctgtgtctgcgtggaattctctcctctgtcccctccagtctcctcattggagtgacctgaaggtgtggcttcctccactttttctcagtattactttgccttagttttccccaagagggaaggctggaactcttaactctgtaccccttgatagttatttaattctgtttctcctagtggttcacaattgaactgaattgagatggtgtcgggtggctaaggagacacctcacctctccttccccattgtgccgcctttatcaattgcctgttttgttttgtttgttttttaactttccataataaaatggagttctcttcaa

SEQ ID NO: 3265 - DNA, 3250 bp, Homo sapiens
  source 1..3250: mol_type = genomic DNA
gagtcaggaatggagagaagggtaatggtgttacctcttattgtggaaacctgttgagatcacagagaatatactgacggcataaaagggcagaaccatagcagggtgcgcgctgctgtagttgccttccatggatctataggagagcaagtcctccaggagaagaagtcctcaccagtgaacggagacctctctgaactaagaataccatggccacgtcagccccactacggagcctggaagaggaggtgacctgctccatctgtcttgattacctgcgggaccctgtgaccattgactgtggccacgtcttctgccgcagctgcaccacagacgtccgccccatctcagggagccgccccgtctgcccactctgcaagaagccttttaagaaggagaacatccgacccgtgtggcaactggccagcctggtggagaacattgagcggctgaaggtggacaagggcaggcagccgggagaggtgacccgggagcagcaggatgcaaagttgtgcgagcgacaccgagagaagctgcactactactgtgaggacgacgggaagctgctgtgcgtgatgtgccgggagtcccgggagcacaggccccacacggccgtcctcatggagaaggccgcccagccccacagggaaaaaatcctgaaccacctgagtaccctaaggagagacagagacaaaattcagggcttccaggcaaagggagaagctgatatcctggccgcgctgaagaagctccaggaccagaggcagtacattgtggctgagtttgagcagggtcatcagttcctgagggagcgggaggaacacctgctggaacagctggcgaagctggagcaggagctcacggagggcagggagaagttcaagagccggggcgtcggggagcttgcccggctggccctggtcatctccgaactggagggcaaggcgcagcagccagctgcagagctcatgcaggacacgagagacttcctaaacaggtatccacggaagaagttctgggttgggaaacccattgctcgagtggttaaaaaaaagaccggagaattctcagataaactcctctctctgcaacgaggcctgagggaattccaggggaagctgctgagagacttggaatataagacagtgagcgtcaccctggacccacagtcggccagtgggtacctgcagctgtcagaggactggaagtgcgtgacctacaccagcctgtacaagagtgcctacctgcacccccagcagtttgactgtgagcctggggtgctgggcagcaagggcttcacctggggcaaggtctactgggaagtggaagtggagagggagggctggtctgaggatgaagaagagggggatgaggaggaagagggagaagaggaggaggaggaagaggaggccggctatggggatggatatgacgactgggaaacggacgaagatgaggaatcgttgggcgatgaagaggaagaagaggaggaggaagaggaggaagttctggaaagctgcatggtgggggtggctagagactctgtgaagaggaagggagacctctccctgcggccagaggatggcgtgtgggcgctgcgcctctcctcctccggcatctgggccaacaccagccccgaggctgagcttttcccagcactgcggccccggagagtgggcatcgccctggattatgaagggggcaccgtgactttcaccaacgcagagtcacaggaactcatctacaccttcactgccaccttcacccggcgcctggtccccttcctgtggctcaagtggccaggaacacgcctcctgctaagaccctgagccctgacatctgcccccagccccaaccctcagatgcttcacttctttggaattccaggactctcaatggggggacgggatgcctggcctaagcacctggagcaggggaccccatatccactggtagccacctccccattgctgtggccccctgaaatctcactcagtgctgttgctccatctactgccctaatggggctcttttcccacctcctgctggtttcccgagggaacttctgaccctggagtccatgagggctcctttcctttttgaccacgaccttggccctagctctgcactctctggaataagggcccgatgcagcattttcttgcccagtgtggcaagacctcagaaaaaccagtcaattacgcctaagatcattttgctgtccttaaaccccccaggttccttcttgcacaaatccactctgctgcccaccttccctggcattttaaacagacctaccccaccccaactcagagttaagcatacatggcaatgctgaaaataaacaaaatccactgaggcttcccaggccatttaaagcctggagtaccagcgcatatcatctcatggggtccagagtggagtccaggcttctctgaaaccagggctgagcatatttccatagccaaggaggtgggactccctggagctatctgtggtcttagggaaggatccagacatacacggctttggggtacaagctgtgatcactgatcaataaattatctctagattggtccttgtgaggggagttttaagaatccagaacatcttgctcttgatcagcacatccaaaaacaccaagacaaacatccagtggagcagaacctctcctgcctcgggagttctgaccgggttccccagcagggtgttaagcctctgtctctggccctaccagcatccaggttccactttcctaggagagagtggagatgggaagacagggaaaggaaggcagcaggaggccacaagcccaccaggtcttcatgtcaagagagggagtaacatgtcttctcattgcccacggacccaacctctgtccaggtgcccctcatcatcacagtttaacacaagctcccctgctccagccaaattgatctcccagtcttgtccttacccattccaagtgctctgccagcccctgttcatccaagttttaagtcctccaccctgttataagagactgttccaacggctctgggcctcagtggtcacttgaccaccattgtctcagagctgcccactttgtgtgtgtcacatgctgcctgagtcacatgtacatcttatttctgcctctagttttgtaagctcctggagggcggataacatcttatactactcttgtattctcatggcacctagtgcagtgctgggcacagagtaggtgctcaataaagacttgttgaatgaa

SEQ ID NO: 3266 - DNA, 2020 bp, Homo sapiens
  source 1..2020: mol_type = genomic DNA
aatggggacctggaacctgggcttactagagtgccgcgcgtagggctccaggtcgctggcttctgcgcttccttcctctccaaagttgagtatctcctatctgtgtcctcgtacatactgccgcctgaggtgccatggcccccaagccgggggccgagtggagcacagccctgtcccatctggtgctgggagtggtgtctctgcacgcagccgtgagcacagccgaggcaagtcgaggggctgctgctggcttcctgctccaggtcttggctgccaccaccacgctggccccagggctgagcacacacgaagactgccttgctggagcctgggtggccaccgtcatcggccttccccttctggccttcgatttccactggtgtactaatggtcacttgatgtgcgctggctgttttatccacctactagcagatgcccggctgaaggaggagcaggccacgtgccccaattgtcgttgtgagatcagtaagagcctctgctgccggaacctggccgtggagaaagccgtgagcgagctgccttcagagtgtggcttctgcctgcgccagtttccccgctccctcctggagaggcaccagaaagaggaatgccaggacagggtaacccagtgcaagtacaaacgcatcggctgcccatggcacggccccttccatgagctgacggtgcacgaggctgcgtgcgcccacccgaccaagacaggcagtgagctgatggagatcctggatgggatggaccagagccaccgcaaggagatgcagctgtacaacagcatcttcagcctgctcagcttcgagaagattggctacacagaggtccagttccggccgtaccgcacagacgacttcatcacgcgcctgtactatgagacgcccaggttcacagtgctgaaccagacgtgggtcctgaaggctcgagtcaacgactcggagcgtaaccccaacctgtcctgcaagcgtacgctctccttccagctcctcctcaagagcaaggtcacggcaccgctggagtgctccttcctgctgctcaagggcccctacgacgacgtgaggatcagccccgtcatctaccactttgtcttcaccaacgagagcaacgagacggactacgtgccactgcccatcattgactccgtggagtgcaacaagctgctggctgccaagaacatcaacctgcggctcttcctgttccagatacagaagtagggcggggcctcaggatgtccgaggagcccacgggcggcatcccagcaccgctgccctgtccacctggctggcagctgcttcacaggactatctgatcactttagcaaaggaggagaacaaacgaagccaacacagggcaagtctgcatgcgtgcgcgacggggcccccgcctccggctcacccccccgacccctgcctcccctccttccgagggccgccagaggctgggctgacccgaagaggagacggtgcaccaggcgccccgaggctcagagacggtggcagcaaggaggccgagaggcacagcgaccctgccccagcccttctgtgcagtcaggcggcggtgctgctccatccctgcgggttccggcggggcgcgggggccttgctgacatcagacgggatatccgaatatctgatagcaattaaaaggcagccttgtttcgtactttctgttttgttcgaggggaaggcatggctgtgaatggacagcgtgggggctttggtttggcctgggggtcagagcctgccccgcccccatctgtgtgcccgcacacgtcccccgaggaaagactcagagacactgcctccccctacactctgtcatggggtcttgagactgaggcttgggcaggaagatccaggtagggtcggggctgccctggccaaccggccgctcccagggagacaggactcagccaccagggctcagcaggcattttccgaaagcagggtgaaattgtctcttcccaggaaaaagattaaactccttgcaggctcttggataagttacacaa

SEQ ID NO: 3267 - DNA, 540 bp, Homo sapiens
  source 1..540: mol_type = genomic DNA
tggctgccttctcctgagagtcggagccacagccagagccctgcccaggccgagccggagctgcagcccgagcgcggtggtgccctcagccccgtcctcttgtcctcctcagcctcgaaacttccaattgaagacactgagctgaaccattccgcccgcccgcccgcccgagggcactccagatctgccggaggcgctgggcaatgaccccgggactccaggccagaggggtctgaagctgtttgggaaagcagcgggactccttgggaagatggccatggccccaagcccttccctggtgcaggtgtacaccagccccgcggctgtggccgtgtgggaatggcaggacgggctgggcacctggcacccctacagtgccaccgtctgcagcttcatcgagcagcagtttgtccagcagaagggccaacgttttgggcttgggagcctggcccacagcatccccttgggccaggcagacccctcgctggccccttacattattgacctccccagctggacccagttccgccaggacaccgg

SEQ ID NO: 3268 - DNA, 2926 bp, Homo sapiens
  source 1..2926: mol_type = genomic DNA
aggtgtcaccacagtgatggcagtggaggacagcacgctgcaagtagtggtacgggtgcggccccccacccctcgggagctggacagtcagcggcggccagtggttcaggtggtggacgagcgggtgctggtgtttaaccctgaggagcccgatggagggttccctggcctgaaatggggtggcacccatgatggccccaagaagaagggcaaagacctgacgtttgtctttgaccgggtctttggcgaggcggccacccaacaggacgtgttccagcacaccacgcacagcgtcctggacagcttcctccagggctacaactgctcagtgtttgcctacggggccaccggggctgggaagacacacaccatgctgggaagggagggggaccccggcatcatgtacctgaccaccgtggaactgtacaggcgcctggaggcccgccagcaggagaagcacttcgaggtgctcatcagctaccaggaggtgtataatgaacagatccatgacctcctggagcccaaggggccccttgccatccgcgaggaccccgacaagggggtggtggtgcaaggactttctttccaccagccagcctcagccgagcagctgctggagatactgaccagggggaaccgtaaccgcacgcagcaccccactgatgccaacgcgacttcctcccgctcccatgccatcttccagatctttgtgaagcagcaggaccgggttccaggactgacccaggctgtccaggtggccaagatgagcctgattgacctggctggctcagagcgggcatccagcacccatgcgaagggggagcggctgcgggagggggccaacatcaaccgctctctgctggcgctcatcaacgtcctcaatgccttggccgatgcaaagggccgcaagacccatgtgccctaccgggacagcaaactgacccgcctgctcaaagactccctcgggggcaactgccgcacagtgatgatcgctgccatcagcccctccagcctgacctacgaggacacgtacaacaccctcaaatatgccgaccgggccaaggagatcaggctctcgctgaagagcaatgtgaccagcctggactgtcacatcagccagtatgctaccatctgccaacagctccaggctgaggtagccgctctgaggaagaagctccaagtgtatgaggggggaggccagcccccaccacaggacctcccaggatctcccaagtcgggaccaccaccagaacaccttcccagctcccccttgccaccccaccctcccagccagccctgcaccccagagctccctgcagggcctagagcccttcaagaggagagtctggggatggaggcccaggtggagagggccatggaagggaactcttcagaccaggagcagtccccagaggatgaggatgaaggcccagctgaggaggttccaacccagatgccagagcagaaccccacacatgcactgccagagtcccctcgcctgaccctgcagcccaagccagtcgtgggccacttctcagcacgggaactggatggggaccgttctaagcagttggccctaaaggtgctgtgcgttgcccagcggcagtactccctgctccaagcagccaacctcctgacgcccgacatgatcacagagtttgagaccctacagcagctggtgcaagaggaaaaaattgagcctggggcagaggccttgaggacttcaggcctggccaggggggcacctctggctcaggagctgtgttcagagtcaatccctgtgccgtctcctctctgcccagagcctccaggatacactggccctgtgacccggactatggcgaggcgactgagtggccccctgcacaccctgggaatcccgcctggacccaactgcaccccagcccaggggtcccgatggcccatggagaagaagaggaggagaccaagcgccttggaggcagacagtcccatggccccaaagcggggcaccaagcgccagcgccagtccttcctgccctgcctaaggagagggtctctgcctgacacccaaccttcacaggggcccagcacccccaaaggagaaagggcctcctccccctgccattcccctcgcgtttgcccagccacagtcatcaaaagccgggtgcccctgggcccttccgccatgcagaactgctccaccccgctggctctgcccactcgagacctcaatgccacctttgatctctctgaggagcctccctcaaagcccagtttccatgaatgcattggctgggacaaaataccccaggagctgagcaggctggaccagcccttcatccccagggcacctgtgcccctgttcaccatgaagggccccaagccaacatcttccctccctgggacctctgcctgcaagaagaagcgcgttgcgagttcctcagtctcccatggccgcagccgcatcgcccgcctccccagcagcactttgaagaggccagctgggccccttgtactcccaggtgactggcactagggacagggatagcctgggccatggaggccgatgaagacaagaaggaggaggggacggggagctgagacccagaagaaaggagggcctagggtattgccaagcatctcagggatgctgctgatgagacaggtgggaggtgggctggaggacggggacagagcgtcactttccttcctcgctgcactccccgccacccatccaactggcctgcagagctgcccttgagtcccctgtgccctagcaaccggaggaatggaaaggacctcatcagggtggggagagcactctcagcagggaacggcgtcaccaaggtgtcctgaccgccagaatgtcctgaccaccaaggtgtcctaacctaccggcccctctgctggatacccctcttggacctgtagccacctgcaccag

SEQ ID NO: 3269 - DNA, 2853 bp, Homo sapiens
  source 1..2853: mol_type = genomic DNA
cctccctccagtctccggatctccctcggtccctctctcctcctcttcctctctctggacgcccggctcctccgcaccccctcccccgggggtcccgcggccttgctccctaccctcacctcaagacgaccatggccaccatcccagactggaagctacagctgctagcccggcgccggcaggaggaggcgtccgttcgaggccgagagaaagcagaacgggagcgcctgtcccagatgccagcctggaaacgagggctcctggagcgccgccgggccaagcttgggctgtcccctggggagcctagccctgtgctagggactgtagaggctggacctccagacccggatgagtctgcggtccttctggaggccatcgggccagtgcaccagaaccgattcatccggcaggagcggcagcagcagcagcagcaacaacaacggagtgaagagctgctagcagagagaaagcctgggcctctggaggcccgggagcggagacccagccctggggagatgcgggatcagagccccaagggaagagagtcaagagaagagagactaagtccgagggagaccagagagaggaggctggggatagggggagcccaagagttgagcctgaggcctctggaggctcgggactggaggcaaagcccaggagaggtgggagacaggagctcccgactgtcagaggcatggaaatggaggctgagtcctggagaaactccagagcggagtctgagactagcagagtctcgagagcaaagccccaggagaaaagaggtggaaagtagactgagcccaggggaatctgcctaccagaagttgggcctgacagaggcccataaatggagacctgactccagagagtctcaggaacagagtttggtacaactggaggcaacagagtggaggctgaggtcaggagaagaaagacaagactactcggaagaatgtgggagaaaagaagagtggccagttccaggggtagctccaaaagagactgcagagctgtccgagaccctgacaagggaggcccaaggcaacagttccgcaggagtggaggcagcagagcagaggcctgtggaagatggcgagaggggcatgaagccaacagaagggtggaaatggaccctgaactccgggaaggctcgagaatggacacccagggacatagaggctcaaactcagaaaccagaacctccagagtcagcagagaagcttctggaatctcccggtgtggaggctggagaaggggaggctgagaaggaggaggcgggggctcagggcaggcctctgagagccctgcagaactgctgctctgtgccctcccccctcccaccagaggacgctgggactggaggcctgagacagcaggaagaggaagcagtggagctccagcccccaccaccagcccctctgtctcccccacccccagccccaactgccccccaacctcctggggatcccctcatgagccgcctgttctatggggtgaaggcagggccaggggtgggggccccccgccgcagtggacacaccttcaccgtcaacccccggcggtctgtgccccctgcgaccccagccaccccaacctctccagccacagttgatgctgcagtcccgggggctgggaagaagcggtacccaactgccgaggagatcttggttctggggggctacctccgtctcagccgcagctgccttgccaaggggtcccccgaaagacaccacaaacagcttaagatctccttcagcgagacagccctggagaccacgtaccaatacccctccgagagttcggtactggaggagctgggcccggagcctgaggtccccagtgcccccaaccctccagcagcccaacccgacgacgaagaggatgaggaagagctgctgctcctgcagccagagctccagggcgggctgcgcaccaaggccctgattgtggatgagtcctgccggcggtgaccatcttccaacatagggatatacctccctccttcttataactgaagatcctggagcccggaagattcagggcagacagaccctgataatgagcctggcagggaagggcaaccaacatcttgtaacttgctttccccaccctgtttctgggggcagagccaattgcccaatttctaccctaatccaaagtccctggtgtgggtggggttaaacgtgctggtgcatcctaggtcatccaagagtgagcgccaagtcctgagaaggggcacagaactccctggagggtggagatggagcacctgccccccatggcagggtacactctccccacagccttcctccccaccatcccgtggggactctcgggatttaagcactcgtctctctgggaggcccagaccccactccatttataggcacatctccttcatttcctaggtcactgcccctttgtttacagctcctgcctcctcccttgaccacagcctggtttacaaattccatcagctcccagccccacctgccaaagtcccaggtttacaagccacgcttacttgctgtgtctgcgtggaattctctcctctgtcccctccagtctcctcattggagtgacctgaaggtgtggcttcctccactttttctcagtattactttgccttagttttccccaagagggaaggctggaactcttaactctgtaccccttgatagttatttaattctgtttctcctagtggttcacaattgaactgaattgagatggtgtcgggtggctaaggagacacctcacctctccttccccattgtgccgcctttatcaattgcctgttttgttttgtttgttttttaactttccataataaaatggagttctcttcaa

SEQ ID NO: 3270 - DNA, 1270 bp, Homo sapiens
  source 1..1270: mol_type = genomic DNA
gactgctggaggcggccacagcgccatgttggatgctctgctcgttgagtgaagaaaatccaccggcatcgcctgagccccgctaccgagaagggcgccgcttcctccggggagggggataaagatcccccgccgccggcccatgaggatattgccgtgaaaggcacagcgactgcagcaggaaccggacccggcaccggagcggcggcggcggcggcagcagcggtaccgcctcctcacccggcggcggcagcagcggcggcggcggcggcggcggcggcggcggcggcagcggtcccccctcctcacccgaacatcagggccctccagactcaggcgccccaacaaattcctagaggacctgtgcaacaacctcttgaggatcgaatcttcactcccgctgtctcagcagtctacagcacggtaacacaagtggcaagacagccgggaacccctaccccatccccttattcagcacatgaaataaacaaggggcatccaaatcttgcggcaacgcccccgggacatgcatcgtcccctggactctctcaaaccccttatccctctggacagaatgcaggtccaaccacgctggtataccctcaaacccctcagacaatgaattcacaacctcaaacccgttctccgtttttccagaggcctcaaatacagcctcctagagctaccatcccgaacagcagtccttccattcgtcctggtgcacagacacccactgcagtgtaccaggctaatcagcacatcatgatggttaaccatctgcccatgccgtacccagtgccccaggggcctcagtactgtataccacagtaccgtcatagtggccctccttatgttgggcccccccaacaatatccagttcaaccaccggggccaggtcctttttatcctggaccaggacctggggacttccccaatgcttatggaacgcctttttacccaagtcagccggtgtatcagtcagcacctatcatagtgcctacgcagcaacagccgcctccagccaagagagagaaaaaaactataagaattcgggatccaaaccagggaggtaaagacataacagaggagattatgtctggaggtggcagcagaaatcctactccacccataggaagacccacgtccacacctactcctcctcagcagctgcccagccaggtccccgagcacagccctgtggtttatgggactgtggagagcgctcatcttgctgccagcacccctgtcactgcagctagcgaccagaagc

SEQ ID NO: 3271 - DNA, 3473 bp, Homo sapiens
  source 1..3473: mol_type = genomic DNA
agcacttgaagttcaggcagcgagagttgacatggggccagggctgcgcccctggggcgggttgaagacagggtgagtctcttgatattcaggaaatcatcgcgcacccagtcaccagcgttcgggagcctgtcgcagcgggaccgacggaatccggagcaggcgacagggcgcagaagcgggatgtacttctgttggggcgccgactccagggagctgcagcgccggaggacggcgggcagccccggggctgagctactgcaggcggccagcggggagcgccactctctgctgctgctgaccaaccacagggtcctctcgtgcggagacaacagcaggggtcagctgggccgcaggggcgcgcagcgcggggagctgccagaaccaattcaggcattggaaaccctaattgttgatctcgtgagctgcgggaaggagcactccctggctgtgtgccacaaaggaagggtcttcgcatggggagctggttctgaagggcagctggggattggagaattcaaggaaataagtttcacacctaagaaaataatgactctgaatgatataaaaataatacaagtttcctgtggacactaccactccctggcattatcaaaagatagccaagtgttttcgtggggaaagaacagccatgggcagctgggcttggggaaggagttcccctcccaagccagcccgcagagggtgaggtccctggaggggatcccactggctcaggtggctgccggaggggctcacagctttgccctgtctctctgtgggacttcgtttggctggggaagtaacagtgccgggcagctggccctcagtgggcgtaatgtcccagtgcaaagcaacaagcctctctcagtcggtgcactgaagaatctaggtgtggtttatatcagctgtggtgatgcacacactgcggtgcttacccaggacgggaaagtgttcacatttggagacaatcgctctggacagctgggatacagccccactcctgagaagagaggtccacaacttgtggaaagaattgatggcctagtttcgcagatagattgtggaagacttcgtggatgttcaagtcaaacacatttttgctggaacatatgccaactttgtgacaactcatcagtgaaattagaatgatattttcatctcctgcttgtctgactgcaagttttttaaagaaaagaggaactggagaaacgacttccattgatgtggacttagaaatggcaagagataccttcaagaagttaacaaaaaaggaatggatttcttccatgataactacgtgtctcgaggatgatctgctcagagctcttccatgccattctccacaccaagaagctttatcagttttcctcctgctcccagaatgtcctgtgatgcatgattctaagaactggaagaacctggtggttccatttgcaaaggctgtgtgtgaaatgagtaaacaatctttgcaagtcctaataaacaaagctaactgtcgactaccagaaaatactttcaacataaatgaactctccaacttattaaacttttatatagatagaggaagacagctctttcgggataaccacctgatacctgcagaaacccccagtcctgttattttcagtgattttccatttatctttaattcgctatccaaaattaaattattgcaagctgattcacatataaagatgcagatgtcagaaaagaaagcatacatgcttatgcatgaaacaattctgcaaaaaaaggatgaatttcctccatcacccagatttatacttagagtcagacgaagtcgcctggttaaagatgctctgcgtcaattaagtcaagctgaagctactgacttctgcaaagtattagtggttgaatttattaatgaaatttgtcctgagtctggaggggttagttcagagttcttccactgtatgtttgaagagatgaccaagccagaatatggaatgttcatgtatcctgaaatgggttcctgcatgtggtttcctgccaagcctaaacctgagaagaaaagatatttcctctttggaatgctgtgtggactctccttattcaatttaaatgttgctaaccttcctttcccactggctctgtataaaaaacttctggaccaaaagccatcattggaagatttaaaagaactcagtcctcggttggggaagagtttgcaagaagttctagatgatgctgctgatgacattggagatgcgctctgcatacgcttttctatacactgggaccaaaatgatgttgacttaattccaaatgggatctccatacctgtggaccaaaccaacaagagagactatgtttctaagtatattgattacattttcaacgtctctgtaaaagcagtttatgaggaatttcagagaggattttatagagtctgtgagaaggagatacttagacatttctaccctgaagaactaatgacagcaatcattggaaatactgattatgactggaaacagtttgaacagaattcaaagtatgagcaaggataccaaaaatcacatcctactatacagttgttttggaaggctttccacaaactaaccttggatgaaaagaaaaaattcctctttttccttacaggacgtgataggctgcatgcaagaggcatacagaaaatggaaatagtatttcgctgtcctgaaactttcagtgaaagagatcacccaacatcaataacttgtcataatattctctccctccctaagtattctacaatggaaagaatggaggaagcacttcaagtagccatcaacaacaacagaggatttgtctcacccatgctcacacagtcataatcacctctgagagactcagggtgggctttctcacacttggatccttctgttcttccttacacctaaataatacaagagattaatgaatagtggttagaagtagttgagggagagattgggggaatggggagatgatgatgatggtcaaagggtgcaaaatctcacacaagactgaggcaggagaatagggtacagagatagggatctaaggatgacttggacacactccctggcactgaagagtctgaacactggcctgtgattggtccattccaggaccttcatttgcataaggtatcaaaccacatcagcctctgattggccatgggccagacctgcactctggccaatgattggttcattccaggacattcatttgcataaggagtcaaaccacaccagtcttggattggctgtgagccaattcacctcagtctctaattggctgtgagtcagtctttcatttacatagggtgtaaccatcaagaaacctctacagggtacttaagccccagaagattttgctaccagggctcttgagccacttgctctagcccactcccaccctgtggaatgtactttcacttttgctgcttcactgccttgtgctccaataaatccactccttcaccaccc

SEQ ID NO: 3272 - DNA, 2373 bp, Homo sapiens
  source 1..2373: mol_type = genomic DNA
acctgctgggagctggaggaggcgcggagcgaagccggccctgccagccacgcggagaagcagaggcaggtgagcgcgatgcagccggcgccgggtctggggctcggggactcctccctgcaccgctacctggacggcgacttctggagcctcaagaacgagctgcgcggactcctcggcggcgcccgctcttccggcaaaggtatgatttaagcttggatgaaatgagagctttgacagttcagagagtgaagtttgccatggacctgcctctgttaaaacgtgcaggtcaggatctggcagagaaaacaaagaattttgtcagccgaagccttgtcataggagaagtcctctccatggcggacatggccacaggagtgaagtgcggaataatttattggctatttggtggtgctatcaggaatctcggaagccctgaacatgttactaagtggtttcagccactccaggagcagaaatacactgggatgtttgcaatgaccgagaggggccatgggagcaacgcgagagggatccagaccgaagccacctttgacctctctgcccaggagtttgtaattgacacgccgtgtgaaaatgcggagaagatgtatattggaaatgccatgtacgggaattatgcagctgtctttgcccagctcatcatagatggaagatctcaagggccccactgtttcatcgttcctgtccgggatgaaaacggaagcttgtacccaggagtcacagctattgatatgatgtacaaggagggtctgcatggtgtggacaatgggatattaatatttgacaaggttcggatacccagggagaacctgctggataagtttggttccgtggctccagatggacagtaccattcgcctattaggaacaagagtgcaagattcaatgccatgctggcagcactgaccccttcgagattagctgtggctttccaagctatgggtgccatgaagcttgggttgacgatagccattcgctatagccacagccggaggcagtttgggcccaaaaccaaggaagaggtgaagatcattgagcaccaaacacagaccctgcggctgatgccccacctggccacagccttggccctgaccttcgtcagcaggtatgctggggccctcctggatgaggatgtcttccagggaaaggagctggtcaacagtcgctcgctgcaggctctggtggcggggctgaaggcctacagcacctgggagaacatccgctgcctgcaggactgccgcgagtgcactggaggcatggttgtggggcgggaactgctggcccaatacaccaaacagtatgaagaaaaaccactctttggcctgctccaaaactgggctgaatctgtgggggacaagctgagaaccagtttcctggcatttaacatggacacagttgatgatctcgcctttctgttgaaagcagtgaaatttcgtgaaagggttcttcagcggggtttggtggccagaatttattataaggtaaagaccaagaaggaggattttttccatgcctggaactcgtgtctgcaccacgtggcttctctgtccctggcacacactcaccgagttaccttagagcagttctccctagcagtgaagagctgtcctgaccaagaggaccagactttgttaatgaagttttgtctgttgtatggaaccaagctggtgtttcaggagcgggcctggtatttagaacataaatacttgactcccatggccagcacgaggatcaggaatcagttgctggatttgtgcgactcggtgaaggatgatgcccggagggtgatctcgacctttaacattccacacacctacctccacgcaccaatcgccggaatctccaacccgcgggccgcgtgggctttctaccctgcaccgctgcagccgcggccacgggaagaggcgcgctcccggcggcccaagctgggagccaagctctaacgggtgtggcgggaagtgtggtggcccgccagcagctgccacgacgctcgctccaccgacgcccagagctgtggccgaggccgggggctggcacccgctgggccgccactctcggggattttggtggcaaagcggaggtcccgccgaggctggcgaggtgcgcggctggctgctaggaaagagatccagacggtcgcctggtgcgctggatccctgtgccctttccctgaaacccagcctggcctgactgcaacctctcccaacttcagtgccggatcccctagacaatcagggtgggctccccgctgcgagcgcgccccacagccgggtgccgccaaaggtctcctgctgttagcggtgactcacattcccagtgatttagaaaaactgtggtgccgagtgaaag

SEQ ID NO: 3273 - DNA, 787 bp, Homo sapiens
  source 1..787: mol_type = genomic DNA
cttgactggaagggtccccattccttctttccgatccgcgattaccctggactcgaagtcagcagacccggttctaggccagctctgcctctcaccctctgtgaccttgggcaaatcatacaactctgggactcagtttcttcctctctaaaacggagatgactgttgctccatcagtctcagccagcaagttcagctccggcaagtcatttgattcacccggtgatgaaatgggggtcaaccagtctgtgggctttccacctgtcacaggaccccacctcgtaggctgtggggatgtgatggagggtcagaatctccaggggagcttctttcgactcttctacccctgccaaaaggcagaggagaccatggagcagcccctgtggattccccgctatgagtactgcactggcctggccgagtacctgcagtttaataagcgctgcgggggcttgctgttcaacctggcggtgggatcttgtcgcctgcctgttagctggaatggcccctttaagacaaaggactctggataccccttgatcatcttctcccatggcctaggagccttcaggactttgtattcagccttctgcatggagctggcctcacgtggctttgtggttgctgtgccagagcacagatgtgtgtatttcagggaccggtcagcggcaaccacctatttctgcaagcaggccccagaagagaaccagcccaccaatgaatcgctgcaggaggaatggatccctttccgtcgagttgaggaaggggagaaggaatttcatgttcg

SEQ ID NO: 3274 - DNA, 3478 bp, Homo sapiens; identical to SEQ ID NO: 986
  source 1..3478: mol_type = genomic DNA

SEQ ID NO: 3275 - DNA, 3020 bp, Homo sapiens
  source 1..3020: mol_type = genomic DNA
atgggcccctcggggaggcgaggcctgcgggcgagcccttctgagggcagggggtgagggggcggcgcccgccagccaggacagcatcctgccgccgtgacaagcacgcctccggttgccaaaacaacccaaaaatgtgcctcaaaacacgttcgcaaagccccgggccggccggtcgcctgcctctcacctagcccgaccgcccgacgtcctactgccgagcgagggcgagcaagccaatgagtcgcaatcccagcagcaatagcccagaagaggacacggttcccgtaccgaagggttcagtaccagcagcccgaccatcacgcggcgggatgtctgtggttggcattgacctcggctttctcaactgctacattgctgtcgcgagaagtggcggcatcgagaccatcgccaatgagtacagcgacaggtgtaccccggcctgtatatcattgggatcaagaactcgagccattggaaatgcagcaaagagccagatagtcacgaacgtaagaaatacaattcatggcttcaaaaagcttcatgggcgatcatttgatgatcccattgtgcaaactgaaaggatcaggcttccctatgaactgcagaaaatgcctaatggaagtgcaggagttaaggtgcggtacttagaggaagagagaccttttgcaattgagcaagttactggaatgctgttagccaagcttaaagagacttcagaaaatgctttgaagaaaccagtggctgactgtgtgatttcaattcctagcttttttactgatgccgagagaagatctgtgatggctgcagcccaggttgcaggcttaaattgtttaaggttgatgaatgaaactactgcagttgcactggcgtatggaatttataaacaggatcttcccccattagatgagaaaccaagaaatgtagtatttattgatatgggacattctgcctatcaggtcttggtttgtgcttttaacaaaggaaaacttaaagtcttggctactacctttgatccatatttgggtggcaggaactttgatgaggctttagtagactacttctgtgatgagttcaagaccaaatataagataaatgtgaaagaaaactctcgggccttgttgcgtttatatcaggaatgtgaaaaactaaagaagctaatgagtgcaaatgcatcagatcttccattgaacattgagtgtttcatgaatgaccttgatgtttctagtaaaatgaacagggctcaatttgaacaactgtgtgcttcccttttggccagggttgaaccacctttaaaagcagtaatggaacaagctaacttacaacgtgaagacattagtagtatagaaattgtaggaggagcaacacgaattcctgcagtgaaagaacaaatcactaaattctttcttaaagacataagtaccacattaaatgctgatgaagctgttgcaagaggatgtgcgttacagtgtgcgattctctcaccagcatttaaagtgcgtgaattttccataacagaccttgttccctattcaatcacattaaggtggaagacctcttttgaagatggaagtggggaatgtgaagttttctgtaagaaccatcctgccccattctcaaaagtcattactttccacaagaaggaaccatttgaactagaagcattttatactaatttacatgaagtgccttatcctgatgcaagaattgggagcttcactattcagaatgtttttccacagtctgatggtgatagttccaaagtgaaggttaaagttcgtgttaacatccatggaatcttcagtgtggctagcgcatcagtaattgagaagcaaaatttggaaggcgatcacagtgatgctccaatggagacagaaacttcatttaaaaatgaaaacaaagataatatggataaaatgcaggttgatcaagaagaagggcatcaaaaatgtcatgctgaacacactccagaagaggaaattgatcatacaggagccaaaacaaagtcagctgtctcagacaaacaagaccgattaaatcagacacttaaaaaaggaaaagtcaaaagtattgatctaccgatccagagtagcctatgtagacaactaggccaagatcttctcaacagctacattgaaaatgaggggaagatgatcatgcaagataagttagagaaagaaagaaatgatgctaagaatgccgttgaagaatatgtatatgattttagagacaggctgggcactgtctatgaaaaattcatcactccagaagacttgagtaaactgtctgcagtattggaagacacagaaaattggctttatgaagacggagaggaccaacctaaacaagtttatgtggataagcttcaagaactaaagaaatacggccagcctattcaaatgaagtacatggagcatgaagagagaccaaaagccttaaatgacttgggaaaaaagatccaacttgtcatgaaagtgatagaagcttatagaaacaaggatgaaagatatgatcatctggatcctactgaaatggaaaaggttgaaaaatgtatcagtgatgccatgagttggctgaatagtaagatgaatgcacagaacaaactaagtctcactcaagatcctgtggtaaaagtttcagaaatagtagcaaagtcaaaggaactggataatttctgtaaccccatcatttacaagcccaaaccaaaagcagaagttcctgaagacaaaccaaaagctaatagtgaacacaatggcccaatggatggacagagtggaactgaaactaaatcagattcaacaaaagacagctcacagcatactaaatcctctggagagatggaagtggactaagtcttaattttaccttcacattaattcaaaccgtgcaagtaaccacggggtccatcttttacatctggtacacacaacagacgctcagttgttcttaaccacttttgtcatttgttttttggagtagttttgaaaagtgttttatattgagtgcacttctgttcattt

SEQ ID NO: 3276 - DNA, 5512 bp, Homo sapiens
  source 1..5512: mol_type = genomic DNA
agcgggccgtcggttgggcgcagacaggccgcagaagatggagagatggagccaccccaagagacaaataggcctttcagcacacttgataaccgcagcgggcaggtccaagtcctgtccgccaccccgctattgcagaggaatccctacagcagcccggatatcatgcacattaaagggtcggaggcttcttcggtcccttacgccctgaaccagggcacgacggccctgcctaagaacaagaaccaggagggcaccgggcaccggctgctgaacatgctgagaaaaactcttaaagagtctgatagtgaagaactggaaataacacaggagacgccaaatttggtgccatttggggatgtggttggctgcctgggcattcatataaagaactgcagacattttatgcctaagatcagtttacaacattatgctaatttattcattcgcatctctataaacaaagctgtgaaatgtacaaaaatgtgtagcttgctatccaaaaacgatgagaagaacactgtaattaagttcgatgaagtgaagtatttttctgtacaggttcccagacgttatgatgataagcggaataatattttattggaactcatacaatatgacaatagagaaaaacgtgctttcttgttagggagtgttcagatacatctttatgaggtaattcagaaagggtgcttcattgaagaggtccaagtgttgcatggaaacatatttgtctgcaggctggaggtggaatttatgttctcctatggaaactttggttatggattttcacatcagttaaaacctcttcagaaaattactgagccatccatgtttatgaatcttgcaccacctccagaaagaacagatcccgtgacaaaagttattacaccacagacagtagaatatccagcattcttatccccagacctgaatgttactgttgggactccagctgtgcaatcctccaaccagccatctgtagtgcgacttgaaaaacttcagcaacaaccccgggaaaggctggaaaagatgaaaaaagaatatagaaatctgaatacatggatagataaagctaactatttagaaagcattctaatgccaaaattggaacataaggattctgaggaaactaatatagatgaggcatctgaaaacacgaaaagtaatcatcctgaagaggagcttgaaaatattgtaggagtagatatccctcttgtaaatgaggaagctgaaactactgcaaatgagttactggataatgattctgagaaaggcctgactataccaactttgaaccaatcggaccaagataattcaactgctgatgcttctaaaaatgatgaatcaacaccttcacccacagaagtgcactcattgtgcactatttctaaccaggaaacaataaaagcaggcagaataccacctttaggtgaacgtcaatcagaaagcatgccagacagaaaaatgaaaaatgtattttttccattagaagtaaaattaaaagataactatccaagcattttaaaagcagactcatctctatcagaggtggctttttcaccaaaagaatataattcaccatctttcagaccagaatatatagaattcaaaccaaaatttcagtttcagaaattcaacaagaacggttttgatccttttctaaggaatataaacaaaatgtcagtcagaaaaagaaaagatcaagatatatacaaatatagaaatatcttaggtgcagaggtcatagagcatgaagaccaggatcctccttatccagcacaatcaaaaactgcaggacctgctaatacaacctgggcccatgaccctaatatcttcacaacaaagatgttagaaactgagaataagttagcccctgatcctactatcaatacaataaagggtttagatacaaagaatagtttaaaagaaaatctaccaaatgtatctttaccaagcatcaaaggagaatcatcaagggctggaaatgtacaggcaaacacatgtcacctctcgaagtctttaaattttaccccccatatagaatatttaaaacaatcaatgatactcaagtcaattttaagtgaaaatctgcaagacctttcagacaaattattttctaaaccagaagttagtatgaacagtgaagcaagagagaaaagtagttctccacttctaagcattcatgataaatcatcaagtagtatggaagacaacgtattggaaaaaaaacaagatttaaacaactggctttcagaaaaagacattttaaattcaaagactactttaagtcaaataattaaaaatattcctgcagattcattttcagaaggtagtcaaataattgaaaatattcctgcagattcacttttagaaggtggtcaagtaattaaaaatattcctgaatattcactttcagaagggggtcagataattaaaaatattcctgcagattcatttttagaaagtggaccaggacaatctccagaggtagaagaacatgtctctaaaaaacacttcgaagctgatgagagagattttccaattaaaaaaaatagtagtaccaaaaagaaacatttaataagcgaagtacctaactccaaatcaggttcaagtggcactgtacatgactacattatgaggcaaatattcactgcaccaatattctcagaattggagatagaagtgaaagagccaagtgaaacaccaatgaacttggaaaatcaattacctacaccttggaagagaagtttgtcatcacatattctatttcatgaagaaaatgctgatgaaatagaattgccacagcccagatctgctacaagccagataatacaagcatttcctatagatacacttttagaatctgggataatcaaagtgatagaattagataaagaacaccataagagttctttgctgggtacggggatcacttctcctaaaggaaacctaaaggattcccaagagtattattcagaaatcagaagcgagacagaacctctttctgagcagagtatacccatcattcccaaagacactacttctgttagtagagctgaatttatacaggaagaccaaaatatgttcccacaagattcaagttattattcaatagcaaataaagaactgtatttgccaagaaatggtcagaggctttgtaaagacaaaaatgatctcagttctactttagaaagtttaactaactcattaatggataaacttagtgaatcagatgaaataatgttaaaatcctttttaaaaaacatcttcaatgtttttttcaaatataatcattctgaaagaagaggacaaccagaaaaagaattagaaagactaattcaaccttcttttacaagtgacacagaacaccttgaagaactccaagaggattttgataaagcagacaaattagacagaaaacctattttgagtccaaagttgcgtgtgtttctagaagaactctcagagtcagaagtaaaacatttaaaatctgaattaagtaaacaaatccagcattaccttgtagaaagactttcagaatcaggacatatcaccaaggaggacttaccaaaaatctatcaaaatctgtatctgatgaatgagaaagcagagcagaaagggccaaacagttttcaggggaaatattctgaaactgtgaaagaaatcatgtcttttgtcaacaatttcaatcatcatttcatagataaacatttggaaataaagctgagatcttttttaaaagagattctccaaaactatttcctaaaaaacatttcagaaagcagtttatttaatgagacagcatctgagactatatacccaaacatatcttctctaaggactaaaagtgtctcaatatcttttcatgaactagaacaagatatttcaaaggggagttttggtagaaggtttgaaataaacatgaaatatcctttaagtaaatctctacaaaactatctgatagctttatcagaaaatgaattattacatctaaaagctgatttaagcaaacacctccagagtctttttatagaaaaactttcaaaatcaggactaatgacaaaaaagcaattagaagggatcaaccagcatataaatttgcttaattctagttctataccattaaaatatataaaaacacatttaccttttagagatgactgtcactttgtggagaagcattcagaaaagcaaaataaatattcaagaattgttcaacaaaccactttacaaacggtttctgaggataaacttagagaagcagaattgattcgagagaaagaaaagaaatattttcccttacagaatttaaagggaaattcatctttaattaaggaacagaaaagttattacactaaggaagaagctaaaacaccaagtttaatcaaagtacaaccttcttccaatgaaaatatccaggcaagtccattaagtaagtcatcagaaatacttacagatatactgcttaagaaactaaggaaagaacatgtattcacgcagcttcctcaagcagaaaattctgttcataaaacagagattcaagacccatatagttggggtggtaaatcaaaaataactcaatcaaaagcttggtgtgaaaagacactgaaaatgaagtcccttgatagaaaggagcatgtaaacatctataaatggactgttcaggaaaaacctgaagcagtattaacatcgtatccaagaattcctaatgccagaatgccaagggaagatgagtacttaaacagaatcactttcccttcctggcaaagtagcactttaactcatttcaatacagagactggggaaaaatcaaaattagaagaccagtattgtcagacattgaaaggaaataataacaataataaaaagcatttagtaacatttgcacaatacaaaaaagaaatacaaactctttatataaaaccagatgaaatttgcagtgaaaaatgtgccaagttccctgaaatacagtcattccaatataaggttgtagaagatgagaaaaacttgaaaccacacctcttcccagaattatttaagatagaagatctaaaacccaaggtccgaaaagaaagagaccgtgtcgcccaaccaaaaaagtcatttaacaagatagtcaggatactaccaaccacactgcccaccacaagaattcacctaaagaagtctgttccaaggacactgcttcactggactgcaagaagaactatacatgattgttcagataaatttgaggatttacatgacatgacctcatttacacaccttaaaaaagtaaaatcaagatcaaggcttttaggaaaaagctcagatgatatccataaccatgccagacactctgcaagaccatatactgctccggaggttaacaagcaacgagaaagctacagtggaaagtttacaagtcgtcgaatggtttcatcaggcttagttcatataaatgataaaacatcagattatgaaatgcataaaatgcggccaaaaaaaattaaaagaggatattgaaaaa

SEQ ID NO: 3277 - DNA, 1166 bp, Homo sapiens
  source 1..1166: mol_type = genomic DNA
gccaaatcttaaaggatccgggagctaagccagacccgggtggcggtggcagctgcgaaacccagggagccgatgccacgtgacccaatgtggacttcttttaaacctttctaatgcccataacccagcctcagacccatggagcccacgagagactgcccgctgttcgggggcgccttttccgccatcctccccatgggggccattgacgtaagcgacctccgaccggtcccggacaatcaagaagttttctgccatcccgtgacggaccagagcctgatagtggaacttctcgagctgcaggcccacgtacggggcgaagcggctgcgcggtaccactttgaggatgttggtggcgtgcagggggctagggctgtccatgtggagtctgttcagcctctcagtttggagaacctggccctgaggggccgctgtcaagaagcctgggtcctctctggcaagcagcagatagctaaggaaaaccagcaggtgagggcccgagagtgtgtaatgtcctggaagggcggtagcggggacgcagagatccaggtaagcatcctgactctgatccccttaggtagcaaaggacgtgacacttcatcaggccttgctgaggctgccccagtaccagactgatctcttgcttaccttcaatcagcccccgtaaggaggaaggaacgggcgggtatctcatgactgggttcccaggagaatcgggctgggagggacagaacagggagactcactggtgggatcctccaaggaagcaggagtgggccagaggtttggggtaactgatacccaggtcctctggggaacaggaattggcaatttccaaacctcaggcctggatgatgttctgtctccatctgttcccccaccccaagccctgacaacaggtcatctcttggccccgaaaatctgtcacctgcaccctggagcctgggtgactttgaacagctggtgaccagtctgacccttcacgatcctaacatctttggtccccagtaaaggcgctgaagcactgcatgatgttgctgagaacttggggactcggttctgtgagggggaaaagaggttgaaaagagggtttcctcttatttcttccctgtgcgtaaacataagacaatccctcttcagaataaacttgctttataatcaatata

SEQ ID NO: 3278 - DNA, 6053 bp, Homo sapiens
  source 1..6053: mol_type = genomic DNA
tggagaacgggtggacgtgcaggccagaacccgggacccacccggctgagcccccagactctccgctgcccacgaccctcggagtggcaccctctcctggccgtctcctctcgtgggtcccgaagaacgggtgcaaagccgagttcgtccgctgtactgcgcgggcgcgcgtttcgttcttcggttttgccacggttctgtgactccctaaaggttgagggctactgaattagaagaaacgccgagctggcttctggtgggctgccgggcgccgggcagcgtgcttggactggggagggcagggcgtgtttactctgagtagagcaaccgcaagacctcctttaaaaaataccagttctgagcttcggcattggagaggccgcctgtcattcagcctcttcggaccctctctcactccctgtcttccggagcgtgagtgaagcccgggtgaggtgttttcccacacgccgggggcccggagctgagaaggggcatggccagcatcacgcagctgttcgacgacctgtgtgaggccctcctgccggctgccaagactcacctgggccagcgcagtgtgaaccggaagagggcaaagcggagcctcaagaaggtggcctacaatgctcttttcacaaatctttttcaagatgagactcaacagctgcagcctgacatgtcaaaactaccagcgagaaacaagatcctcatgttgtcctttgacttgagagtgggtggcctgggccccaaggccgaccgtttggaggagcttgtggaggagctggaagcagccccttgctgtccgcttttggaggtggggtctgttttggacctcctggttcagctggcagggagtggtccccctcaagttctgccgagaaaacgagactacttccttaacaacaagcatgtggggagaaacgttccgtacagcggctatgattgcgacgacctgagtgtgtttgagatggacgttcagtctctgatctccagagaagagtgtttgtgtcacagcatgatccaggaaacacttcaggttatggaggctgctccaggcactggcctgcccaccgtcgggctcttctcatttggtgacccttgtggtgacaggttcgagagagacacccgggtctcgctcttcggggcccttgtgcacagccgcacttatgacatggacgtccgactgggcctgccccccgtgccagacaatgcggacctctctgggctggctattaaggtcccaccgagtgtggatcagtgggaagacgaaggattccagtcagcgtccaacttgactcctgattcccagtctgagcccagcgtgaccccagacgtggacctgtgggaagccgcacttacctatgaggccagcaagcggaggtgctgggagcgagttggctgcccccctggccacagagaggagccttacctgacggaggcgggaagggacgctttcgacaagttctgcaggctccaccaaggggagctccagctgcttgctgggggcgtcctacaggccccgcagcccgtgctggtgaaggagtgcgagctggtgaaagacgtgctgaacgtcttgattggggtcgtgtctgccacgttttcgctctgccagccggcccaggcctttgtggtgaagcggggcgtccacgtgtcaggagcgtctcccgagagcatcagcagcctgctctcggaagtggccgagtatgggacctgctacacgcgcctgagtcatttctctctgcagcccgtcctggactctttgtacagcaagggcctcgtgttccaggccttcaccagtggcctgaggaggtacctgcagtattaccgggcctgcgtcctttccactccgcccaccctgagcctcctcaccattggttttctcttcaagaaacttggccggcagctcaggtacctggccgagctctgtggcgttggcgctgtgctcccgggcacctgtggaggaggccccagggccgcgtttcccaccggcgtgaagctgctgtcctacctctaccaggaggctctgcacaactgcagcaacgagcactaccctgtactgctgtccctgctgaagaccagctgcgagccctacacccggttcatccacgactgggtgtacagcggggtgttcagagacgcttatggcgagttcatgattcaggtgaaccacgagtacctcagcttccgagataagttgtactggacacatggctacgtgctcatctccaaagaggtggaggactgtgttcccgtgtttctgaagcacattgcccacgacatatacgtctgcggaaagaccattaacctgctgaagctctgctgcccccggcattacctctgttggtccgacgtccctgtcccccggatctcggtgattttctcccttgaggagttgaaggagattgagaaggactgtgccgtctacgttgggcgcatggagagggtggcccgccacagctctgtcagcaaggaggagaaggaattacgtatggaaattgcaaaacaagaattaatcgctcatgcccgggaagcagcatccagggtcctgagtgcactgagtgaccggcagatgtcagaacggatggccttggatgcccggaagcgtgagcagtttcagaggctgaaagaacaatttgtgaaggaccaggagcgacgccaggcggccaggcaggaggagctggatgatgacttcagctacgcccgtgaactccgagacagggagagaaggctgaagtccctggaggaggagctggagaggaaggcgaggcaggcactggtcgaccactacagcaagctctctgcagaggcagctcgtcgggagcagaaggcactgtggagaatccagaggcaccgactggagagtgcacggcttcgttttctcttagaagatgagaaacacattcaggagatgctgaaagcagtgtctgaggctcaccagccccaggagccgccagacgtcctcttgagcgtgcacccccaggtcacgtctccgggccctgagcacccagagggaggccaaggctgtgattctgggtctgcagagcaacactcgcctgcctgggatggctggaacaggccaggcctgctgaccccacagccccttaagcctctagcagtgggggctggtggcagggggctgcagcaggcggagggggccagacccttctctgacagcctcagcattggagacttcctacctgtgggcccaggggctgagccgtccgtgcagactggcatggtccctctcctggaggtggcgctgcagaccattaacttggacctgcccccctcagctcctggggaggcacccgcagcagccagcactcagccctccaggccacaggagtacgactttagtactgtcctgaggccagctgtggccacctcacctgcaccagggcccctgcaggctgcagagtgcagcttgggcagctcagggctacagctgtgggaggacagttgtgggaagatggatgcctgtggctccgcctcgcgggagactctgctcccctcacacccacccaggcgtgctgctctggaggaggggagcagccagcccacagagcggctctttgggcaggtgtcagggggtggtcttcccacaggggactacgcttctgaaatagctcccacccggccacggtggaacacccacgggcacgtgtctgacgccagcatcagggtcggggagaatgtgtcagatgtggctcccacccagccacggtggaacacccacggacacgtatccaatgccagcatcagcttaggggagtctgtgtcagatgtggctcccactcggccacggtggaacatccatggacatgtgtccaacgccagcatcagggtcggggagaatgtgtcagatgtggctcccaccaggccacggtggaatacccacgggcacgtgtccaacgccagcatcagggttggggagaacgtgtcggacgtggctcccacccggccacggtggaacacccatggacacgtgtccgatgccagcatcagcttgggggagtctgtgtcagacatggctcccgcccggccacggtggaacacccatggacacgtgtctgatgccagcatcagcttgggggagtctgtgtcagacatggctcccacccggccacggtggaacacccacggacatgtgtctgacaccagcatcagggttggggagaacgtatcggacgtggctcccatccggtcacggtgcaacacccatggacacgtgtccgacgccagcatcagcttgggggagcctgtgtcggatgtggtttccacccggccacggtggaacacccatgtacccatccctccgccccacatggtgctgggggctctctcaccagaagctgagcccaacacacccaggccccaacagagcccccctggccacacgtcccagtcagcgctcagcctgggagcacagagcactgtgctggactgtgggccacggctgcctgtagaagtggggccatctctgtcctcccccagctcgggctgcggggaggggagcatcagcgtgggggagaacgtgtcagacgtggctcccacccaaccatggtggcccaacaccccgggagacagtgtctctgaagaactaggtcagagtagggtggctggtggtcaggagtgggactgtgggacgcacagagcctgggaggccctgggaggagcggggacactgaggacctctctccaaattggcctctcaactcacaggaagacacagctgcccagagcagcccaggccgtggtgaggaggcggaggcatcggcggcggaggctcagggtggggagcaggcctacctggcaggcctggcagggcagtaccacttggagcggtacccggacagttacgagtccatgtccgagccgcccattgctcatcttttgcgccccgtgcttccccgggccttcgccttccccgtggacccccaggtccagtctgccgctgatgagactgctgtgcagctgagcgagttgctgacgctgcccgtgctcatgaagcgctccatcacggcaccgctggccgcccacatctccttggtgaacaaggccgctgtcgactacttcttcgtggagctgcacctggaggcgcactatgaggcactgcggcacttcctgctgatggaggacggcgagttcgcccagtccctcagcgacctgctctttgagaagcttggagctgggcaaacgcccggagagctgctcaacccgctggtgctgaactctgtgctgagcaaggccctgcagtgcagcctgcatggggacaccccgcacgcctccaacctctccctcgctctcaagtacctgcccgaggtgtttgcccccaacgccccggatgtgctgagctgcctggagctcaggtacaaggtggactggcctctcaacattgtcatcaccgagggctgcgtgagcaagtacagcggcgtcttctccttcctgctgcagctgaagctcatgatgtgggcgctcaaggacgtctgcttccacctcaagcgcacagccctgctgagccacatggccggctctgtgcagttccgtcagctgcagctgttcaagcacgagatgcagcatttcgtgaaggtcatccagggctacatcgccaaccagatcctgcacgtcacctggtgcgagttcagggccaggttggccaccgtgggcgacctggaggagatccagcgtgcgcacgcagagtacctgcacaaggccgtcttcaggggcctgctcacggagaaggcggcgcccgtcatgaacgtcatccacagcatcttcagcctcgtgctcaagttccgcagccagctcatctcccaggcctgggggccccctgggggcccgcggggtgcagagcaccccaactttgcactcatgcagcagtcctacaacaccttcaagtactactcccactttctcttcaaagtggtgaccaagctggtgaaccgcggctaccagccccacctggaggactttctgctgcgcatcaacttcaacaactactaccaggacgcctgaggctgctctgcgggggacgtgcacaataaaggtgttctcgg

SEQ ID NO: 3279 - DNA, 2398 bp, Homo sapiens
  source 1..2398: mol_type = genomic DNA
gagacctggcggaccccgttgctagagcggcagattgcggctcaagcgtctgagaaaatctaggctggggtcgagagtccgcaacagtggcacctggagccagacccaccgctttctggtgtcgcgcctttcaacccgggggggtaggaagctttctgttgctccgcataactgtggtcagctaatagctgctgcctttccgagacagttgtcttatggagttgcttggagaacgtaaaataagaggcctaagcaatgcgtctgatgtacacctgtcgtggaataactgttcccgctcattcggccgctgtacctctgctccctcattcggagcgtagctgggtatgaatgaaattccgggcttgtagcacagagaaaacttctctcccacaattggttggtgctggggaggaagctcctgattggtggaaagtccgaggaagtgggcaagccggagggatttcgtgtacctcaggtgccctcactctgaccggccccctatcattacgtaattttctacgactcgcggtagctcaggcagagcgggttcctgcagcggcgcgaccctctgacgtctccgcttctaattggtcaagagctgcgactgcagttctgaagcctaactggttgcccgtgccgcctcggaggtgaagtgtactgcgctgattggcttccaggcgccggccgcgtgtgatgtcccgggcaacgattggctctcgcctaccgggggcttctctcaccgggactcgggactcccgggaagtggaccggcagaagagggggctagctagctgtctctgcggaccaaggagacccccgcgcccccccggtgtgaggcggcctcacagggccgggtgggctggcgagccgacgcggcggcggaggaggctgtgaggagtgtgtggaacaggacccgggacagaggaaccatggctccgcagaacctgagcaccttttgcctgttgctgctatacctcatcggggcggtgattgccggacgagatttctataagatcttgggggtgcctcgaagtgcctctataaaggatattaaaaaggcctataggaaactagccctgcagcttcatcccgaccggaaccctgatgatccacaagcccaggagaaattccaggatctgggtgctgcttatgaggttctgtcagatagtgagaaacggaaacagtacgatacttatggtgaagaaggattaaaagatggtcatcagagctcccatggagacattttttcacacttctttggggattttggtttcatgtttggaggaacccctcgtcagcaagacagaaatattccaagaggaagtgatattattgtagatctagaagtcactttggaagaagtatatgcaggaaattttgtggaagtagttagaaacaaacctgtggcaaggcaggctcctggcaaacggaagtgcaattgtcggcaagagatgcggaccacccagctgggccctgggcgcttccaaatgacccaggaggtggtctgcgacgaatgccctaatgtcaaactagtgaatgaagaacgaacgctggaagtagaaatagagcctggggtgagagacggcatggagtacccctttattggagaaggtgagcctcacgtggatggggagcctggagatttacggttccgaatcaaagttgtcaagcacccaatatttgaaaggagaggagatgatttgtacacaaatgtgacaatctcattagttgagtcactggttggctttgagatggatattactcacttggatggtcacaaggtacatatttcccgggataagatcaccaggccaggagcgaagctatggaagaaaggggaagggctccccaactttgacaacaacaatatcaagggctctttgataatcacttttgatgtggattttccaaaagaacagttaacagaggaagcgagagaaggtatcaaacagctactgaaacaagggtcagtgcagaaggtatacaatggactgcaaggatattgagagtgaataaaattggactttgtttaaaataagtgaataagcgatatttattatctgcaaggtttttttgtgtgtgtttttgtttttattttcaatatgcaagttaggcttaatttttttatctaatgatcatcatgaaatgaataagagggcttaagaatttgtccatttgcattcggaaaagaatgaccagcaaaaggtttactaatacctctccctttggggatttaatgtctggtgctgccgcctgagtttcaagaattaaagctgcaagaggactccaggagcaaaagaaacacaatatagagggttggagttgttagcaatttcattcaaaatgccaactggagaagtctgtttttaaatacattttgttgttatttttttcatga

SEQ ID NO: 3280 - DNA, 3216 bp, Homo sapiens
  source 1..3216: mol_type = genomic DNA
ggcctggagttccggccaggccactgcttgggaagcaagaaggtgaaggcacctctgctgggccaagcactcttagggccgaggggcactgcagctgacaagagctccctgtttcgctgaggcctggagcccccatggcctcactgagccgagccctacgtgtggctgctgcccaccctcgccagagccctacccggggcatggggccatgcaacctgtccagcgcagctggccccacagccgagaagagtgtgccatatcagcggaccctgaaggagggacagggcacctcggtggtggcccaaggcccaagccggcccctgcccagcacggccaacgtggtggtcattggtggaggcagcttgggctgccagaccctgtaccacctggccaagctgggcatgagtggggcggtgctgctggagcgggagcggctgacctccgggaccacctggcacacggcaggcctgctgtggcagctgcggcccagtgacgtggaggtggagcttctggcccacactcggcgggtggtgagccgggagctggaggaggagacgggactacacacgggctggatccagaatgggggcctcttcatcgcgtccaaccggcagcgcctggacgagtacaagaggctcatgtcgctgggcaaggcgtatggtgtggaatcccatgtgctgagcccggcagagaccaagactctgtacccgctgatgaatgtggacgacctctacgggaccctgtatgtgccgcacgacggtaccatggaccccgctggcacctgtaccaccctcgccagggcagcttctgcccgaggagcacaggtcattgagaactgcccagtgaccggcattcgtgtgtggacggatgattttggggtgcggcgggtcgcgggtgtggagactcagcatggttccatccagacaccctgcgtggtcaactgtgcaggagtgtgggcaagtgctgtgggccggatggctggagtcaaggtcccgctggtggccatgcaccatgcctatgtcgtcaccgagcgcatcgaggggattcagaacatgcccaatgtccgtgatcatgatgcctctgtctacctccgcctccaaggggatgccttgtctgtgggtggctatgaggccaaccccatcttttgggaggaggtgtcagacaagtttgccttcggcctctttgacctggactgggaggtgttcacccagcacattgaaggcgccatcaacagggtccccgtgctggagaagacaggaatcaagtccacggtctgcggccctgaatccttcacgcccgaccacaagcccctgatgggggaggcacctgagctccgagggttcttcctgggctgtggcttcaacagcgcaggaatgatgctgggtggtggctgtgggcaggagctggcccactggatcatccatgggcgcccggagaaggacatgcatggctatgacatcaggcgcttccatcactcgctcacggaccacccccgctggatccgagagcgaagccatgagtcctacgccaagaactactccgtcgtcttcccccacgatgagccgctggccgggcgcaacatgaggagagacccgctgcacgaggaactccttggacaaggctgcgtgttccaggagcggcatggctgggagcgaccgggatggtttcatccccgaggcccagctccggtcctcgagtacgactactacggggcttacgggagccgcgcgcacgaggactacgcctaccgcaggctgctggcagacgagtacaccttcgccttcccgccccaccacgacacgatcaagaaggagtgcctggcctgcagaggggccgccgctgtgtttgacatgtcctacttcgggaagttctacctggtggggctggatgcaaggaaggctgccgactggctcttctccgcagatgtcagccgacccccaggctccaccgtgtacacgtgcatgctcaaccaccgtgggggcaccgagagtgacctgactgtcagccgcctggcacccagccaccaggcctccccgctggcccccgcctttgaaggggacggttactacctggccatgggcggggccgtggcccagcacaactggtcccacatcaccaccgtgctgcaggaccagaagtcccagtgccagctcatcgacagctccgaggacctgggtatgatcagtatccagggcccagccagccgagccattttgcaggaggtgctggacgcagacctgagcaacgaggccttcccgttctccacccacaagctactgagagccgcagggcacctggtccgagccatgcggctgtcctttgtgggggagctgggctgggagctgcacattccaaaggcgtcctgcgtgcctgtgtaccgggctgtgatggccgcgggtgccaagcacggcctcatcaacgcagggtaccgcgccatcgactccctgagcattgagaaaggctaccggcactggcacgcggacctgcggccagacgacagccccctggaggcaggcctggccttcacctgcaagctcaagtcgccggtgcccttcctggggagggaggccctggagcagcagcgggccgcaggcctccgccggcgcctggtgtgcttcaccatggaggacaaagtacccatgtttggcctggaggccatctggaggaacggccaagtggtgggccatgtccggagggctgactttgggttcgccatcgacaagaccatcgcctacggttacatccatgaccccagcggtgggccggtctcgctggactttgtgaagagcggggactatgccctggagagaatgggggtgacctatggtgcccaggctcacctgaagtcgcccttcgaccccaacaacaagagggtgaagggaatctactgagggctcagaccacatgccccatcccatgctgtccatccattctcacaggtcccaaatggccctgggtcccaggaccctggacccagccagaacttgtgccctccctgtccttagcctaggcctagtcctgcgaaaacccccaaaccagatacggacagagaccaagatggcccatcctgtggtcactgactggaaggcagtctctaatccaccccaatcctcccagaaagcaaacctgtaagtgtcttgggctcagggaccatggcttgtagccctttccaagcttctagaaggtgcttagtaaatacttgataagccccacgtg

SEQ ID NO: 3281 - DNA, 222 bp, Homo sapiens
  source 1..222: mol_type = genomic DNA
atgtcttaccagcagcagcagtgcaagcagccctgccagccaccacctcctgtgtgccgcctgccaaagcgtccagagccatgtccacccctgaagtgccctgagccctgcccaccaccaaagtgtccacagccctgcccacctcagcagtgccagcagaaatatcctctggtgacaccttccccaccctgccagccaaagtgtccacccaagagcaagtaa

SEQ ID NO: 3282 - DNA, 1832 bp, Homo sapiens
  source 1..1832: mol_type = genomic DNA
agctgccagcccgccaagacccagacctgggaggggaggcccctcctgttagcccagagggaaagaaagaactggggcgatccgggacctggtggccttagtctttcaggtggaacggtgtgcgacatgggaaagaaaaccaagcggacagctgacagttcttcttcagaggatgaggaggagtatgttgtggagaaggtgctagacaggcgcgtggttaagggacaagtggaatatctactgaagtggaaaggcttttctgaggagcacaatacttgggaacctgagaaaaacttggattgccctgagctaatttctgaatttatgaaaaagtataagaagatgaaggagggtgaaaataataaacccagggagaagtcagaaagtaacaagaggaaatccaatttctcaaacagtgccgatgacatcaaatctaaaaaaaagagagagcagagcaatgatatcgctcggggctttgagagaggactggaaccagaaaagatcattggggcaacagattcctgtggtgatttaatgttcctaatgaaatggaaagacacagatgaagctgacctggttcttgcaaaagaagctaatgtgaaatgtccacaaattgtgatagcattttatgaagagagactgacatggcatgcatatcctgaggatgcggaaaacaaagagaaagaaacagcaaagagctaaaggaggggatggtctctgtcatttctctttgtacataatacattcacctccctgcctcctctcctttctacccacccctttctatcctaaacacatccataaaaaatgtgcttatcactgtgctccacaggagaaatgttggtattggttctcttgtaacataactgatggtctgattaatgataagtgtctctctgtgaagaccaggcatttacatactgagtgtaatacccacaatttttttttcctttgccctgatctcttccttctgcttccctgtgacctcaagatgagtttcaactttttaatcaccttagagtcttgatcttttcagggttggtcgctttttaggttgggggattttgttacaatgatgttgaattttggtttcttgctttggttcttagaacatgttgctgactagctggcctttgttctgacatgttgagatggaaaggatgttgcccatctgttaaaaagccaatagcaactgcctacctgttggggctttcccaaccttgttcagctctacccaggagaatacagggtttctggtgtggtcttctgggccaccctctgttgttcatcctcactcatcctcccagaattactccatcctttggaagatttgaaattttacactgaaatctgtcaagacactctttttagccccaggactttcggtattgcttttagcactccccacttctgcttctgtaaagtgatatcaatttgtgataaaatgacaagattattaactgtgcagatttgtagctatagtacatgaggatgatggggtagggtacaattgtctttattatcatatatggtatgtatgtatgatttctttccattcctcatatttagactgtatatttatgtaggtgtgagtgattgcctggtgcttgcttgtgccaaggtgctaggcaccctccaaccctgccaacttttgtggcctcccaaagcattcctgttaccaaagaggcttcaaacctgaccctcacttctcagtggacccgagtttcccttccatgccattattttcagtggggaagttttagaggtgagctgttggccacaatatcaattttaagtgttcatagcagttatgtctcctgcattcttggctc

SEQ ID NO: 3283 - DNA, 308 bp, Homo sapiens
  source 1..308: mol_type = genomic DNA
ggggcagggctggtgagcaagcccgcggggagcgagcgcggaggcgggcgttgctacggcaacgtatattttgaatacatctgtcttcataaaatacaccatgtccaaaatctaaaagggccaattccaaattattccaccagctttgaagggaattgaagcaagaataacaagacagaagaatagaaggaaggtgataggatgtgatgatagaatttgtgatagccaagcaacaacttttcctaattcggcatgttaaaaaataagggtcactcatctaagaaagataacttggcagtcaatgcagt

SEQ ID NO: 3284 - DNA, 1045 bp, Homo sapiens
  source 1..1045: mol_type = genomic DNA
tagtcaggcgaagtttgcagaatggaatctaattttaatcaagagggagtacctcgaccatcttatgtttttagtgctgacccaattgcaaggccttcagaaataaatttcgatggcattaagcttgatctgtctcatgaattttccttagttgctccaaatactgaggcaaacagtttcgaatctaaagattatctccaggtttgtcttcgaataagaccatttacacagtcagaaaaagaacttgagtctgagggctgtgtgcatattctggattcacagactgttgtgctgaaagagcctcaatgcatccttggtcggttaagtgaaaaaagctcagggcagatggcacagaaattcagtttttccaaggtttttggcccagcaactacacagaaggaattctttcagggttgcattatgcaaccagtaaaagacctcttgaaaggacagagtcgtctgatttttacttacgggctaaccaattcaggaaaaacatatacatttcaagggacagaagaaaatattggcattctgcctcgaactttgaatgtattatttgatagtcttcaagaaagactgtatacaaagatgaaccttaaaccacatagatccagagaatacttaaggttatcatcagaacaagagaaagaagaaattgctagcaaaagtgcattgcttcggcaaattaaagaggttactgtgcataatgatagtgatgatactctttatggaagtttaactaactctttgaatatctcagagtttgaagaatccataaaagattatgaacaagccaacttgaatatggctaatagtataaaattttctgtgtgggtttctttctttgaaatttacaatgaatatatttatgacttatttgttcctgaattagctaaaaccaaaggagaattaatcaaaaccaaagaagagttaaaaaagagagaaaatgaatcagattcattgattcaagagcttgagacatctaataagaaaataattacacagaatcaaagaattaaagaattgataaatataattgatc

SEQ ID NO: 3285 - DNA, 199 bp, Homo sapiens
  source 1..199: mol_type = genomic DNA
ctcggcttcccaaaatgttgggattacaggtgggagccaccatgcccggcctgtaaccctaattattaaataatttgctgtggaatggattctaatattcaataatagaagttgtaattctgaacccttggaaatggaggaaggctagaggatatgataaaggagtccaaggagcatggcggacaccgacctgttcatg

SEQ ID NO: 3286 - DNA, 6388 bp, Homo sapiens
  source 1..6388: mol_type = genomic DNA
gttttgatgaacacctggctttattcttgcaatgaagaaaggttctcaacaaaaaatattctccaaagcaaagataccatcatcatctcactctcctatcccatcatctatgtccaatatgagatctaggtcactttcacctttgattggatcagagactctaccttttcattctggaggacagtggtgtgagcaagttgagattgcagatgaaaacaatatgcttttggactatcaagaccataaaggagctgattcacatgcaggagttagatatattacagaggccctcattaaaaaacttactaaacaggataatttggctttgataaaatctctgaacctttcactttctaaagacggtggcaagaaatttaagtatattgagaatttggaaaaatgtgttaaacttgaagtactgaatctcagctataatctaatagggaagattgaaaagttggacaagctgttaaaattacgtgaactcaacttatcatataacaaaatcagcaaaattgaaggcatagaaaatatgtgtaatctgcaaaagcttaaccttgcaggaaatgaaattgagcatattccagtatggttagggaagaagttaaaatctttgcgagtcctcaatttgaaaggcaacaagatatcatcgctccaagatataagcaagttgaaaccgcttcaagatttgatttctctgatcctagttgaaaatccagttgtgacccttcctcattacctccagtttaccattttccacctccgttcattggaaagtttggaaggtcagccagtaaccactcaggatagacaggaggcttttgagagattcagtttagaagaggtagaaagactggaaagagacctagaaaaaaagatgatagaaactgaagagcttaagagcaaacaaacaaggttccttgaggaaattaaaaatcaagataaattgaataaatcattaaaagaggaggccatgttacagaaacagagctgtgaggaactcaagagtgacttaaacacaaaaaatgaattgctaaaacagaagaccatagaattaacacgagcatgtcagaagcaatatgagctggaacaggaattggccttttataaaattgatgctaaatttgagccactaaattattatccatcagagtatgctgaaattgataaagccccagatgaaagcccttacattggcaaatccagatacaagagaaatatgtttgccacagagagttatattattgacagtgctcaggcagtacagatcaagaagatggagccagatgaacaacttagaaatgatcacatgaacttgagaggccacacaccactggacacgcaactggaagacaaagaaaaaaaaataagtgcagcacaaactcgactatcagaactgcatgatgaaatagaaaaggcagaacaacaaattttgagagctactgaagaatttaaacaactggaagaagctatacaactaaaaaagatttcagaagcagggaaagaccttctttacaagcagttgagtggtagactacaacttgtaaataaattacgccaggaagctctggatctagaactgcagatggaaaagcaaaagcaggaaattgccggaaagcagaaggagattaaggacctgcaaatagccatagatagcctggattccaaagacccaaaacattcccatatgaaggctcaaaagagcggtaaagaacaacagcttgacattatgaacaagcagtaccaacaacttgaaagtcgtttggatgagatactttctagaattgctaaggaaacggaagagattaaggaccttgaagaacagcttactgaaggccagatagcagcaaatgaagccctgaagaaggatttagaaggtgttatcagtgggttgcaagaatacctggggaccattaaaggccaggcaactcaggcccagaatgagtgcaggaagctgcgggatgagaaagagacattgttgcagagattgacagaagtcgagcaggagagagaccagctggaaatagttgccatggatgcagaaaatatgaggaaggagcttgcagagctagaaagtgccctccaagagcagcatgaggtgaatgcatctttgcagcagacccagggagatctcagtgcctatgaagctgagctagaggctcggctaaacctaagggatgctgaagccaaccagctcaaggaagagttggaaaaagtaacaagacttacccagttagaacaatcagcccttcaagcagaacttgagaaggaaaggcaagccctcaagaatgcccttggaaaagcccagttctcagaagaaaaggagcaagagaacagtgagctccatgcaaaacttaaacacttgcaggatgacaataatctgttaaaacagcaacttaaagatttccagaatcaccttaaccatgtggttgatggtttggttcgtccagaagaagtggcagctcgtgtggatgagctaagaagaaaactgaaattaggaactggggaaatgaacatccatagtccttcagatgtcttagggaaaagtcttgctgatttacagaaacaattcagtgaaattcttgcacgctccaagtgggaaagagatgaagcacaagttagagagagaaaactccaagaagaaatggctctgcagcaagagaaactggcaactggacaagaagagttcaggcaggcctgtgagagagccctggaagcaagaatgaattttgataagaggcaacatgaagcaagaatccagcaaatggagaatgaaattcactatttgcaagaaaatctaaaaagtatggaggaaatccaaggccttacagatctccaacttcaggaagctgatgaagagaaggagagaattctggcccaactccgagagttagagaaaaagaagaaacttgaagatgccaaatctcaggagcaagtttttggtttagataaagaactgaagaaactaaagaaagccgtggccacctctgataagctagccacagctgagctcaccattgccaaagaccagctgaagtcccttcatggaactgttatgaaaattaaccaggagcgagcagaggagttgcaggaagcagagaggttcagcagaaaggcagcacaagcagccagagatctcacccgagcagaagctgagatcgaactcctgcagaatctcctcaggcagaagggggagcagtttcgacttgagatggagaaaacaggtgtaggtactggagcaaactcacaggtcctagaaattgagaaactgaatgagacaatggaacgacaaaggacagagattgcaaggctgcagaatgtactagacctcactggaagtgacaacaaaggaggctttgaaaatgttttagaagaaattgctgaacttcgacgtgaagtttcttatcagaatgattacataagcagcatggcagatcctttcaaaagacgaggctattggtactttatgccaccaccaccatcatcaaaagtttccagccatagttcccaggccaccaaggactctggtgttggccttaagtactcagcctcaactcctgttagaaaaccacgccctgggcagcaggatgggaaggaaggcagtcaacctccccctgcctcaggatactgggtttattctcccatcaggagtgggttacataaactgtttccaagtagagatgcagacagtggaggagatagtcaggaagagagtgagctggatgaccaagaagaacccccatttgtgcctcctcctggatacatgatgtatactgtgcttcctgatggttctcctgtaccccagggcatggccctgtatgcaccacctcctcccttgccaaacaatagccgacctctcacccctggcactgttgtttatggcccacctcctgctggggcccccatggtgtatgggcctccaccccccaacttctccatccccttcatccctatgggtgtgctgcattgcaacgtccctgaacaccataacttagagaatgaagtttctagattagaagacataatgcagcatttaaaatcaaagaagcgggaagaaaggtggatgagagcatccaagcggcagtcggagaaagaaatggaagaactgcatcataatattgatgatcttttgcaagagaagaaaagcttagagtgtgaagtagaagaattacatagaactgtccagaaacgtcaacagcaaaaggacttcattgatggaaatgttgagagtcttatgactgaactagaaatagaaaaatcactcaaacatcatgaagatattgtagatgaaattgagtgcattgagaagactcttctgaaacgtcgctcagagctcagggaagctgaccgactcctggcagaggctgagagtgaactttcatgcactaaagaaaagacaaaaaatgctgttgaaaagttcactgatgccaagagaagtttattgcaaactgagtcagatgctgaggaattagaaaggagagctcaggaaactgctgttaacctcgtcaaagctgatcagcagctaagatcgctccaggctgatgcaaaggatttggagcagcacaaaatcaagcaagaagaaatcttgaaagaaataaacaaaattgtagcagcaaaagactcagacttccaatgtttaagcaagaagaaggaaaaactgacagaagagcttcagaaactacagaaagacatagagatggcagaacgcaatgaggatcaccacctgcaggtccttaaagaatctgaggtgcttcttcaggccaaaagagccgagctggaaaagctgaaaagccaggtgacaagtcagcagcaggagatggctgtcttggacaggcagttagggcataaaaaggaggagctgcatctactccaaggaagcatggtccaggcaaaagctgacctccaggaagctctgagactgggagagactgaagtaactgagaagtgcaatcacattagggaagtaaaatctcttctggaagaactgagttttcagaaaggagaactaaatgttcagattagtgaaagaaaaactcaacttacacttataaagcaggaaattgaaaaagaggaagaaaatcttcaggttgttttaaggcagatgtctaaacataaaaccgaactaaagaatattctggacatgttgcaacttgaaaaccatgagctacaaggtttgaagctacaacatgaccaaagggtatctgaattagagaagactcaggtggcagtgctagaggagaaactggagttagagaatttgcagcagatatcccagcagcagaaaggggaaatagagtggcagaagcagctccttgagagggataaacgagaaatagaacgaatgactgctgagtcccgagctttacaatcgtgtgttgagtgtttgagcaaagaaaaggaagatctccaagagaaatgtgacatttgggaaaaaaagttggcacaaaccaaaagggttttagcagcagcagaagaaaatagcaaaatggagcaatcaaacttagaaaagttggaattgaatgtcagaaaactgcagcaggaactagaccaactaaacagagacaagttgtcactgcataacgacatttcagcaatgcaacagcagctccaagaaaaacgagaagcagtaaactcactgcaggaggaactagctaatgtccaagaccatttgaacctagcaaaacaggacctgcttcacaccaccaagcatcaggatgtgttgctcagtgagcagacccgactccagaaggacatcagtgaatgggcaaataggtttgaagactgtcagaaagaagaggagacaaaacaacaacaacttcaagtgcttcagaatgagattgaagaaaacaagctcaaactagtccaacaagaaatgatgtttcagagactccagaaagagagagaaagtgaagaaagcaaattagaaaccagtaaagtgacactgaaggagcaacagcaccagctggaaaaggaattaacagaccagaaaagcaaactggaccaagtgctctcaaaggtgctggcagctgaagagcgtgttaggactctgcaggaagaggagaggtggtgtgagagcctggagaagacactctcccaaactaaacggcagctttcagaaagggagcagcaattggtggagaaatcaggtgagctgttggccctccagaaagaggcagattctatgagggcagacttcagccttctgcggaaccagttcttgacagaaagaaagaaagctgagaagcaggtggccagcctgaaggaagcacttaagatccagcggagccagctggagaaaaaccttcttacagctagagaagctgaggcccagaagctcaagaaacaggtgtgtgcccagaaagcccagctggccagcctggggagagag

SEQ ID NO: 3287 - DNA, 1639 bp, Homo sapiens
  source 1..1639: mol_type = genomic DNA
agacaggccgcagaagatggagagatggagccaccccaagagacaaataggcctttcagcacacttgataaccgcagcgggcaggtccaagtcctgtccgccaccccgctattgcagaggaatccctacagcagcccggatatcatgcacattaaagggtcggaggcttcttcggtcccttacgccctgaaccagggcacgacggccctgcctaagaacaagaaccaggagggcaccgggcaccggctgctgaacatgctgagaaaaactcttaaagagtctgatagtgaagaactggaaataacacaggagacgccaaatttggtgccatttggggatgtggttggctgcctgggcattcatataaagaactgcagacattttatgcctaagatcagtttacaacattatgctaatttattcattcgcatctctataaacaaagctgtgaaatgtacaaaaatgtgtagcttgctatccaaaaacgatgagaagaacactgtaattaagttcgatgaagtgaagtatttttctgtacaggttcccagacgttatgatgataagcggaataatattttattggaactcatacaatatgacaatagagaaaaacgtgctttcttgttagggagtgttcagatacatctttatgaggtaattcagaaagggtgcttcattgaagaggtccaagtgttgcatggaaacatatttgtctgcaggctggaggtggaatttatgttctcctatggaaactttggttatggattttcacatcagttaaaacctcttcagaaaattactgagccatccatgtttatgaatcttgcaccacctccagaaagaacagatcccgtgacaaaagttattacaccacagacagtagaatatccagcattcttatccccagacctgaatgttactgttgggactccagctgtgcaatcctccaaccagccatctgtagtgcgacttgaaaaacttcagcaacaaccccgggaaaggctggaaaagatgaaaaaagaatatagaaatctgaatacatggatagataaagctaactatttagaaagcattctaatgccaaaattggaacataaggattctgaggaaactaatatagatgaggcatctgaaaacacgaaaagtaatcatcctgaagaggagcttgaaaatattgtaggagtaggtggctttttcaccaaaagaatataattcaccatctttcagaccagaatatatagaattcaaaccaaaatttcaggattgttcagataaatttgaggatttacatgacatgacctcatttacacaccttaaaaaagtaaaatcaagatcaaggcttttaggaaaaagctcagatgatatccataaccatgccagacactctgcaagaccatatactgctccggaggttaacaagcaacgagaaagctacagtggaaagtttacaagtcgtcgaatggtttcatcaggcttagttcatataaatgataaaacatcagattatgaaatgcataaaatgcggccaaaaaaaattaaaagaggatattgaaaaatgttcgctcatttgtgatattataaaacatgtttaactcagaatgatatgtgaggccagcagtcagaatatcacttctccatt

SEQ ID NO: 3288 - DNA, 565 bp, Homo sapiens
  source 1..565: mol_type = genomic DNA
aacagattgtgggctcccagggcatatgtctgcacgctgaggccgaggcggagaaggggcttcctgagcgtcccagtacactgacagagggcgtgattctcagtcaccagactcagcttggagatcttacaatgatggcaatcaggagacactgaacggagatgctacatattcctctcttgcagcaaaaggttttagaagcgttcgaccaaacctacaagataaaagatcaccaactcagagccagataacagtgaatggaaactcaggaggtgccgtgagtcccatgagttactatcagaggccgttttccccctcggcatattctctcccagcctcactcaactccagcattgtcatgcagcacggcacatccctcgattccacagacacatatccccagcatgcgcagtctctggatggcaccaccagcagctctatccccctgtaccgatcctcagaggaagagaagagagtgacagtcatcaaagccccgcattacccagggatcgggcccgtggatgaatccggaatccccacagcaattagaacgacagtcgaccgg

SEQ ID NO: 3289 - DNA, 1468 bp, Homo sapiens
  source 1..1468: mol_type = genomic DNA
gttcctcctccggccccaggtcaccgccagcacgcgcctgcttcccgtctgcgcgagtccacgcagctccccaggcccttcaccagcacagcagcagcaggcatggcagcaagcgtggagcagcgcgagggcaccatccaggtgcagggccaggccctcttcttccgagaggccctgcccggcagtgggcaggctcgcttctctgtactgctgctgcatggtattcgcttctcctccgagacctggcagaacctgggtacactgcacaggctggcccaggctggctaccgggctgtggccattgacctgccaggtctggggcactccaaggaagcagcagcccctgcccctattggggagctggcccctggcagcttcctggcggctgtggtggatgccttggagctgggccccccggttgtgccagtggcccccatctgcactgacaaaatcaatgctgccaactatgccagtgtgaagactccagctctgattgtatatggagaccaggaccccatgggtcagaccagctttgagcacctgaagcagctgcccaaccaccgggtgctgatcatgaagggggcggggcacccctgttacctggacaaaccagaggagtggcatacagggctgctggacttcctgcaggggctccagtgaagcccagcactgctgcagggggtgggctgcctgcctgctctgagctctctcttgcacgctctctcttctctcccaggctctggctcatgcacatgcaacaggtgcgtctgtctatatgtctgggttcttgtcttttgtggtctgtttgtcttttctacctctttctcttgcagtgatagactgagggggtaaaatcaagagaaaaaactctcaggaatcaaggaacataatcctgtggagggtaatccattacatgagcttctcctgttcttccactttcctgcctggctttcactccttcccctgctctgcccagcctttccctcccacccactcctccttctgcaaatgccctgaaggccagcccttaccccaacacccacttccccacctccttaggccccagatacatacatgcccacatgcacgcttacatgtttagagccatccttgtttccaaatatgacccttcgcttgagggcaactgcataggtacatctaactctggactggcatgcacattgtcatgtgcagctttgcatatacacacatgcatacatgagcctccacacaagcacttgcacacatgtggactcctaaccatgctaacctcactggctgggaaggtggggaccccatgggccagcccttgcaggaggcccttttgcaaggcttagggtgtggccagccctgaaagctacttggacacaggtttcagctggccccagcccagaagtgacccccagaaagggagggccaccgctttgccccctgcttttacccttccttctgggtgctctacacctca

SEQ ID NO: 3290 - DNA, 2141 bp, Homo sapiens
  source 1..2141: mol_type = genomic DNA
tggaatttttggcgcgagcagctccgcgcgcgttcacgggccgttccccctcacgggagtcctccgcccgggcgtccggaacagtcgacggcagactccggcccgctgagccacccgaggggtcccgtggcctccgcggacccggaatctgggccctcgcggacccgcgccccgcccagtcgccccagggcttccccacacccacggagtgaagtcagccgcggccctgcctgggaggaacttaccgtctaccgggaaaggtggccagcagatgtgtcgggcctggtgagagggtgaggcgagacggcccgatcgcccagggccccggaagctgcggaggtcacccccgcctggccttagctcagggacaccctggattcacgtgggagcccctgctcctgcctcccccgtcccaccactgaggctgttgggccaggccagtcatgctagaacggcctcctgcactggccatgcccatgcccacggagggcaccccgccacctctgagtggcacccccatcccagtcccagcctacttccgccacgcagaacctggattctccctcaagaggcccagggggctcagccggagcctcccacctccgccccctgccaagggcagcattcccatcagccgcctcttccctcctcggaccccaggctggcaccagctgcagccccggcgggtgtcattccggggcgaggcctcagagactctgcagagccctgggtatgacccaagccggccagagtccttcttccagcagagcttccagaggctcagccgcctgggccatggctcctacggagaggtcttcaaggtgcgctccaaggaggacggccggctctatgcggtaaagcgttccatgtcaccattccggggccccaaggaccgggcccgcaagttggccgaggtgggcagccacgagaaggtggggcagcacccatgctgcgtgcggctggagcaggcctgggaggagggcggcatcctgtacctgcagacggagctgtgcgggcccagcctgcagcaacactgtgaggcctggggtgccagcctgcctgaggcccaggtctggggctacctgcgggacacgctgcttgccctggcccatctgcacagccagggcctggtgcaccttgatgtcaagcctgccaacatcttcctggggccccggggccgctgcaagctgggtgacttcggactgctggtggagctgggtacagcaggagctggtgaggtccaggagggagacccccgctacatggcccccgagctgctgcagggctcctatgggacagcagcggatgtgttcagtctgggcctcaccatcctggaagtggcatgcaacatggagctgccccacggtggggagggctggcagcagctgcgccagggctacctgccccctgagttcactgccggtctgtcttccgagctgcgttctgtccttgtcatgatgctggagccagaccccaagctgcgggccacggccgaggccctgctggcactgcctgtgttgaggcagccgcgggcctggggtgtgctgtggtgcatggcagcggaggccctgagccgagggtgggccctgtggcaggccctgcttgccctgctctgctggctctggcatgggctggctcaccctgccagctggctacagcccctgggcccgccagccaccccgcctggctcaccaccctgcagtttgctcctggacagcagcctctccagcaactgggatgacgacagcctaggccctggacaccctccttgtctcgcctgccctcctgcaggccttcactctcccctgaggctgtcctggcccggactgtggggagcacctccaccccccggagcaggtgcacacccagggatgccctggacctaagtgacatcaactcagagcctcctcggggctccttcccctcctttgagcctcggaacctcctcagcctgtttgaggacaccctagacccaacctgagccccagactctgcctctgcacttttaaccttttatcctgtgtctctcccgtcgcccttgaaagctggggcccctcgggaactcccatggtcttctctgcctggccgtgtctaataaaaagtatttgaaccttgggagcacccaagcttgctcatgtggc

SEQ ID NO: 3291 - DNA, 3821 bp, Homo sapiens; identical to SEQ ID NO: 3008
  source 1..3821: mol_type = genomic DNA

SEQ ID NO: 3292 - DNA, 1080 bp, Homo sapiens
  source 1..1080: mol_type = genomic DNA
gcccggggctctgatgtcaccgcgcggctgcgacggcccaggagcgcgtctcggcgggagcctcaggacccacgcagccacccagcctcagcactcatctgcgcagccatggaggccctgggacctgggggcgaccgcgcctccccggcctcgtccactagcagcctggacctgtggcatctgtccatgcgcgcggactcggcctacagctctttctccgcagcctccggcggccccgagccgcgcacgcagtcgccggggacagacctccttccttacctagactgggactacgtgcgtgtggtttggggcggcccgggccccgccccgcccgacgctgccctttgcacatccccgcggccccggcccgcggttgcagcccgcagtgggccgcagccaacagaggtcccggggaccccgggaccactgaacaggcaggccaccccgctgctgtacgcgctggcggccgaggcggaggccgcggcgcaggctgccgagccgcccagcccgccggcctcgagggccgcctaccgccagcggcttcagggcgcgcagcggcgagtgctccgggagacgtcgttccagcgcaaggagctccgcatgagcctgcccgcccgtctgcggcccactgtcccagcgcggcccccggcgactcacccgcgctccgcctcgctcagccacccgggcggggagggggagccggcgcgctcccgggctcccgcgccaggaactgccggccggggtcccctcgccaaccagcagcggaagtggtgcttctcagagccaggaaagctggatcgtgtgggtcggggcggtgggccggcgcgggaatgcctgggtgaggcctgctccagctctggcctccctgggcccgagcccttggagttccagcatccggcgctggctaagtttgaagatcacgaggtcggatggctgcccgagacgcaaccccaaggctccatgaacctggactccgggtccttgaagctcggtgatgccttcaggcccgccagtcggagtcggagcgcttcaggcgaagtcttgggttcctggggaggatcaggagggaccatacccatt

SEQ ID NO: 3293 - DNA, 970 bp, Homo sapiens
  source 1..970: mol_type = genomic DNA
gtgattagggccaacatggccgccgccgccgcttggagctgaagtgccgccgccgccgggcagccacggggaatccgcccgcatcgccgccctcgccggccgggcggccgtggggcccagagcgccggaggccagggctggggcggcaccgcgcagcggccacggggtcccgttagagcagcgcccggcggctatgccgagagcccggagcggccggaggagcagaggggccggcgggagggaggaaacctttctgcgagtacgagccaaccggcagacccgactgaatgctcggattgggaaaatgaaacggaggaagcaagatgaagggcagagggaaggctcctgcatggctgaggatgatgctgtggacatcgagcatgagaacaacaaccgctttgaggagtatgagtggtgtggacagaagcggatacgggccaccactctcctggaaggtggcttccgaggctctggcttcatcatgtgcagcggcaaagagaacccggacagtgatgctgacttggatgtggatggggatgacactctggagtatgggaagccacaatacacagaggctgatgtcatcccctgcacaggcgaggagcctggtgaagccaaggagagagaggcacttcggggcgcagtcctaaatggcggccctcccagcacgcgcatcacacctgagttctctaaatgggccagtgatgagatgccatccaccagcaatggtgaaagcagcaagcaggaggccatgcagaagacctgcaagaacagcgacatcgagaaaatcaccgaagattcagctgtgaccacgtttgaggctctgaaggctcgggtcagagaacttgaacggcagctatctcgtggggaccgttacaaatgcctcatctgcatggactcgtactcgatgcccctaacgtccatccagtgttggcacgtgcactgcgaggagtgctggctgcggaccctg

SEQ ID NO: 3294 - DNA, 582 bp, Homo sapiens; identical to SEQ ID NO: 3048
  source 1..582: mol_type = genomic DNA

SEQ ID NO: 3295 - DNA, 1415 bp, Homo sapiens
  source 1..1415: mol_type = genomic DNA
aaaggggcggcccggcccggcccggaagctacagcagcggcgcggagactgcggggcgggccatggcggcgaacctgagccggaacgggccagcgctgcaagaggcctacgtgcgggtggtcaccgagaagtccccgaccgactgacaggcgagggcgtgaacgatgtgcggaagggagcctgtgccagccacgtcagcaccatggccagcttcctgaagggggcccatgtgaccatcaacgcacgggccgaggaggatgtggagcctgagtgcatcatggagaaggtggccaaggcttcaggtgccaactacagctttcacaaggagagtggccgcttccaggacgtgggaccccaggccccagtgggctctgtgtaccagaagaccaatgccgtgtctgagattaaaagggttggtaaagacagcttctgggccaaagcagagaaggaggaggagaaccgtcggctggaggaaaagcggcgggccgaggaggcacagcggcagctggagcaggagcgccgggagcgtgagctgcgtgaggctgcacgccgggagcagcgctatcaggagcagggtggcgaggccagcccccagaggacgtgggagcagcagcaagaagtggtttcaaggaaccgaaatgagcaggagtctgccgtgcacccgagggagattttcaagcagaaggagagggccatgtccaccacctccatctccagtcctcagcctggcaagctgaggagccccttcctgcagaagcagctcacccaaccagagacccactttggcagagagccagctgctgccatctcaaggcccagggcagatctccctgctgaggagccggcgcccagcactcctccatgtctggtgcaggcagaagaggaggctgtgtatgaggaacctccagagcaggagaccttctacgagcagcccccactggtgcagcagcaaggtgctggctctgagcacattgaccaccacattcagggccaggggctcagtgggcaagggctctgtgcccgtgccctgtacgactaccaggcagccgacgacacagagatctcctttgaccccgagaacctcatcacgggcatcgaggtgatcgacgaaggctggtggcgtggctatgggccggatggccattttggcatgttccctgccaactacgtggagctcattgagtgaggctgagggcacatcttgcccttcccctctcagacatggcttccttattgctggaagaggaggcctgggagttgacattcagcactcttccaggaataggacccccagtgaggatgaggcctcagggctccctccggcttggcagactcagcctgtcaccccaaatgcagcaatggcctggtgattcccacacatccttcctgcatcccccgaccctcccagacagctt

SEQ ID NO: 3296 - DNA, 705 bp, Homo sapiens
  source 1..705: mol_type = genomic DNA
cgcgccgaaattcaaaggaataaatagttccggcgcgggtgttgagagcggtgtggcaggtgttgtagccgctatggtgaagttcgctttgtagcggccccggctagagagttgttctgttccctgcctttgtgacccggaggagcttttggggtggttattggtggtagaaataaatatttaatcaatggagtcaatgccaacaacaccagagtacaggatctcttctgttctgttggccttaatgttaacaaccctcactttctcatcatgcagggccgaattacaaaagtattgaatatgaaacctccagagattttatccatgatagaagaagcagctggaaccaggatgtatgaatacaaaaaaatagctgcacagaaaactatagaaaaaaaggaggctaagctgaaagaaattaagacgatacttgaagaagagattactccaaccattcaaaaattaaaagaggaaagatcgtcctacttggagtaccaaaaagtaatgagagaaatagaacatttgagtcgtttatatattgcttatcagtttttgctggctgaagataccaaagtacgctcagctgaggaattaaaagaaatgcaagataaagttataaagcttcaggaagaattgtctgagaatgataaaaaaataaaagcacttaatcatgaaatagaagaattggaaaaaagaaaagataag

SEQ ID NO: 3297 - DNA, 1557 bp, Homo sapiens
  source 1..1557: mol_type = genomic DNA
catcagtgcagtcacaacaggagcagttgtcccagtcagatccatctccgtcaccaaactcatgtagttcctttgagctaatagacatggatgctggcagcttgtatgaaccagtttctccccattggttttattgtaagataatagattctaaggagacatggattcctttcaactctgaggattcacagcagctggaagaggcatatagctctggaaaaggttgtaatgggagagttgttcctactgatgggggcagatatgatgttcatttgggggagaggatgcggtatgctgtatactgggatgaactggcatcggaagtgagacgatgtacgtggttttacaagggggacaaagacaataagtatgttccctactcggagagcttcagccaagttttagaggaaacttacatgcttgctgtaactttggatgaatggaaaaagaaactggaatctcccaacagagaaattattattttacacaatccaaaggagaacctttacaaatagatcacttggtttttgtagtccatgggattggaccagcttgtgatctccgctttcgaagcattgtacagtgtgttaatgattttcgcagtgtttccttgaacttgctacagacacattttaagaaagcccaagaaaatcagcagattgggagggtagaatttcttccagtcaactggcacagtcctttgcattctactggtgtggatgtagatctgcagcgaataaccctgcccagcattaaccgcctcaggcacttcaccaatgacacaattctggatgtcttcttctacaatagtcccacctactgtcagactattgtggacacagttgcttctgaaatgaaccgaatatacacactttttctacagaggaaccctgatttcaaagggggtgtatccattgctggtcatagtttaggttcgcttatattgtttgatatcctaacaaatcagaaagattctttgggggatattgacagtgaaaaggattcgctaaatattgtaatggatcaaggagatacacctacactagaggaagatttgaagaaacttcagctctctgaattctttgatatctttgagaaggagaaagtagataaggaagctctggctttatgtacagaccgagatcttcaggaaataggaattcctttaggaccaagaaagaatctgagttctgcagtagcagtaatactagaaatggtgactatctggatgttggcattgggcaggtgtctgtgaaatacccccggctcatctataaaccagagatattctttgcctttggatctcccattggaatgttccttactgtccgaggactaaaaagaattgatcccaactacagatttccaacgtgcaaaggtttcttcaatatttatcacccttttgatcctgtggcctataggattgaaccaatggtggtcccaggagtggaatttgagccaatgctgatcccacatcataaaggcaggaagcggatgcacttagaactgagagagggcttgaccaggatgagtatggaccttaagaacaacttgcta

SEQ ID NO: 3298 - DNA, 2251 bp, Homo sapiens
  source 1..2251: mol_type = genomic DNA
caggtcctagagcagctccagcaggatggcggctccagcgtctctaaggcctgcagggggtccagccccatggggggcgccctaggcctccgacagctccccatctgtgctcctgcctgccggccatcctcaggccactcgccatgggcggctgcttctccaaacccaaaccagtggagctcaagatcgaggtggtgctgcctgagaaggagcgaggcaaggaggagctgtcggccagtgggaagggcagcccccgggcctaccagggcaatggcacggcccgccacttccacacggaggagcgcctgtccacccctcacccctaccccagccctcaggattgcgtggaggctgctgtctgccacgtcaaggacctcgagaatggccagatgcgggaagtggagctgggctgggggaaggtgttgctggtgaaggacaatggggagttccacgccctgggccataagtgtccgcactacggcgcacccctggtgaaaggcgttctgtcccgtggtcgggtgcgctgcccctggcacggcgcctgcttcaacatcagcactggggacctggaggacttccctggcctggacagtctacacaagttccaggtgaagattgagaaggagaaggtgtacgtccgggccagcaagcaggccctacagctgcagcgaaggaccaaggtgatggccaagtgtatctctccaagtgctgggtacagcagtagcaccaatgtgctcattgtgggtgcaggtgcagctggcctggtgtgtgcagagacactgcggcaggagggcttctccgaccggatcgtcctgtgcacgctagaccggcaccttccctacgaccgtcccaagctcagcaagtccctggacacacagcctgagcagctggccctgaggcccaaggagtttttccgagcctatggcatcgaggtgctcaccgaggctcaggtggtcacagtggacgtgagaactaagaaggtcgtgttcaaggatggcttcaagctggagtacagcaagctgctgctggcaccagggagcagccccaagactctgagctgcaaaggcaaagaagtggagaacgtgttcactatccggacgccagaggatgccaatcgcgtggtgaggctggcccgaggccgcaacgtggtcgtcgtgggagccggcttcctggggatggaggtggccgcttacctgacggagaaggcccactctgtgtctgtggtggagctggaggagacgcccttcaggaggttcctgggggagcgcgtgggtcgagccctcatgaagatgtttgagaacaaccgggtgaagttctacatgcagacggaggtgtctgagctgcggggccaggagggaaagctgaaggaggttgtgctgaagagcagcaaggtcgtgcgggctgacgtctgcgtggtgggcattggtgcagtgcccgccacaggcttcctgaggcaaagcggcatcggtttggattcccgaggcttcatccctgtcaacaagatgatgcagaccaatgtcccaggcgtgtttgcagctggcgatgctgtcaccttcccccttgcctggaggaacaaccgcaaagtgaacattccacattggcagatggctcatgctcaggggcgcgtggcagcccagaacatgttggcgcaggaggcggagatgagcactgtgccctacctctggaccgccatgtttggcaagagcctgcgctacgcgggctacggagaaggcttcgacgacgtcatcatccagggggatctggaggagctgaagtttgtggctttttacactaaaggcgacgaggtgatcgccgtggccagcatgaactacgatcccattgtgtccaaggtcgctgaggtgctggcctcaggccgtgccatccggaagcgggaggtggagctgtttgtgctgcacagcaagactggcgacatgtcctggcttacggggaaaggatcctgagctcacatgcagtagacttgggcaggcaaagggggcaccaagggcacaggccaagccttgggggcaggtgccaatctccagtcccaggatcccccagggcagaacctgagccctcccagtgcttgccttcagccacctggctcccctcctgggaggcctctgctggatccagaagatgctcaaccctcaaggcctctgctgccactgacagctggcactggaggcaggacaagccctgcctcttctccctctattgggactggtcccctgaagaaccctgcaacacgtta

SEQ ID NO: 3299 - DNA, 617 bp, Homo sapiens
  source 1..617: mol_type = genomic DNA
attttcctgcagtcactgctggcagatgatagagccaggatttgaaagcaggcagcctggctccagaccctgtgctcttaactcccgttttgcatcaagaacagaatcctatgaaaggatagcagcatcaaggagcattgtgtacatgcagaagtgcacagtacctggagtgaaactgcttgtgttcgatttctgataccattcataactggctgtgtgatctcaaataagaaaactgaagaaccagctgggcgcggtagctcacgcctgtaatcccagcactttgggaggctgaggcgggtggattacctgagaacctctaaaatgcagacctccagctctagatctgtgcacctgagtgaatggcagaagaattacttcgcaattacatctggcatatgtaccggaccgaaggcagatgcataccgtgcacagatattacgcattcagtatgcatgggcaaactctgagatttcccaggtctgtgctaccaaactgttcaaaaaatatgcagagaaatattctgcaattattgattctgacaatgttgaatctgggttgaataattatgcagaaaacattttaactttggcaggatctcaacaaacagatagtga

SEQ ID NO: 3300 - DNA, 1198 bp, Homo sapiens
  source 1..1198: mol_type = genomic DNA
ggcagcttgttttgccttcacgggagtagaaggaggcggcgtccggccgcggccgacggtagttcgcttccccgagagtgcgcggaggcccgggtgcgaggagggcctgtttctcttcagccctggttcattcacctcgcggaccgagggccccgccgtcaggagccggcgaccgtgccctggtgcgagctgtgatggtcattgtcctccagagcagtgatggaggaaataccagcccaggaagcagcagggtcaccaagggtccagtttcagtctttggagacccagtctgagtgtctgtccccagagcctcagtttgtgcaggacaccgacatggaacagggactcactgggggcatacttctccgccttcccaccacccggattcatagtgtgaattcctgcccggccctgagtcatacccaggcaagtgctttctctggagaaacacttgccgtccttacagcaggaatctccaagagatggcccaagtatcggcttcccatcgatattgctcgtccctgctcggaaactccttttccacgattgtgagatattaaaattgactgatggaatagaagctccccaggatgccaccactgtgtaaaatcgcagctcctcaaattacctctgtttaatttcaaatgttagggtccaaggaagccctctgttgcaaccagatatgttttgaacccagttcattcagaaaccatggttggtggtcatcatctacttgtattgtgaaaaaccagaaattccaaattcagctcttcagttatggtcttttcatattattttagaatgtgaaacttatgctgtgtgcccctccttttatgtggcgaacacaacctgccccgtatggtgcctaactctcctgtgaaccctgggcttccctcatgtttaacattctggtttcctccttccttgaagtccctgtggccctcttcaaggtcctaccttcctaccctttattctttgtggttctgtacagattgatgcaattatattgcctttcctgattaagtgttccttactctgtccttgatggaggggagaagggagggcaaagaagttaaatttatttcagggcatcaaattgaatatctacttaataactttgtaaactgtaaagtgacatacatataattgtaaagtactgttaattttatctaataattacagagtttccaacagttaa

SEQ ID NO: 3301 - DNA, 871 bp, Homo sapiens
  source 1..871: mol_type = genomic DNA
ggaaacgcggcccaaactgttacgaagtggaagaggctggatagctcttcataattaatcaggaatgggaggtttgagcaggtttacttgatgagggaaacattatagcctcgccaattcattcattatttcaacaattacttattgaacacctgctacgtggcagacagccaaggaggcgggtttggtgcggccactccaaggccaaagcgagaaaatcttactgcgcacgcgcaatagacagccgatggagccaccgatggagccgtccggaggggagcaagagcccggagccgtcaggttcctggacctgccctgggaagacgtgctgctcccacacgtcctgaaccgggtcccgctgcgccagctgctccggctgcagcgcgttagccgggccttccggtcgctggtgcagcttcacctggccgggctgcgtcgcttcgatgccgcgcaggtgggtccgcagatcccgcgggccgcattggcccggctgctgcgggatgccgaggggctgcaggagctggcactggcgccgtgtcacgaatggctgtcagacgaggacctggtgccggtgctggcgcggaatccgcagctgcggagtgtggcgttgggcggctgcgggcaactgagtcgccgggcgcttggggctttggccgagggctgcccacgcctgcagcgcctgtcgctcgcgcactgtgactgggtggacgggctggcgctgcgcggcctcgctgatcgctgcccggccctggaggagctggatctcaccgcctgccgccagctcaaggacgaggccatcgtgtacctggcgcagaggcgcggcgctggtctccgcagcctctctctggccgtcaacgccaacgtgggggac

SEQ ID NO: 3302 - DNA, 2514 bp, Homo sapiens
  source 1..2514: mol_type = genomic DNA
gttactcactataaacaatatccacccaacacaagcaaagtttattcctactttgaatgccgtgaaaagaagacagaaaactccaaattaaggaaggtgaaatatgaggaaacagtattttatgggttgcagtacattcttaataagtacttaaaaggtaaagtagtaaccaaagagaaaatccaggaagccaaagatgtctacaaagaacatttccaagatgatgtcgttaatgaaaaaggatggaactacattcttgagaaatatgatgggcatcttccaatagaaataaaagctgttcctgaaggctttgtcattcccagaggaaatgttctcttcacggtggaaaacacagatccagagtgttactggcttacaaattggattgagactattcttgttcagtcctggtatccaatcacagtggccacaaattctagagagcagaagaaaatattggccaaatatttgttagaaacttctggtaacttagatggtctggaatacaagttacatgattttggctacagaggagtctcttcccaagagactgctggcataggagcatctgctcatttggttaacttcaaaggaacagatacagtagcaggacttgctctaaataaaaaatattatggaacgaaagatcctgttccaggctattctgttccagcagcagaacacagtaccataacagcttgggggaaagaccatgaaaaagatgcttttgaacatattgtaacacagttttcatcagtgcctgtatctgtggtcagcaatagctatgacatttataatgcgtgtgagaaaatatggggtgaagatctaagacatttaatagtatcgagaagtacacaggcaccactaataatcagacctgattctggaaaccctcttgacactgtgttaaaggttttggagattttaggtaagaagtttcctgttactgagaactcaaagggttacaagttgctgccaccttatcttagagttattcaaggggatggagtagatattaataccttacaagagattgtagaaggcatgaaacaaaaaatgtggagtattgaaaatattgccttcggttctggtggaggtttgctacagaagttaacaagagatctcttgaattgttccttcaagtgtagctatgttgtaactaatggccttgggattaacgtcttcaaggacccggttgctgatcccaacaaaaggtccaaaaagggccgattatctttacataggacgccagcagggaattttgttacactggaagaaggaaaaggagaccttgaggaatatggtcaggatcttctccatactgtcttcaagaatggcaaggtgacaaaaagctattcatttgatgaaataagaaaaaatgcacagctgaatattgaactggaagcagcacatcattaggctttatgactgggtgtgtgttgtgtgtgtgtgtgtgcatgcacacacacacacacctttgtgtatgtaatacataatgtttattgtacagatgtgtggggtttgtgttttatgacacattacagccaaattatttgttggtttatggacatactgccctttcattttttttcttttccagtgtttaggtgatctcaaattaggaaatgcatttaactatgtaaaagattagtgctaaagtaagctttttagggccctttgccaataggtagtcattcaatctggtattgatcttttcacaaataacagaactgagaaacttttatatataactgatgatcacataaaacagatttgcataaaattaccatgattgctttatgtttatatttaacttgtatttttgtacaaacaagattgtgtaagatatatttgaagtttcagtgatttaacagtctttccaacttttcatgatttttatgagcacagactttcaagaaaatacttgaaaataaattacattgccttttgtccattaatcagcaaataaaacatggccttaacaaagttgtttgtgttattgcacaatttgaaaattatgtcgggacataccctatagaattactaaccttactgccccttgtagaatatgtattaatcattctacattaaagaaaataatggttcttactggaatgtctaggcactgtacagttattatatgtcttggttgttgtattgtaccagtgaaatgccaaatttgaaaggcctgtactgcaattttatatgtcagagattgcctgtggctctaatatgcacctcaagattttaaggagataatgtttttagagagaatttctgcttccactatagaatatatacataaatgtaaaatacttacaaaagtggaagtagtgtattttaaagtaattacacttctgaatttatttttcatattctatagttggcatgacttaaatgaattactggagtgggtagtgagtgtacttatcttaaatgtttcaattctgttatattttttattaagttttttaaaaattaaattgatattaaattgtaaaaaaaaaaaaaaaa

SEQ ID NO: 3303 - DNA, 541 bp, Homo sapiens
  source 1..541: mol_type = genomic DNA
tgtaagcaatctacgaagaccgaggaaaagctgcggcctaccaggacatcctcggaaagtatttattctaggccaggctccagtattcctggctcaccaggtcatactatctatgcaaaagtagacaatgagatcctggattacaaggatttagcagccattccgaaggtcaaggcaatttatgacattgaacgtccagatcttattacctatgagcctttctacacttcgggctatgatgacaaacaggagagacagagccttggagagtctccgaggactttgtctcctactccatcagcagaagggtaccaggatgttcgggatcggatgatccatcggtccacgagccagggctccatcaactcccctgtgtacagccgccacagctacactccaaccacgtcccgctctccccagcatttccacagacctgatcaaggaatcaacatttaccgaaagccacccatctacaaacagcatgtactgtttgaagtcatccttttgttgttaatttaagaataaaattctcagcatttga

SEQ ID NO: 3304 - DNA, 2445 bp, Homo sapiens
  source 1..2445: mol_type = genomic DNA
atgaggctcctggatgggaaacagacttccaggtactcagagaatgcctgcgagaagaagattttctctatctacggacactacccggtggtccgggccgctctgcgaaggaagggctgggtagagaagaagttccactttttgcccaaggtcattccggatgtcgaggatgaaggcgcccgggtcaatgatgatacatgtgccaaagtcaaagaaaatcaagaaatggctttggagaaaacagacaacatccacgacgtgatgtctaggttggtaaaaaatgagatgccgtacctcctctggaccatcaagagggacatcattgactatcacagcctgacctacgaccagatgctgaaccactacgcaaagacagcctccttcaccaccaagatcgggctgtgcgtgaacatgcggagcctgccctggtacgtcccggccaaccccgactccttcttcccacgctgctacagcctctgcaccgagagtgagcagcaggagttcctggaagacttccggcgcaccatggcatccagcatcctcaagtgggtggtcagccaccagagctgcagcaggagcagcagaagcaagcccagggaccagagggaggaggccgggagcagcgacctgagcagcaggcaagatgctgaaaatgctgaggcaaagctcaggggcctcccggggcagcttgtggacatcgcgtgcaaggtgtgccaggcctacctggggcagctggagcatgaggacatcgacacgtcagcagatgccgtggaggacctcactgaggccgagtgggaggacctgacccagcagtactactccctcgttcatggcgatgctttcatctccaattcaagaaattacttttcgcagtgccaggctctgctgaatagaatcacgtctgtgaaccctcagacggacattgacgggctccggaacatctggattataaagcccgcggccaagtcccggggccgagacatagtgtgcatggaccgtgtggaggagatcctggagctggcagctgcagaccaccctctttccagggacaacaagtgggtggtccagaagtacatcgagacgccgctgctcatctgtgacaccaagttcgacatcagacagtggttcctcgtcacggactggaaccccctgaccatctggttctacaaggagagttacttgcggttctcaactcagcgcttctccctggacaagctggacagcgccatccacctgtgcaacaacgccgtccagaagtacctgaagaatgatgtgggccgcagccccctgctgcccgcacacaacatgtggaccagcaccaggttccaggagtacctgcagcgccagggccgtggcgccgtgtggggcagcgtcatctacccgtccatgaagaaggccatcgcccacgccatgaaggtggcccaggaccacgtggagcctcgcaagaacagctttgagctctacggggctgacttcgtccttgggagggacttcaggccctggctgatcgagatcaattccagccccaccatgcacccgtccacgccggtcacggcccagctgtgtgcacaggtgcaggaggacaccatcaaggtggccgtggaccgcagctgtgacatcggcaacttcgagctcctgtggaggcagccggtggttgagccgcccccattcagcgggtccgacctctgcgtggcgggcgtcagtgtgaggagagccaggaggcaggtgctgcccgtctgcaacctcaaggcctcggcctcgctgttggacgcgcagccgctgaaggcacggggcccctcggccatgccagaccctgcccagggacccccatcaccagctctccagcgggacttgggactgaaggaagagaaggggctccccctggccttgctggcacccttaaggggggcagccgagagcggtggagccgcacagcccacccgcaccaaagctgctgggaaggtggagctcccggcctgcccctgtcgccacgtggacagtcaggccccaaacaccggtgtccccgtagcccagcccgccaaaagctgggatccaaaccagctaaatgcgcacccgctggagcctgtgctgcggggcctgaagacagcagagggcgcgctgcgtccgccgcccggaggaaaaggagagggcacggtctgcagccgcctgccacaccacgggcaccacgtggccgcctgccagaccacgggcaccacgtgggatggtgggcctggggtgtgcttcctccggcagctcctggcatcagaactgcccatgggccctgggctgccgagggacccccgagcgccgccctgcctcgtgtgccgcgggctgctgccacccgccgggccctgcaagcgctgccgctcgttctgcgccgcggtcctgcagggcgcgtccttcgtgcggctcggcgggcggagctgcagcccgcggaccccgtga

SEQ ID NO: 3305 - DNA, 550 bp, Homo sapiens
  source 1..550: mol_type = genomic DNA
aagagccctgggctgggtggggcagggcggaagggccctggccttgttgggtggaggtgaagagttaatggctccgcgcgcaggcactgccctctgaactggaacaaaatgcaacttccggttggagtcactcggccaggcgccggcgacctgaggggagagggaacgcagctgaaagcgtgaactacctgtcatttactccatcctttatagtgatgctacaggacgaagaggaatggataaaaacattggcgagcaactcaataaagcgtatgaagccttccggcaggcatgcatggatagagattctgcagtaaaagaattacagcaaaagactgagaactatgagcagagaatacgtgaacaacaggaacagctgtcacttcaacagactattattgacaagctaaaatctcagttacttcttgtgaattccactcaagataacaattatggctgtgttcctctgcttgaagacagtgaaacaagaaagaataatttgactcttgatcagccacaagataaagtgatttcaggaatagcaagagaa

SEQ ID NO: 3306 - DNA, 1145 bp, Homo sapiens
  source 1..1145: mol_type = genomic DNA
aagatggcgccggtgggggtggagaagaagctgctgctaggtcccaacgggcccgcggtggcggccgccggcgacctgaccagtgaggaggaggaaggccagagcctatggtcctccattctgagcgaagtgtccacccgcgccaggtccaagctgccgtccggcaagaacatcctggtcttcgatcacacgcgctgcaacgtgtggattctggatggagacttgtaccacaaaggcctgctgaaatttgcagtttctgctgaatccttgccagagaccctcgtcatttttgttgcagacatgtctagaccttggactgtgatggaatctctgcagaaatgggctagtgttttacgtgagcacattgataaaatgaaaattccaccagaaaaaatgagggagctggaacggaagtttgtgaaagattttcaagactatatggaacctgaagaaggttgtcaaggttccccacagagaagaggccctctgacctcaggctccgatgaagaaaatgttgccctgcctctgggtgacaatgtgctgactcataacctggggatcccggtgttggtggtgtgcacaaagtgtgatgcggtgagtgtcctggagaaggagcacgattacagggatgagcatttggactttatccagtcacacctgcggaggttctgccttcagtatggagctgccttgatttacacatcagtgaaagaagagaaaaacctcgacttgttgtataagtatattgttcataaaacatacggtttccacttcaccacacctgccttagttgtggaaaaggatgccgtttttatgtgagttattttgagctgatgctttgaaactcttctttttaaagtacatttgctttttacattttaccccttcaaggaaggtgccttctgtctgtgtcttctacagccagctctctcactgcaccttctctctgttcctttccggattatgaggcatctgcctgagggaagtgggtggtgtggtcaggggtgctgcctttcttcctcgagagcaagttgccaaaacctaagccagccatttttggcactcactgtcaactctggtaaaatactggctggggagggaatatagggaattgtgcttgggggatcctgaatgtcttctattaa

SEQ ID NO: 3307 - DNA, 724 bp, Homo sapiens
  source 1..724: mol_type = genomic DNA
tgggagtgtggctctgtgcgtgcgtgatgagtgccagatagattcgcggaagaaattgggtggctgtgtgctggcgtgtgattgtgcgcgccggacatggccatgtgagttggttcattcttggtccggtgccccttctgttgggtaaaacttggatctggcccgagaatacttcagagagtcagagttgtgccagaagtctcttaatggcagatagaatgcaaatagttgtgattctctcagaattttttaataccacatggcaggaggcaaattgtgcaaattgtttaacaaacaacagtgaagaattatcaaacagcacagtatatttccttaatctatttaatcacaccctgacctgctttgaacataaccttcaggggaatgcacatagtcttttacagacaaaaaattattcagaagtatgcaaaaactgccgtgaagcatacaaaactctgagtagtctgtacagtgaaatgcaaaaaatgaatgaacttgagaataaggctgaacctggaacacatttatgcattgatgtggaagatgcaatgaacatcactcgaaaactatggagtcgaactttcaactgttcagtcccttgcagtgacacagtgcctgtaattgctgtttctgtgttcattctctttctacctgttgtcttctaccttagtagctttcttcactcagagcaaaagaaacgcaaactcattctgcccaaacgtct

SEQ ID NO: 3308 - DNA, 685 bp, Homo sapiens
  source 1..685: mol_type = genomic DNA
gtttattcattgtactgatgattctccagatccatgtatagaatatgagctcgttctccgaaaatggtgtgaattgattcctggggctgagtttcgatgttttgtcaaggaaaacaagcttattggtatttctcaaagagactacacacaatactatgatcatatttctaaacaaaaggaagaaattcgcagatgcatacaagactttttcaagaaacacatacagtacaaattcttagatgaagactttgtgttcgatatatacagagacagtagggggaaggtgtggctcattgactttaatccatttggtgaagtcacagattcactgctgttcacctgggaagaactgatatctgagaacaacttaaacggcgattttagtgaagttgacgctcaagagcagaagagaaatcagcaggaggacgactgatgagcgtactggaactggagaagaggaggccccgccccaccgctccgggagctgctcatcagccgcaacttcctgccgaccctgatgcgggtgggccgagcagtgtggacatcagccactttttatattcatgtacattcacctggggaaaaaaacggagggactttgctacttgtaaaaataacataataaatagatcttaaacataggaaaaccatactgttctgataataaaatgctttctatgaaata

SEQ ID NO: 3309 - DNA, 976 bp, Homo sapiens
  source 1..976: mol_type = genomic DNA
atatccaaggggaggcgtccaggagggctgctggagagccagaggctggcagcgactatgtgaagttctccaaggagaagtacatcctggactcatcgccagagaaactccacaaggaattggaggaggagctcaaactcagcagcacggatctccgcagccatgcctggtaccatggccgcatcccccgagaggtctcggagaccttggtacaacgcaacggcgacttcctcatccgggactcactcaccagcctgggcgactatgtgctcacgtgccgctggcgcaaccaggccttgcacttcaagatcaacaaggtggtggtgaaggcaggcgagagctacacacacatccagtacctgtttgagcaggagagctttgaccacgtgcccgccctcgtgcgctatcatgtgggcagccgcaaggctgtgtcagagcagagtggtgccatcatctactgcccggtgaaccgcaccttcccactgcgctacctcgaggccagctatggcctgggacaggggagtagcaagcctgctagccccgtcagcccctcaggccccaagggcagccacatgaagcggcgcagcgtcaccatgaccgatgggctcactgctgacaaggtcacccgcagcgatggctgccccaccagtacgtcgctgccccgccctcgggactccatccgcagctgtgccctcagcatggaccagatcccagacctgcactcacccatgtcgcccatctccgagagccctagctcccctgcctacagcactgtaacccgtgtccatgccgcccctgcagccccttctgccacagcattgcctgcctcccctgtcgcccgccgttccagtgagccccagctgtgtcccggaagtgccccaaagacccatggggagtcagacaagggcccccacaccagcccctcccacacccttggcaaggcctccccgtcaccatcactcagcagctacagtga

SEQ ID NO: 3310 - DNA, 501 bp, Homo sapiens
  source 1..501: mol_type = genomic DNA
gcaaacggggccggaaagcgtggcagcgcaggcgcaagcgcagagagcggaggcggtggtggtggcggccgctggccagttgaatctacagacctattttctcaggagctcagcctggccttacttcagtgataaaaggaggaaaggctggctacagcaaacatcattcaagatgtccagcaaagggagcagcacagatggcagaacagacttagctaatggaagcctgtctagcagtccagaggagatgtctggagctgaagaggggagggagacatcctcaggcattgaagtggaggcctcagacctgagtttgagcttgactggggatgatggtggccccaaccgcaccagcacagaaagtcgaggcacagacacagagagctcaggtgaagataaggactctgacagcatggaggacactggtcattactccattaatgatgaaaatcgagtccatgaccgctcagaggaagaggaagaggaggaagaagaggagga

SEQ ID NO: 3311 - DNA, 1780 bp, Homo sapiens
  source 1..1780: mol_type = genomic DNA
gctgctggtgctcctcgcctcttggggcctggggcagtgagggggccggcgggcgtgggccgagtggccgcgggcgccatggagggggtgctgtacaagtggaccaactatctgagcggttggcagcctcgatggttccttctctgtgggggaatattgtcctattatgattctcctgaagatgcctggaaaggttgcaaagggagcatacaaatggcagtctgtgaaattcaagttcattctgtagataatacacgcatggacctgataatccctggggaacagtatttctacctgaaggccagaagtgtggctgaaagacagcggtggctggtggccctgggatcagccaaggcttgcctgactgacagtaggacccagaaggagaaagagtttgctgaaaacactgaaaacttgaaaaccaaaatgtcagaactaagactctactgtgacctccttgttcagcaagtagataaaacaaaagaagtgaccacaactggtgtgtccaattctgaggagggaattgatgtgggaactttgctgaaatcaacctgtaatacttttctgaagaccttggaagaatgcatgcagatcgcaaatgcagccttcacctctgagctgctctaccgcactccaccaggatcacctcagctggccatgctcaagtccagcaagatgaaacatcctattataccaattcataattcattggaaaggcaaatggagttgagcacttgtgaaaatggatctttaaatatggaaataaatggtgaggaagaaatcctaatgaaaaataagaattccttatatttgaaatctgcagagatagactgcagcatatcaagtgaggaaaatacagatgataatataacagtccaaggtgaaataaggaaggaagatggaatggaaaacctgaaaaatcatgacaataacttgactcagtctggatcagactcaagttgctctccggaatgcctctgggaggaaggcaaagaagttatcccaactttctttagtaccatgaacacaagctttagtgacattgaacttctggaagacagtggcattcccacagaagcattcttggcatcatgttatgctgtggttccagtattagacaaacttggccctacagtgtttgctcctgttaagatggatcttgttggaaatattaagaaagtaaatcagaagtatataaccaacaaagaagagtttaccactctccagaagatagtgctgcacgaagtggaggcggatgtagcccaggttaggaactcagcgactgaagccctcttgtggctgaagagaggtctcaaatttttgaagggatttttgacagaagtgaaaaatggggagaaggatatccagacagccctaaataatgcatatggtaaaacattgcggcaacaccatggctgggtagttcgaggggtttttgcgttagctttaagggcagctccatcctatgaagattttgtggccgcgttaaccgtaaaggaaggtgaccaccagaaagaagctttcagtattgggatgcagagggacctcagcctttacctccctgccatggagaagcagctggccatactggacactttatatgaggtccacgggctggaatctgatgaggtggtatgatggctgctgggcagcacctcctaacttcagggaataagtgctaaagtgttttgttgccctacttaatttccagcaacagcctcaaccctctccaaccccttcacctggggggatggacaggaggtggcaaaacccagtgctt

SEQ ID NO: 3312 - DNA, 2614 bp, Homo sapiens
  source 1..2614: mol_type = genomic DNA
ggaggccgctgggacgcggttcagctcattccctgaggccggcccgcgtcccgtcaggcgccgcgcggggttagcgcggggtcagcggaggtcagcgggggtcagcagcagcggctccgagggcgcggcggacgcaggatgtacacgctgctgtcgggcttgtacaagtacatgtttcagaaggacgagtactgcatcctgatcctgggcctggacaatgctgggaagacgaccttcctggagcagtcgaaaacccgatttaacaagaactacaaggggatgagtctatccaaaatcaccaccaccgtgggcctaaacatcggcactgtggatgtgggaaaggctcggctcatgttctgggacttaggagggcaggaagagctgcagtctttgtgggacaagtattatgcggagtgtcacggcgtcatctacgtcattgactccaccgacgaggagaggctggctgagtccaagcaggcgtttgagaaggtggtgaccagcgaggcgctgtgcggtgtccccgtcttggtgctggccaacaagcaggatgtggagacgtgcctctcaatccctgacatcaagacggccttcagcgactgcaccagcaagatcggcaggcgagattgcctgacccaggcctgctcggccctcacagggtgagtgggggctgcacctgcgggggctttggggaccgagaccccccgcctcacacccgctgtcttcacagcaaaggggtgcgcgagggcatcgagtggatggtgaagtgtgtcgtgcggaatgtgcaccggccgccgcggcagagggacatcacgtaggcgcagccgcgctgccgtcgggacggctggtcccctggtgctggaggagtggcctcctgttggctcccatgctgctgatctggggggtgggtttgctttgctttggggttcttctatttactttgttttctcgaagacaaactttcctctatgtctggaaaagcgtaggcatccggaggctttggaggggagtctggcagcccggctggcccaggccctgcagcggcagcctttccacagggcgcagcggcggcctttcgaggccctttctggggggtctgagggagacctggttgggaattggggctccagtgctcaggctggcttgggctgcatgaggacagccctgtgggaccctcgggagaccccgtggctgtctccgccccatcgaggaggaggcccgtcagccatggctgccatctggcttctgccctgtgaccccgtgaccccgtgaccccgaagtggtctggggctgatcttgccttgaggaagacccaggccatgttcccaaaggccagcgggggccctggattgtgatgcagcctcgggacagggctgaggcctgcgggggaagacctataccccacgcctgggcctggcttcacctcaccctaatcccccgggagggagctgactgatgcaaaaagctgagggggcctgctgggagtggctgtttttatgccccagccccgcaagttggggagtgtttgtgggggtccagagccctcccccagccaggagagaacctcccggaggggttctctgtggggccctgtgtcccctgctcgggagtaaggctggtcctggggtcctccctgcacggaccccactgggcctgccgagtgctgtgttcttcctcagtctggctgtgggcaggagcggcctgcccagtgtcacccagggtgagtgcaaaataaagacggcgagtgtggctctgtccatcccttccctcctggagggtggaggctcctggctgttggacacggtgatggtgttactgggctgctcaggggctggtgggcaggtgaggggctccccaggtgggcctggagagtccaggcactcccttcctgcggatgtgggaaggacatggggtcctgggaggagctgctgggaaggggcatgagtcagggtgggggtggcgcagcagctgcggggctgtgactcacaggagtcgggccctggaagtccccgcgtcctctccaggggaccctgtgtgtgttctgcaggttggttcccaggacctgggggggacctccagccccgggaacctggccgtgctggggaggcgagtggctggtgcagccccccggttgctctgggtgcatcgggaggcttcagagcctgccccagagagggagaagcttcacttcccggaaagcatgggaggcctggaggaggtctttggcaggtcccctctcgggaaatcccctgtgagttgggagtgggaggaattcataagtggggggttagtgtgggccccggcgactagggctggcctgagccccatcctgttcttccagcaatgataccctcccaggccctgaccctcgctgagcttcaggggcccctgccacgtgccacagccactgggggcagaggtggcactccccactgatcctcccagggagggtctgtctgaggtaggggaagccccgggcagcagttctgatggcaggcagcctgagggatctgggcacagcgggcggctcaggtgtccccggctgccctcccagtagctgtgcaactacaaccagttttatgaaaaagctttataaaaataagctttaagaaacctc

SEQ ID NO: 3313 - DNA, 1067 bp, Homo sapiens
  source 1..1067: mol_type = genomic DNA
agtacaatgcggccgcggggagcgcgggcccgcgggggaggggagcgccgccgcgccgggctcggcccctccccctctctgcgctctcttcgggatacacgtgggcttcgggcctgggccgcgcagtttttctttggctttctcgaatcatcgaggagactggcaaaattagtaatgtctttagactgcgtcactagcgccaatcgaattcgtagttgattgttctttgaattcacatttgagtcctcggttaaaacctcagttaaaaagcaggataaagtcgagctgctttggttctcggaacggaaaagcgtttttttgttgtttagaggcttggcctttatggggctcgtgtgtgttttaggggacggcaaaacagaacagaaaggcggagataaaaagaggggtgttaaaagaccacgagaagatcatggccgtggatattttgagtacattgaagagaacaagtatagcagagccaaatctcctcagccacctgttgaagaagaagatgaacacttcgatgacacagtggtttgtcttgatacttataattgtgatctacattttaaaatatcaagagatcgtctcagtgcttcttcccttacaatggagagttttgcttttctttgggctggaggaagagcatcctatggtgtgtcaaaaggcaaagtgtgttttgagatgaaggttacagagaagatcccagtaaggcatttatatacaaaagatattgacatacatgaagttcgtattggctggtcactaactacaagtggaatgttacttggtgaagaagaattttcttatgggtattctctaaaaggaataaaaacatgcaactgtgagactgaagattatggagaaaagtttgatgaaaatgatgtgattacatgttttgctaactttgaaagtgatgaagtagaactctcgtatgctaagaatggacaagatcttggcgttgccttcaaaatcagtaaggaagttcttgctggacggccactgttcccgcatgttctctgccacaactgtgcagttgaatttaattttggtcagaaggaaaagcc

SEQ ID NO: 3314 - DNA, 2920 bp, Homo sapiens
  source 1..2920: mol_type = genomic DNA
agctcctctgacaaggagtccatcctgaccatcctcaaggtcctcggagatctgctttctgttggcacagaccggagaattcactacatgatcagcaagggtggcagtgaagctcttctgcagaccctggtagacacagcgaggacagctcctccagactatgacatcctcctgcctctcttccggctgctggccaaagttggcctaagagataaaaagattggacggaaggccctagaattggaagcacttgatgtgacattgattctggccaggaagaacctatcccatggccagaatctcctccactgtctctgggctctgcgtgtgtttgcctccagtgtctccatgggagccatgctgggaattaatggagccatggaactgcttttcaaggttattactccttacacccgaaagcgcacccaagcaatcagggcagccactgaagttttggcagcattgctgaaatccaagtcgaacggccgcagagcagtgaaccgaggctacgtcaccagcctgctcgggctgcaccaggactggcacagccatgacacagccaacgcctacgtgcagatccgacggggcttgctgctctgcctcaggcacattgctgccctccggtccggcagggaggccttcctggcagcacagggcatggagatcctcttcagcaccacacagaactgcctggatgacaagagcatggagcccgtcatctctgtggtgcttcagatcctgaggcagtgctaccctacgagtccacttcccttggtcacagccagcagtgcctatgccttcccggtccccgggtgcatcaccactgaacctccacatgatctacctgaagaggattttgaagatgatggcgatgatgaagtggacaaagactctgatactgaagatgggaaagtggaagatgatgacttggaaacagacgtgaacaagctgagttccaaacctggtcttgaccgacctgaagaggaactgatgcaatatgaggtgatgtgtcttgagctctcctatagctttgaggaactgcagtccaaacttggagatgatttgaactctgaaaagactcagtatgccaatcaccaccacattccagccgctgcctcctcaaaacagcattgctacagcaaggaccaaagctcctgtgggcaagaaagagaatatgctgtccagacttcccttctgtgcagggtgaagacgggaaggtccactgtgcatctaggctccaaaaaaaatcctggagtgaacctgtaccaaaatgtgcaatccaatagtctcaggagagattcttctgaaagtgaaatccctgacattcaggcttccccgaaagcagatgcctgggacgtagatgcaattttctgcccaaggatgagtgcctccttttctaattccactaggactagagaagttgtcaaagtaatagataagcttctgcagacacatctgaagcgtgtccctttccacgatccctatctttatatggccaaagccagaagaaccagctctgtggtggacttcaagatgatggcatttcctgatgtctggggacactgtccccctcccaccacccagcctatgttggaacgaaaatgtggagtccaaaggatcaggatatttgaggatattcggaggctcatccagccaagtgatgttataaataaagttgtcttcagtttagatgagccttggcctttgcaagacaatgcttccaattgtttacggttcttctccaaatttgagtcaggaaatcttcgcaaagccatccaagtgcgtgagttcgagtatgacttgctggtcaacgcagatgtgaatagcacccagcaccagcagtggttctatttcaaagtgagcggtatgcaggcggccatcccttaccacttcaacatcatcaactgtgagaagcccaacagccagtttaattatgggatgcagcccaccctatattctgtgaaggaggctcttcttggcaaacccacctggataaggacaggccatgaaatatgttattacaaaaatcattatcgccagagtacagctgttgcaggcggagcatctgggaagtgctactataccctcacctttgctgtcaccttcccacacagtgaggatgtctgctacctggcctaccactatccctatacctacacagccctcatgactcatcttgacatcctggaaaagagtgtcaacctcaaagaggtctacttccggcaagatgttctctgccagacgctgggagggaatccgtgtcccttggtgaccatcacggccatgcctgagtccaacagtgatgagcatctagagcagttccgacatcgtccatatcaggtgatcactgctcgagttcatccaggagagagcaatgccagttgggtgatgaagggtaccttggagttcctggtcagcagtgaccctgtggctaggctcttgagggaaaacttcatcttcaagatcatacccatgctcaacccagatggtgtcatcaacggcaaccacagatgctcactgagcggggaagatttgaacagacaatggctttctcccagtgctcatctgcagccaaccatttaccatgccaaaggcctcctctaccacctgagcagcattggccgaagtcccgtggtgagtcacttccttctggttttctgtgacttccatggccactcccaaaagaagaatgtgttcctttatggctgtagcatcaaggaaaccttgtggcaagcagcatgcactgtgggcacatctactatcctagaggaggtcaactacaggactcttcccaaaatccttgataagctagcaccagcattcacaatgagcagctgcagctttctcgtggagaaatctcgagcttccacggcccgggtggtggtgtggagagagatgggggtgtccagaagctacacca

SEQ ID NO: 3315 - DNA, 7829 bp, Homo sapiens
  source 1..7829: mol_type = genomic DNA
ctccagcatcaccttctctgtgaaggtagaaggacgcccggtgcccaccgtgcactggctcagggaggaggctgagagaggcgtgctgtggattggccctgacacaccgggctacaccgtggccagctctgcgcagcagcacagcctggtcctgctggacgtgggccggcagcaccagggcacctacacatgcattgccagcaacgctgccggccaggccctctgctccgccagcctgcacgtctcgggcctgcctaaggtggaggagcaggagaaagtgaaggaagcgctgatttccactttcctgcaggggaccacacaagccatctcagcacaggggttggaaactgcgagttttgctgaccttggtgggcagaggaaagaagagcctctggctgccaaggaggccctcggccacctgtccctcgctgaggtgggcacagaggagttcctgcagaaactgacctcccagatcactgagatggtatcggccaagatcacgcaggccaagctgcaggtgcccggaggtgacagtgatgaggactccaagacaccatctgcatccccccgccatggccgatcacggccatcctccagcatccaggagtcttcctcagagtcagaggacggcgatgcccgaggcgagatctttgacatctacgtggtcaccgctgactacctgcccctaggggctgagcaggatgccatcacgctgcgggaaggccagtatgtggaggtcctggatgcagcccacccactgcgctggcttgtccgcaccaagcccaccaagtccagcccctcacggcagggctgggtgtcaccagcctacctggacaggaggctcaagctgtcacctgagtggggggccgctgaggcccctgagttccctggggaggctgtgtctgaagacgaatacaaggcaaggctgagctctgtgatccaggagctgctgagttctgagcaggccttcgtggaggagctgcagttcctgcagagccaccacctgcagcacctggagcgctgcccccacgtgcccatagctgtggccggccagaaggcagtcatcttccgcaatgtgcgggacatcggccgcttccacagcagcagcttcctgcaggagttgcagcagtgcgacacggacgacgacgtggccatgtgcttcatcaagaaccaggcggcctttgagcagtacctggagttcctggtggggcgtgtgcaggctgagtcggtggtcgtcagcacggccatccaggagttctacaagaaatacgcggaggaggccctgttggcaggggacccctctcagcccccgccaccacctctgcagcactacctggagcagccagtggagcgggtgcagcgctaccaggccttgctgaaggagctgatccgcaacaaggcgcggaacagacagaactgcgcgctgctggagcaggcctatgccgtggtgtctgccctgccacagcgcgctgagaacaagctgcacgtgtccctcatggagaactacccaggcaccctgcaggccctgggcgagcccatccgccagggccacttcatcgtgtgggagggtgcaccgggggcccgcatgccctggaagggccacaaccgtcacgtgttcctcttccgcaaccacctggtaatctgcaagccccggcgagactcccgcaccgataccgtcagctacgtgttccggaacatgatgaagctgagcagcatcgacctgaacgaccaggtggagggggatgaccgcgccttcgaggtgtggcaggagcgggaggactcggtgcgcaagtacctgctgcaggcacggacagccattatcaagagctcgtgggtgaaggagatctgtggcatccagcagcgtctggccctgcctgtgtggcggcccccggactttgaagaggagctggccgactgcacagccgagctgggtgagacagtcaagctggcctgccgcgtgacgggcacacccaagcctgtcatcagctggtacaaagatgggaaagcagtgcaggtggacccccaccacatcctcattgaagaccctgatggctcgtgtgcactcatcctggacagcctgaccggtgtggactctggccagtacatgtgcttcgcggccagcgccgctggcaactgcagtaccctgggcaagatcctggtgcaagtcccaccacggttcgtgaacaaggtccgggcctcaccctttgtggagggagaggacgcccagttcacctgcaccatcgaaggcgccccgtacccgcagatcaggtggtacaaggacggggccctgctgaccactggcaacaagttccagacactgagtgagcctcgcagcggcctgctagtgctggtgatccgggcggccagcaaggaggacctggggctctacgagtgtgagctggtgaaccggctgggctccgcgcgggctagtgcggagctgcgcattcagagccccatgctgcaggcccaggagcagtgtcacagggagcagctcgtggctgcagtggaagacaccaccctggagcgagcggaccaggaggtcacatctgtcctgaagagactgctgggccccaaggcgccaggcccctccacaggggacctcactggccctggcccctgccccaggggggcacccgcactccaggaaaccggctcccagcccccagtcaccggaacttcggaggcacctgccgtgcccccgagggtgccacagcccctcctccacgaaggcccagagcaggagccggaggccattgccagagcccaggaatggactgtgcccattcggatggagggtgcagcctggcccggggcaggcacaggggagctgctctgggacgtccacagccacgtggtcagagagaccacacagaggacctacacataccaggccatcgacacgcacaccgcacggcccccatccatgcaggtaaccatcgaggatgtgcaggcacagacaggcggaacggcccaattcgaggctatcattgagggcgacccacagccctcggtgacctggtacaaggacagcgtccagctggtggacagcacccggcttagccagcagcaagaaggcaccacatactccctggtgctgaggcatgtggcctcgaaggatgccggcgtttacacctgcctggcccaaaacactggtggccaggtgctctgcaaggcagagctgctggtgcttgggggggacaatgagccggactcagagaagcaaagccaccggaggaagctgcactccttctatgaggtcaaggaggagattggaaggggcgtgtttggcttcgtaaaaagagtgcagcacaaaggaaacaagatcttgtgcgctgccaagttcatccccctacggagcagaactcgggcccaggcatacagggagcgagacatcctggccgcgctgagccacccgctggtcacggggctgctggaccagtttgagacccgcaagaccctcatcctcatcctggagctgtgctcatccgaggagctgctggaccgcctgtacaggaagggcgtggtgacggaggccgaggtcaaggtctacatccagcagctggtggaggggctgcactacctgcacagccatggcgttctccacctggacataaagccctctaacatcctgatggtgcatcctgcccgggaagacattaaaatctgcgactttggctttgcccagaacatcaccccagcagagctgcagttcagccagtacggctcccctgagttcgtctcccccgagatcatccagcagaaccctgtgagcgaagcctccgacatttgggccatgggtgtcatctcctacctcagcctgacctgctcatccccatttgccggcgagagtgaccgtgccaccctcctgaacgtcctggaggggcgcgtgtcatggagcagccccatggctgcccacctcagcgaagacgccaaagacttcatcaaggctacgctgcagagagcccctcaggcccggcctagtgcggcccagtgcctctcccacccctggttcctgaaatccatgcctgcggaggaggcccacttcatcaacaccaagcagctcaagttcctcctggcccgaagtcgctggcagcgttccctgatgagctacaagtccatcctggtgatgcgctccatccctgagctgctgcggggcccacccgacagcccctccctcggcgtagcccggcacctctgcagggacactggtggctcctccagttcctcctcctcctctgacaacgagctcgccccatttgcccgggctaagtcactgccaccctccccggtgacacactcaccactgctgcacccccggggcttcctgcggccctcggccagcctgcctgaggaagccgaggccagtgagcgctccaccgaggccccagctccgcctgcatctcccgagggtgccgggccaccggccgcccagggctgcgtgccccggcacagcgtcatccgcagcctgttctaccaccaggcgggtgagagccctgagcacggggccctggccccggggagcaggcggcacccggcccggcggcggcacctgctgaagggcgggtacattgcgggggcgctgccaggcctgcgcgagccactgatggagcaccgcgtgctggaggaggaggccgccagggaggagcaggccaccctcctggccaaagccccctcattcgagactgccctccggctgcctgcctctggcacccacttggcccctggccacagccactccctggaacatgactctccgagcaccccccgcccctcctcggaggcctgcggtgaggcacagcgactgccttcagccccctccgggggggcccctatcagggacatggggcaccctcagggctccaagcagcttccatccactggtggccacccaggcactgctcagccagagaggccatccccggacagcccttgggggcagccagcccctttctgccaccccaagcagggttctgccccccaggagggctgcagcccccacccagcagttgccccatgccctcctggctccttccctccaggatcttgcaaagaggcccccttagtaccctcaagccccttcttgggacagccccaggcaccccctgcccctgccaaagcaagccccccattggactctaagatggggcctggagacatctctcttcctgggaggccaaaacccggcccctgcagttccccagggtcagcctcccaggcgagctcttcccaagtgagctccctcagggtgggctcctcccaggtgggcacagagcctggcccctccctggatgcggagggctggacccaggaggctgaggatctgtccgactccacacccaccttgcagcggcctcaggaacaggcgaccatgcgcaagttctccctgggtggtcgcgggggctacgcaggcgtggctggctatggcacctttgcctttggtggagatgcagggggcatgctggggcaggggcccatgtgggccaggatagcctgggctgtgtcccagtcagaggaggaggagcaggaggaggccagggctgagtcccagtcggaggagcagcaggaggccagggctgagagcccactgccccaggtcagtgcaaggcctgtgcctgaggtcggcagggctcccaccaggagctctccagagcccaccccatgggaggacatcgggcaggtctccctggtgcagatccgggacctgtcaggtgatgcggaggcggccgacacaatatccctggacatttccgaggtggaccccgcctacctcaacctctcagacctgtacgatatcaagtacctcccattcgagtttatgatcttcaggaaagtccccaagtccgctcagccagagccgccctcccccatggctgaggaggagctggccgagttcccggagcccacgtggccctggccaggtgaactgggcccccacgcaggcctggagatcacagaggagtcagaggatgtggacgcgctgctggcagaggctgccgtgggcaggaagcgcaagtggtcctcgccgtcacgcagcctcttccacttccctgggaggcacctgccgctggatgagcctgcagagctggggctgcgtgagagagtgaaggcctccgtggagcacatctcccggatcctgaagggcaggccggaaggtctggagaaggaggggccccccaggaagaagccaggccttgcttccttccggctctcaggtctgaagagctgggaccgagcgccgacattcctaagggagctctcagatgagactgtggtcctgggccagtcagtgacactggcctgccaggtgtcagcccagccagctgcccaggccacctggagcaaagacggagcccccctggagagcagcagccgtgtcctcatctctgccaccctcaagaacttccagcttctgaccatcctggtggtggtggctgaggacctgggtgtgtacacctgcagcgtgagcaatgcgctggggacagtgaccaccacgggcgtcctccggaaggcagagcgcccctcatcttcgccatgcccggatatcggggaggtgtacgcggatggggtgctgctggtctggaagcccgtggaatcctacggccctgtgacctacattgtgcagtgcagcctagaaggcggcagctggaccacactggcctccgacatctttgactgctgctacctgaccagcaagctctcccggggtggcacctacaccttccgcacggcatgtgtcagcaaggcaggaatgggtccctacagcagcccctcggagcaagtcctcctgggagggcccagccacctggcctctgaggaggagagccaggggcggtcagcccaacccctgcccagcacaaagaccttcgcattccagacacagatccagaggggccgcttcagcgtggtgcggcaatgctgggagaaggccagcgggcgggcgctggccgccaagatcatcccctaccaccccaaggacaagacagcagtgctgcgcgaatacgaggccctcaagggcctgcgccacccgcacctggcccagctgcacgcagcctacctcagcccccggcacctggtgctcatcttggagctgtgctctgggcccgagctgctcccctgcctggccgagagggcctcctactcagaatccgaggtgaaggactacctgtggcagatgttgagtgccacccagtacctgcacaaccagcacatcctgcacctggacctgaggtccgagaacatgatcatcaccgaatacaacctgctcaaggtcgtggacctgggcaatgcacagagcctcagccaggagaaggtgctgccctcagacaagttcaaggactacctagagaccatggagctcctggagggccagggggctgttccacagacagacatctgggccatcggtgtgacagccttcatcatgctgagcgccgagtacccggtgagcagcgagggtgcacgcgacctgcagagaggactgcgcaaggggctggtccggctgagccgctgctacgcggggctgtccgggggcgccgtggccttcctgcgcagcactctgtgcgcccagccctggggccggccctgcgcgtccagctgcctgcagtgcccgtggctaacagaggagggcccggcctgttcgcggcccgcgcccgtgaccttccctaccgcgcggctgcgcgtcttcgtgcgcaatcgcgagaagagacgcgcgctgctgtacaagaggcacaacctggcccaggtgcgctgagggtcgccccggccacacccttggtctccccgctgggggtcgctgcagacgcgccaataaaaacgcacagccgggcgag

SEQ ID NO: 3316 - DNA, 2421 bp, Homo sapiens
  source 1..2421: mol_type = genomic DNA
actagccggttactagctgcgcttttgttccacttgagcgggcactcttctgcggcaagcaggtctaggaattcgcctggttcccacctcgcgtcccttgccttccttcctagtctacccactgtagtgccccctgcgtcccgctccctcctagccgactcagagcacaagaaggattgccacggtttccattgcagcagccgtggcgcctctgaccctttttttatatcgcggcgacggcgggctgtcgtcacgacgacgtgcggacgcagcggcgggggcctttcagcttatgtggagaagtcgctgtgaagccacctataaatccatttactgaatttatggagaaggctgtaaatgatggaagtcattcagaagaactcttttgccatcttaaaactatatcagagaaagaagatttaccacggtgtaccagtgaaagtcatctcagctgcctgaagcaggacattctaaatgaaaagactgaattggaagcaacacttaaggaagcggagttggtaactcattctgtagaattgcttttgccactatttaaggacaccattgaaaagattaattttgaaaatgcgaatctttctgcattgaatttgaagatttctgaacagaaggaaatattaataaaagaattagacaccttcaaaagtgtaaaactagctttagaacatcttcttagaaagagagactacaaacaaacaggagacaatttatccagcatgttgctagaaaatctaactgataatgaaagtgaaaatactaatcttaagaagaaggtatttgaaaaggaggcccatatccaagaactttcttgtttgtttcagagtgaaaaggcaaatactttgaaagcaaaccgtttttcccaatcagtaaaagtagtacatgaacgactacagatccaaattcataaaagggaagccgagaacgataagttgaaagaatatgtaaagagcttagaaaccaagatagccaagtggaacctgcaatcaagaatgaataagaatgaggctatagtgatgaaagaagcaagtaggcaaaaaactgtagctttaaaaaaggcatctaaagtttacaaacaaaggcttgaccattttacaggagctattgaaaagcttacttcccaaattagagatcaggaagccaagttgtctgaaacaatttcagcttccaatgcctggaaaagtcattatgagaaaattgtgatagaaaaaaccgaattggaagtacagattgaaacaatgaaaaagcaaatcattaatcttttggaagatctgaagaaaatggaagaccatggaaaaaattcatgtgaagaaattcttagaaaagttcactcaattgaatatgaaaatgaaactctgaatcttgagaatacaaaattaaagactacacttgctgctttgaaggatgaagttgtatctgttgaaaatgaactctcagaattgcaagaagtagaaaaaaaacagaaaacccttattgaaatgtataaaactcaggtacaaaagttgcaagaagcagctgaaatagtaaaaagcagatgtgaaaatttgctacataaaaataaccaaataacaaaaaccaaaaataaaaatgtagagaagatgagaggccagatggagtctcatctgaaggagttagagcgtgtctgcgattccttgacggcggcggaacggaggcttcacgagtgtcaggttgatggaaatcacaatcttctgacaaagctttctctggaagaggaaaactgtcttattcagctgaagtgtgaaaaccttcaacaaaaattagaacagatggacgcagaaaataaagagcttgagaagaagctggcaaaccaagaagaatgtcttaagcacagcaatcttaagtttaaagagaaatctgcagagtatacagcattggccagacaactggaagctgctttagaagaaggaagacaaaaggttgctgaagaaatagagaaaatgtcatctagagagagtgctttacaaattaaaatattagatctggaaactgagcttagaaagaaaaatgaagaacaaaatcaacttgtttgcaaaatgaacagtacaaatggctaactacaataaccagtgtagagaagtccttaaatgacctgacggagctgaaaaccatggtatgagaactacatgacaaatgcacaagcttcagtagccgattcattcaactggaagaaaggatatcagtgactgaagatcaaatgaatgaaatgaacaatcctcccctcatccatggtttcattttctatggttccagttactcatggtcaaccatggtcagaaaacaggacaaactgagagtaaaagatgcaggaataaaacacagaaatcaaaataaagggtttactgctgaaaaatccgcttgaacaagcctgttaatgtgatcttcctg

SEQ ID NO: 3317 - DNA, 1134 bp, Homo sapiens
  source 1..1134: mol_type = genomic DNA
gggagaggcgggctcgggcccagcgccgcccgcgcgaagctccctggtgttgtgcgcccttccccgcgcgcggcccctcctgctgggctggggtctgtggctgacgtccgcttttcccggaacggcaaagagaagtcattcagaattcaaaagaagttctaagtttattgcaagaaaaaaaccctgccttcaagccggttcttgcaattatccaggcaggtgacgacaacttgatgcaggaaatcaaccagaatttggctgaggaggctggtctgaacatcactcacatttgcctccctccagatagcagtgaagccgagattatagatgaaatcttaaagatcaatgaagataccagagtacatggccttgcccttcagatctctgagaacttgtttagcaacaaagtcctcaatgccttgaaaccagaaaaagatgtggatggagtaacagacataaacctggggaagctggtgcgaggggatgcccatgaatgttttgtttcacctgttgccaaagctgtaattgaacttcttgaaaaatcagcttcacgaggctgacattgtggtcctaggctcacctaagccagaagagattccccttacttggatacaaccaggaactactgttctcaactgctcccatgacttcctgtcagggaaggttgggtgtggctctccaagaatacattttggtggactcattgaggaagatgatgtgattctccttgctgcagctctgcgaattcagaacatggtcagtagtggaaggagatggcttcgtgaacagcagcacaggcggtggagacttcactgcttgaaacttcagcctctctcccctgtgccaagtgacattgagatttcaagaggacaaactccaaaagctgtggatgtccttgccaaggagattggattgcttgcagatgaaattgaaatctatggcaaaagcaaagccaaagtacgtttgtccgtgctagaaaggttaaaggatcaagcagatggaaaatacgtcttagttgctgggatcacacccacccctcttggagaagggaagagcacagtcaccatcgggcttgtgcaggctctgaccgcacacctgaatgtcaactcctttgcctgcttgaggcagccttcc

SEQ ID NO: 3318 - DNA, 2796 bp, Homo sapiens
  source 1..2796: mol_type = genomic DNA
cgctttggggttctgtgtgcagcgagcatggtgtccttggcaccagggtttcggcagaggagcctagcgtgggcctacttggactcctccgcgtggggcagctcgggacacccgggcctgcaggagagcggggttctaggctggccccggctctgcagtgcagccgggtgcctgccactcgcggggctctgtcgcagtactcgtgcctggcgcctcccctcagccacagagaccgcagtagctccaaccatcgcacccctaactgggccacgagttctctgattgccagacctgttgtctttgccactcactgttctgagtaattggagagtcgtgtattcactacacgccaaccagagtggtcctgtaaaagcgtaagcctagtgtagatacgcttctgcttaaaactcttgagtggctcccagtgcttttagaacaaaatccaaacgcctttccgaagtcgacaaggcccagcttgattgagcagaagatgtgataggagatgaggagcggggggcttctgcaaaagtgcttcggtcgctcaggcttttggcacattttgcttatgcaacctagttctttctaccttagggccttttcttgggaaagttgggagtctcactctgctgcctaggctgagtgcagtggtgtgatcgaggcgcactgcagccttgacctcctgggctcaagcgatcctcacctcggcctaccgagtagctgggactacaggcacgcgccactacactcggatttctgacagtcagacttgtccacaagaactcaactggcaaggctgcttttctgtgctaaaactggggagctagtgggcaccatgaagatcttctgcagtcgggccaatccgaccacggggtctgtggagtggctggaggaggatgaacactatgattaccaccaggagattgcaaggtcatcttatgcagatatgctacatgacaaagacagagttttcaagcctatggctgatgctgctgtgaagattgtggagaaaaatggctttagtgataagattaaggttatcaacaagcattccaccgaggtgactgtaggtccagagggtgacatgccatgccgtgccaacatcctggtcacagagttgtttgacacagagctgatcggggagggggcgctgccctcctatgagcacgcacacaggcatctcgtggaggaaaattgtgaggccgtgccccacagagccaccgtctatgcacagctggtggagtccgggaggatgtggtcgtggaacaagctatttcccatccacgtgcagaccagcctcggagagcaggtcatcgtccctcccgttgacgtggagagctgccctggcgcaccctctgtctgtgacattcagctgaaccaggtgtcaccagccgactttacagtcctcagcgatgtgctgcccatgttcagcatagacttcagcaagcaagtcagtagctcagcagcctgccatagcaggcggtttgaacctctgacatctggccgagctcaggtggttctctcgtggtgggacattgaaatggaccctgaggggaagatcaagtgcaccatggcccccttctgggcacactcagacccagaggagatgcagtggcgggaccactggatgcagtgtgtgtacttcctgccacaagaggagcctgtggtgcagggctcagcgctctatctggtagcccaccacgatgactactgcgtatggtacagcctgcagaggaccagccctgaaaagaatgagagagtccgccagatgcgccccgtgtgtgactgccaggctcacctgctctggaaccggcctcggtttggagagatcaatgaccaggacagaactgatcgatacgtccaggctctgaggaccgtgctgaagccagacagcgtgtgcctgtgtgtcagcgatggcagcctgctctccgtgctggcccatcacctgggggtggagcaggtgtttacagtcgagagttcagcagcttctcacaaactgttgagaaaaatcttcaaggctaaccacttggaagataaaattaacatcatagagaaacggccggaattattaacaaatgaggacctacagggcagaaaggtctctctcctcctgggcgagccgttcttcactaccagcctgctgccgtggcacaacctctacttctggtacgtgcggaccgctgtggaccagcacctggggccaggtgccatggtgatgccccaggcagcctcgctgcacgctgtggttgtggagttcagggacctgtggcggatccggagcccctgtggtgactgcgaaggcttcgacgtgcacatcatggacgacatgattaagcgtgccctggacttcagggagagcagggaagctgagccccacccgctgtgggagtacccatgccgcagcctctccgagccctggcagatcctgacctttgacttccagcagccggtgcccctgcagcccctgtgtgccgagggcaccgtggagctcagaaggcccgggcagagccacgcagcggtgctatggatggagtaccacctgaccccggagtgcacgctcagcactggcctcctggagcctgcagaccccgaggggggctgctgctggaacccccactgcaagcaggccgtctacttcttcagccctgccccagatcccagagcactgctgggtggcccacggactgtcagctatgcagtggagtttcaccccgacacaggcgacatcatcatggagttcaggcatgcagataccccagactgaccactcttgagcaataaagtggcctgagggctggg

SEQ ID NO: 3319 - DNA, 602 bp, Homo sapiens
  source 1..602: mol_type = genomic DNA
gttaaaaggggactgacaggatgaaggcagtacagaatgctgggctgagagcaggactgagatcctagaggcagaatcccagtctacccgtactctctgggaggaagtgatgagaacttgcagcagggtggtggtagtgaaagagaagaatgaaagacaaggaagcatcagtggaacttgatgtgtggctggataccagaaatgcagaggaagttagtcaaaggttcccgtcctgatgactggagatcatggtatcactgactgagctctaggggttgtgaaatagagctcattaggcagaggatggttgtcaagttattaagcaacaaaagatcacaagcagttggaatactaatgtctagccttcatttagatatgaaagacatacaacatgctgttgtgaacttggataattctgtggttgacctggagacccttcaagctctctatgagaatagagcacagtcagacgaactcgaaaaaatagaaaagcatggccgatcttccaaagacaaggaaaatgccaagtctctggacaaacctgaacagttcctttatgaactgtcactaatccccaacttttcagagcgagtcttttgcat

SEQ ID NO: 3320 - DNA, 609 bp, Homo sapiens
  source 1..609: mol_type = genomic DNA
aagcggttcccgagcccaggcccgcgccgagcccagcaggcacccacccacggcccttcctggtatctggaccagaccaggtcctagagcagctccagcaggatggcggctccagcgtctctaaggcctgcagggggtccagccccatggggggcgccctaggcctccgacagctccccatctgtgctcctgcctgccggccatcctcaggccactcgccatgggcggctgcttctccaaacccaaaccagtggagctcaagatcgaggtggtgctgcctgagaaggagcgaggcaaggaggagctgtcggccagtgggaagggcagcccccgggcctaccagggcaatggcacggcccgccacttccacacggaggagcgcctgtccacccctcacccctaccccagccctcaggattgcgtggaggctgctgtctgccacgtcaaggacctcgagaatggccagatgcgggaagtggagctgggctgggggaaggtgttgctggtgaaggacaatggggagttccacgccctgggccataagtgtccgcactacggcgcacccctggtgaaaggcgttctgtcccgtggtcgggtgcgctgcccctg

SEQ ID NO: 3321 - DNA, 797 bp, Homo sapiens
  source 1..797: mol_type = genomic DNA
aaactttgagcggaccgggacagaaaaaaaaatctctctttgtcttgagggggctgttgagtggtcgcggacctgggctctgtgcgttgggaaagggaagtggaggtgagcctcgggcttcccgccctgtagctgggcccgccccagttgcagcgctcagccccaccccggctgggccaccgccctgcacagtctcagggatgagcagccgcccaagctgcagggcctcgggtcttcggcgcctctgaccctcgcaggttgctgcctttcggtgcagaaccgtatgtatgtcacacattggatgtgagacctgagaaaccgtgttttaacaggtctctgaaagaagatgaatttggctgagatttgtgataatgcaaagaaaggaagagaatatgcccttcttggaaattacgactcatcaatggtatattaccagggggtgatgcagcagattcagagacattgccagtcagtcagagatccagctatcaaaggcaaatggcaacaggttcggcaggaattattggaggaatatgaacaagttaaaagtattgtcagcactttagaaagttttaaaattgacaagcctccagatttccctgtgtcctgtcaagatgaaccatttagagatcctgctgtttggccaccccctgttcctgcagaacacagagctccacctcagatcaggcgtcccaatcgagaagtaagacctctgaggaaagaaatggcaggagtaggagcccggggacctgtaggccgagcacatcctatatcaaagagtgaaaagccttctacaa

SEQ ID NO: 3322 - DNA, 748 bp, Homo sapiens
  source 1..748: mol_type = genomic DNA
ggggctgcttctgaggaatcagcttgactggaagggtccccattccttctttccgatccgcgattaccctggactcgaagtcagcagacccggttctaggccagctctgcctctcaccctctgtgaccttgggcaaatcatacaactctgggactcagtttcttcctctctaaaacggagatgactgttgctccatcagtctcagccagcaagttcagctccggcaagtcatttgattcacccggtgatgaaatgggggtcaaccagtctgtgggctttccacctgtcacaggaccccacctcgtaggctgtggggatgtgatggagggtcagaatctccaggggagcttctttcgactcttctacccctgccaaaaggcagaggagaccatggagcagcccctgtggattccccgctatgagtactgcactggcctggccgagtacctgcagtttaataagcgctgcgggggcttgctgttcaacctggcggtgggatcttgtcgcctgcctgttagctggaatggcccctttaagacaaaggactctggataccccttgatcatcttctcccatggcctaggagccttcaggactttgtattcagccttctgcatggagctggcctcacgtggctttgtggttgctgtgccagagcacagggaccggtcagcggcaaccacctatttctgcaagcaggccccagaagagaaccagcccaccaatgaatcgctgcaggaggaatgga

SEQ ID NO: 3323 - DNA, 2880 bp, Homo sapiens
  source 1..2880: mol_type = genomic DNA
agcatttagttgggatagcttcactagagctgcctgccaaagacttccttccacaggatcttgtcgcaccagcaactgacaggagcttgggagctcgggagcttgggagagggcttatgtttttaataatgtagctgtcagttcgaagcctggaaatgttgaccctcaaaggtttattgccaaaattagataccatatttatgctgaattattaccttttcaatagttttttttgaccttgcagactactgtattctttatacctagggaagcatgtctatgtttggaacctgcaaataatttttcagtcatcttagagatgctgcagaacatcaatgccacatcttgagtcagaagtcgagggtcatttgttcaaaagttggagaaatatcctcttttgttgcttcttctactctgtagtggagaatggggaactggtagttgtgtgggagttatgtgtctctaagatttgtcgacccattttgatggcaaggtgtattcacaagtgtgtgtaaagggggtgtggatgggacaactgcatctgcctcttgtgcatgccttgggtacttgatttcatcttgttttttcccccttttgtataaaattctcaaaattgctcatttggatttgaatatgaaaggagaaatgaaatctctaaagaatgatagtaaataccttgcactgactttattttctgatatcttaaccttctagggcataaaatcttgttattttaatttgcatctgggagaatgtctgagcaaggagacctgaatcaggcaatagcagaggaaggagggactgagcaggagacggccactccagagaacggcattgttaaatcagaaagtctggatgaagaggagaaactggaactgcagaggcggctggaggctcagaatcaagaaagaagaaaatccaagtcaggagcaggaaaaggtaaactgactcgcagccttgctgtctgtgaggaatcttctgccagaccaggaggtgaaagtcttcaggatcagactctctgaaaactgcaaatggaaaggaattcaaaagaatttagattaaaagttaaataaaaagtaggcacagtagtgctgaattttcctcaaaggctctcttttgataaggctgaaccaaatataatcccaagtatcctctctccttccttgttggagatgtcttacctctcagctccccaaaatgcacttgcctataagaaacacaattgctggttcatatgaaacttaggaaatagtgaataaggtgcatttaactttggagaaatacttttatggctttggtggagatttctcaatactgcaaaagttgtccagaaatgaatctgagctgatggtgactttaagttaatattattaatatatcactgcatatttttacccttatttttgctccttacagcaagattagtaggttataaaaatttaaatttaaacaaaattatttcatgacaaaatgggaaacttcacatcatacttatttttgtttgcctttcaggcatcatattagcttttataaaaaatggtcttgctgctgaaattgtacttattttatcagaggctgggtgcagtcaagacaaaagtaaaatggtttacctgagcccaggggagggaaaattgattaagatatcattatttttgtttggtttggttttgcttttttcctcttactttaattgaaatactctgaattcccctcatggaaacagagagcattgagagcactttctttaaaaggaccaaaaataaattcctaatagattttgtcctaagagagtgtttttttttctagcatcattttctttacatgccactcatgtcataaggcatggacaggctatctttcagtggccattactatgtttcgtacacatgctttattttacttgggctctgagaaatgtgtggctttccttcagcattttatttgtgcttctctttttaatggagattgaaaagggagaataatgtgaatatcacggcttatattattaaatgttgattgatggcttgtaatgtactgcacacaatatatgttaactctgcagaatgacagaccctgggagaagtaatgccccagttgtcccccactcctaatgccaggcagagaaggacagcctttatagacttaatctgctttttgtcccatttgacaaggtaccaggaggaaattttttaagggatcaactgtatcacagtgcccactctggacctaagtctagtgtatccatacaattggtgcagagaaataaggtgtaaatggtgctttgttcctgctggttccaagctcagaaaccaagactagctttgtaggagagaatgagagcctgcaagcctctctttggattggctgaggagtggtgggagcagggggttgatagaaaacatccagacacacatataagcaagtggccgtgctacctttttagagaataaagaaacagacttttgagtttatatgcaatgccttcattaggtaccaccggcacttacaaaatgtgcggactgaatcccagagaacactggcagatgtatacagtatatggattgtatcgcttccccaatgtttgtaaattcacagtatttggaaaactgccttcattttccagtgtgggaaaaactcttgctacctgtattacttgatctcagacccatacctgatggttcagtctgtccttaagttaaaagaattttgcttttctaatgttatactatttacctgtcagtgtattactgcaacttgaatcactcttttactgttgttggatataaacttatcctgtaccaatgtatttattaacacttgtattttattattgagcatatcaataaaaatattaaaaaataacagattgttttttaccaa

SEQ ID NO: 3324 - DNA, 9438 bp, Homo sapiens
  source 1..9438: mol_type = genomic DNA
cagcgcgcgctcctgcagccccggcggagtcccggcggggagcgcccgcgtaggcaggcacccggggcagccctccgtcctcgccgcgcggcctgagaacccctgggccctgggcgagggggctgggctgtgcagcccccgaggctaactgggcgggatcgcagctgcaggggttgtgcgagcagccacggcggcacctgtgccctgcgggcacccaccctgcccctgccgaggcaggcgcccaccgccggcggtgatgcggctgtgaagccctagtcgattaacgtgacagtgtcaggtggacccacagccatcccacctccccctctggggagtgctgagagtgaggcagcatggaggagaggaagcatgagaccatgaacccagctcatgtcctctttgaccggtttgtccaggccaccacctgcaagggaaccctcaaggctttccaggagctctgtgaccacctggaactaaagccaaaggactaccgctccttctatcacaagctcaagtccaagcttaactactggaaagccaaagccctctgggcaaaattggacaaacggggcagtcacaaagactacaaaaagggaaaagcgtgcactaacaccaagtgtctcatcattggggctggcccctgtggtctccgtacagccatcgacttatccttactgggggccaaggtggttgttattgagaaacgagatgccttctcccgcaacaacgtcttgcatctctggccattcaccatacatgatctacgaggtctgggtgccaagaagttctatggcaagttctgtgctggagccatcgaccatatcagtatccgtcagctccaactaatacttttgaaagtagccttgatcctaggcattgaaatccacgtcaatgtggaattccaaggacttatacagcctcctgaggaccaagagaatgaacggataggctggcgggcactggtgcaccccaagactcatcctgtgtcagagtatgaatttgaagtgatcatcggtggggatggtcggaggaacaccttggaagggtttcgtcggaaagaattccgtggcaaactggccatcgccatcacggcaaattttatcaaccgaaatacaacagcagaagctaaagtggaagagatcagtggtgtggcttttatattcaaccaaaaatttttccaggaactgagggaagccacaggtattgacttggagaacatcgtttactacaaagatgacacacactatttcgttatgacagccaaaaagcagagtttgctggacaaaggagtgatactacatgactacgccgacacagagctcctgctttcccgagaaaacgtggaccaggaggctctgctcagctatgccagggaggcggcagacttctctacccagcagcagctgccgtctctggattttgccatcaatcactatgggcagcccgatgtggccatgtttgacttcacttgtatgtatgcctccgagaacgccgccttggtgcgggagcagaacggacaccagttactagtggctctggtcggggacagcctcctagagcctttctggccaatgggaacaggaatagcccggggctttctagctgctatggactctgcctggatggtccgaagttggtctctaggaacgagccctttggaagtgctggcagagagggaaagtatttacaggttgctgcctcagaccacccctgagaatgtgagtaagaacttcagccagtacagtatcgaccctgtcactcggtatcccaatatcaacgtcaacttcctccggccaagccaggtgcgccatttatatgatactggcgaaacaaaagatattcacctggaaatggagagcctggtgaattcccgaaccacccccaaattgactcgcaatgagtctgtagctcgttcaagcaaactgctgggttggtgccagaggcagacagatggctatgcaggggtaaacgtgacagatctcaccatgtcctggaaaagtggcttggccctttgtgcaattatccatagataccgccctgacctgatagattttgattctttggatgagcaaaatgtggagaagaataaccaactggcctttgacattgctgagaaggaattgggcatttctcccatcatgacaggcaaagaaatggcctccgtgggggagcctgataagctgtccatggtgatgtacctgactcagttctacgagatgtttaaggactccctcccctctagcgacaccttggacctaaatgccgaggagaaagcagtcctgatagccagcaccagatcccctatctccttcctaagcaaacttggccagaccatctctcggaagcgttctcccaaggataaaaaggaaaaggacttggatggtgctgggaagaggagaaagaccagtcaatcagaggaggaggaagctcctcggggccacagaggagaaagaccgaccctggtgagcactctgacagacaggaggatggacgttgccgttgggaaccagaacaaagtgaagtacatggcgacccagctgctggccaaatttgaagagaatgcgcccgcacagtccatcggcatacggagacagggctccatgaagaaggagttcccgcagaacctgggaggcagcgacacatgctacttctgccagaagcgggtctacgtgatggagaggctgagtgccgagggcaagttcttccaccggagctgcttcaagtgcgagtactgcgccaccaccctgcgcctctcggcctacgcctacgacatcgaggatggtaaattctactgtaagccacactactgctatcgactctctggctacgcacaaaggaagagaccggcagtggctcccctgtctggaaaggaggccaaaggacccctgcaggatggcgccaccacagatgcaaacggacgggccaacgccgtggccagctccactgagagaaccccaggttcaggcgtgaacggcctggaggagcccagcatcgccaagcgactgaggggcaccccagagcggatcgagctggagaactaccgcctgtccctgaggcaggctgaggcactgcaggaggtaccggaggagactcaggccgagcacaacctgagcagcgtgctggacacgggcgccgaggaggacgtcgccagcagtagttccgagtctgagatggaggaggagggagaggaggaggaggaggagcctcgcctgcccccatctgacctgggtggtgttccgtggaaggaggccgtgcggatccatgcccttctgaaagggaaaagtgaagaggagctagaggcctcaaagagctttgggcctgggaatgaagaggaggaggaggaggaggaagaatatgaagaggaggaggaggaggactatgacgaggaggaggaagagtccagtgaagccgggaaccagaggctccagcaggtcatgcacgcggcggatcctctggagatccaggctgacgtgcactggactcatatccgtgagagagaggaggaagagaggatggcgccggcctctgagtcctctgcttccggagccccattggatgagaatgacctagaggaagatgtggactcagaaccagccgagatagaaggggaggcagcagaggatggggacccaggggacactggtgctgagctggatgatgatcagcactggtctgacagcccgtcggatgctgacagagagctgcgtttgccgtgcccagctgagggggaagcagagctggagctgagggtgtcggaagatgaggagaagctgcccgcctcaccgaagcaccaagagagaggtccctcccaagccaccagccccatccggtctccccaggaatcagctcttctgttcattccagtccacagcccctcaacagaggggccccaactcccacctgtccctgccgccacccaggagaaatcacctgaggagcgccttttccctgagcctttgctccccaaagagaagcccaaagctgatgccccctcggatctgaaagctgtgcactctcccatccgatcacagccagtgaccctgccagaagctaggactcctgtctcaccagggagcccgcagccccagccacccgtggcggcctccacgcccccacccagcccactccccatctgctcccagccccagccttccaccgaggccactgtcccatcccctacccagtcccccatacgcttccagcctgccccggccaaaacatccaccccactggcccctctccctgtccaaagccaaagtgacaccaaggacagactgggcagcccccttgctgtggatgaggccctcagacggagcgacctggtggaggagttctggatgaagagtgcggagatccgccgcagcctcgggctcacacctgtggaccgcagcaaggggcccgagcccagcttccccacgcctgccttcaggccagtgtccctcaaatcctattccgttgaaaagtccccccaggatgagggactccaccttctcaagcctctgtccatccccaaaaggctgggcctgccaaagccggaaggcgagccgttgtccctgccaaccccccggtccccgtccgacagagagctacgcagcgcccaggaggagcgcagggagctgtccagcagctctggcctgggcctgcacgggagctcctccaacatgaagacactgggcagccagagcttcaacacctcggactccgccatgctcacgcccccctccagcccgcccccaccgccacccccgggcgaggagcccgccaccttgcggaggaagctcagggaggccgagcccaatgcctcggtggtcccgccgcccttgcccgccacctggatgcggcccccccgggagcctgctcagccccccagagaggaggtgcggaagtcgtttgtggagagcgtggaggagattccctttgctgatgatgtggaggacacctatgacgacaagactgaggactcaagcctgcaggagaaattcttcacgcccccgtcctgctggccgcgccccgagaagcctcgccacccgcccctggccaaggagaacgggaggctgcctgctctggaggggacgctgcagccacagaagagggggctgcccttggtgtccgcggaagccaaggagttggccgaggagcgcatgcgagccagggagaagtccgtgaagagccaggcgctgcgggacgccatggccaggcagctgagcaggatgcagcagatggagctggcctcaggcgcccccaggccccgcaaggcgtcctcagcaccctcccagggcaaggagcgccggcctgactcccccacacgccccactctcaggggctccgaggagcccaccctgaagcatgaagccaccagcgaggaggtcctctccccgccgtcggactcagggggcccagatggctctttcacttcatccgagggctccagtgggaagagcaagaagaggtcgtcactcttctccccccgcagaaacaagaaggagaagaagtccaaaggcgagggccggcccccggagaagcccagctccaacctcctagaagaagccgccgccaaacccaagtccctgtggaagtccgtcttctccgggtacaagaaggacaagaagaagaaggccgacgacaagtcctgccccagcaccccctccagcggggccacggtggactctggaaagcacagggtgcttcccgtcgtaagggcagagctgcagctccggcgccagctgagcttctccgaggactcagacctctccagcgacgatgtccttgagaagtcctcacagaagtcccggcgagagccaagaacctacacggaggaggaactgaatgccaagctgacccggcgtgtgcaaaaggcagctcggagacaggccaagcaggaggagcttaagcggctgcatcgagcccagatcatccagcggcagctgcagcaggtggaggagaggcagcggcggctggaggaaaggggcgtggctgtggagaaggcgctccggggcgaagcaggcatgggcaagaaggacgaccccaagctgatgcaggagtggttcaagctagtgcaggagaagaacgccatggtgcgctacgagtcggagctgatgatctttgcccgggagctggagctggaagaccggcagagtcgactgcagcaggagctccgggaacgcatggcagtggaagatcaccttaagactgaggaggagctgtcagaagagaagcagattctcaatgagatgctggaggtggtggagcagagagactcactggtggcgctgctggaggagcagcggctccgggagagagaggaggacaaggacctggaggctgccatgctgtccaagggcttcagccttaactggtcctgagctcccacccaacgctccattttctgttggcatccgcctggccaggcagtggcatccaaaccacccggagccgcgatctgaggaggcctggcacctccttggagtttacgctcagatgcccgtgtgctgcttggaaagtggtcgagtcccgcgtgcagtggggagccccaggtgacagtggttatctgagacggctccacctcctgggaggaggcccacctggacctcccactcagaggagcagcacggcgtgtatggcatgacgcaggggaccaccccgcgcgctccctgaggatgtgctggctgtgccccttttttccactggcacatttggtaagagagggaagctgctccccgtcagaaccacagtgcgccgtgcgaggggcactgtcttcttcatgctccctggagcaccaccaaagaaacgtaaacaataccccacgaaagcagggtcaggggtcagggtgcgatcgagacccaggatgggggcgtccagtcatgcccaccccagcatcacaggagacatggaggtgcgggcaggctcctgaattattatgcaaattaggaggacgcaggaggggtctgccctccagccgaacaccacacactggaccctaagtggccaaatgcctgggccgcttgctggctgtggcctgaggcttgtgggttgctgcattttgcttgtagttcacaaccattttgacactggaaaatgctgactttgggggacaggatgaggccctacattctaagcccccagttggcagacaggcattgtccctgttccacatttatgtcgggacaggagatgaccttttcctccgtgtttttcctgtgtttgcacgttgaaatgaagctgacaacctggcaagacgctcagccgcttcaaaccctttttgtcaattaacttattttttaatacttgaaaagaagtaacttcgtttgtgtatctttactagaggaactgatcacctgcgcccgggtgcgggagccacagcggcatctggtgcgtcctacgcgacctggtccggggctgcccggtgctcctcacgtgcatctatttattagcctttctcttcgtatcactggcctggctggcatcagggagctgcccagaacccctgtgtgggtcctcctcacagctttctgtcccctcctccacccggtgcctgcctcaccctggcgctagaccatctggaccactcatgtgatgagggtgcatttccgttctgttttgggccaggccaacagcagagctgccactctcaccctcccagtgagaattccggctctgcagaactcgcccttgtctcagtttgggggccagggcatcaccttcctccgcacatatgttaaagaaggtttcaggatgggccctcatccacacaggccaagagggtgcaaggtgggaccctggaatcatgtggctggtgagaattccctcctcccagcctaagattcacccagacggaaacgcgagtgctgcagtggatgctgggatgcaggctggtgcctctcaagcagatcagcgactcccgcccttccttccgaaggcgacgggcacctgccttgtgccggatcttcatggggacataaagggcgagccccgaatcactagctcctatagccaaactgttcctttctcacggttccgcaccagcctggctgtgtacagctcatcaagccactgagctaatcggggtggggtgcttgtccatcaaagcagtcagcacatagcccagcgaggagccatccggaccagacccgcctgccaggggcgctccagccgcctgccgcctccgtgggctggggccagctgggagcagaggcctggcccctccaaggcgtcccgcagtggagcaggctgagtggctgtgctgaccttgggctttccatgggaaccacactgtgcttcaacttgaacattcatcccagctgcaaaggagcaaagaacctgtgtcatccttgtctgtccagaagctgccatctctctcccatgcacatccgggagataacgccgctagtggccgccacagcgctgattctccacctgttctcacgtgaggcaaaggtctccttttcttttctctttacttaaaaaaggggagaggagggtttctagattccatcttcaaaccccagtcgtcccataaaattggacgtgggaaaagaccttcactgcctgcgtggcctttcccagacctctcctcgaatgccacaaaaccggtccagccccggcagagccgccttcggcccttgtagctcctgctggccccacaacagggaaacagtttgcaaagtggcttggaaggagtgtggcctagggatctgctgtaagtggccagacgtagcaggagagcccagtgtcaccttctggtcctggtcagccttaacactgtggcatcctccacagcacacacggcagcctgcagtctggaaggtggacccgagcctttgcagagaggcgccgcagagccgcaggcctgcgccccagccttctgctcccgactgtgaggacacccagttctagtagagcactttttttaaagctcccattttgtaaccactagtttgcggttgacttgagtactctggtgacttcctgcgtcaagcgttctcaagctgtgagaatgtgcgcagctccaggcaggttttctctcggagagttaagtcttcccttgaaggcagggaagcaggatggatacacatatatcacacgcataaaacaccaggtgcgggagcagcccagactcaaggctgactaaactggaggctgaataccgtggaggtccacatgcagcttccctggagggcaggccggaggcgctcccgcccctgggcttgaggatgctgcaccccgtgggcttccaggcctgcccagatgatgccttcaggcctctgtccctggcggccatcctcaggccgattttgaccagcaatgatagactcttcttaaccctttcaaaataaatttttcagtgggacagaaaggagagttaaaaaacatttttttaaaggtggtaacatctgacccacaaagggaatgggtctgttttatgcaaaataaaagtttttc

SEQ ID NO: 3325 - DNA, 1040 bp, Homo sapiens
  source 1..1040: mol_type = genomic DNA
gtatgtggggccgtgtgcagacccgcgtgtggcgcaggcaaggaccctcaaaataaacagcctctaccttgcgagccgtcttccccaggcctgcgtccgagtctccgccgctgcgggcccgctccgacgcggaagatctgactgcagccatgagcagcaatgagtgcttcaagtgtggacgatctggccactgggcccgggaatgtcctactggtggaggccgtggtcgtggaatgagaagccgtggcagaggtggttttacctcggatagaggtttccagtttgtttcctcgtctcttccagacatttgttatcgctgtggtgagtctggtcatcttgccaaggattgtgatcttcaggaggatgttgaagcctgctataactgcggtagaggtggccacattgccaaggactgcaaggagcccaagagagagcgagagcaatgctgctacaactgtggcaaaccaggccatctggctcgtgactgcgaccatgcagatgagcagaaatgctattcttgtggagaattcggacacattcaaaaagactgcaccaaagtgaagtgctataggtgtggtgaaactggtcatgtagccatcaactgcagcaagacaagtgaagtcaactgttaccgctgtggcgagtcagggcaccttgcacgggaatgcacaattgaggctacagcctaattattttcctttgtcgcccctcctttttctgattgatggttgtattattttctctgaatcctcttcactggccaaaggttggcagatagaggcaactcccaggccagtgagctttacttgccgtgtaaaaggaggaaaggggtggaaaaaaaccgactttctgcatttaactacaaaaaaagtttatgtttagtttggtagaggtgttatgtataatgctttgttaaagaaccccctttccgtgccactggtgaatagggattgatgaatgggaagagttgagtcagaccagtaagcccgtcctgggttccttgaacatgttcccatgtaggaggtaaaaccaattctgga

SEQ ID NO: 3326 - DNA, 1833 bp, Homo sapiens
  source 1..1833: mol_type = genomic DNA
gcacgagcagttcccgtgggcagtgggctcaggggcctgcaacggaccctacctcttgtagtgattctcggggccacgggcaccggcaaatccacgctggcgttgcagctaggccagcggctcggcggtgagatcgtcagcgctgactccatgcagccccaggagatgggcactgagaaagtgattgaccgaaaagtggagcttgaaaaggaggatggtcttgtacttcacaaacgcctaagccaggtggacccagaaatggctgccaagctgcatccacatgacaaacgcaaagtggccaggagcttgcaagtttttgaagaaacaggaatctctcatagtgaatttctccatcgtcaacatacggaagaaggtggtggtccccttggaggtcctctgaagttctctaacccttgcatcctttggcttcatgctgaccaggcagatgagcgcttggataagagggtggatgacatgcttgctgctgggctcttggaggaactaagagattttcacagacgctataatcagaagaatgtttcggaaaatagccaggactatcaacatggtatcttccaatcaattggcttcaaggaatttcacgagtacctgatcactgagggaaaatgcacactggagactagtaaccagcttctaaagaaaggtattgaggctctgaaacaagtaactaagagatatgcccggaaacaaaaccgatgggttaaaaaccgttttttgagcagacctggtcccattgtcccccctgtctatggcttagaggtatctgatgtctcgaagtgggaagagtctgttcttgaacctgctcttgaaatcgtgcaaagtttcatccagggccacaagcctacagccactccaataaagatgccatacaatgaagctgagaacaagagaagttatcacctgtgtgacctctgtgatcgaatcatcattggggatcgcgaatgggcagcgcacataaaatccaaatcccacttgaaccaactgaagaaaagaagaagattggactcagatgctgtcaacaccatagaaagtcagagtgtttccccagaccataacaaagaacctaaagagaagggatccccagggcagaatgatcaagagctgaaatgcagcgtttaagagacatgtccagtggcctttggaaaggtggtggggatccagttcaggagggaggggtatgtttgtctcccagtctgggcaaaggagtgctatgcggaattctctgcatagcagaaaagctcccaccattttcttttgatgtggttttaaagtctcacgttctctataatagaaacagcaggtcttgtcagctccttgtgtggctgatgtgtctggaaatgatgtagttcaggaaagcattttttttttctttgaaccttaaaggttctattattaaaagcagcacagattccacatttttatacatgaggatcttctttgtggtgaataccaggattgactgcatccctttaaagaagttttatgtccctgactctggctaaaattatctaatttccagatgcttttgtagatgactgaagtatttgtgagccacatattgggagttctagatttgagtgaatggcaggaaagggccatctccattgagatgattaagtgaaccaaactagttctcagaattctacagagaaggagggaatcagactgaggaagctgtgacataggacttgaagaccaaagactttgaaatttgcgagctgctcatgtgtgagttattatcactgctgtctttctattgagttacaaatctatatttttattgaagtttaaataaagaaaaaatttacaaga

SEQ ID NO: 3327 - DNA, 1456 bp, Homo sapiens; identical to SEQ ID NO: 1946
  source 1..1456: mol_type = genomic DNA

SEQ ID NO: 3328 - DNA, 1014 bp, Homo sapiens
  source 1..1014: mol_type = genomic DNA
ctctgacacccctcattcaaaggcacctcccaccccgcacctcagccttggcggagaggactcacagcattggacacatttccaccatgctaatggcattttaaatatatttggcaattttcccaattttttactgaagaaaactgtaagtttatacttgaggactgaagtgtgactctgccgattatcaggctttcaagatgaatctggaaaaactcagcaagcctgaactcctgacactatttagtattcttgaaggagagcttgaagcaagggaccttgttatagaagccttaaaggcccaacacagagatactttcattgaagaacgctatggaaaatataacatcagtgatcctttaatggctctacagagagattttgaaacactgaaggagaaaaatgatggcgaaaagcagccagtctgcacaaatccactctctattcttaaggttgtgatgaagcagtgcaagaacatgcaggagcgcatgctgtcccagctggctgctgctgagagcaggcaccgaaaggtgatcctagaccttgaggaagaaaggcagcggcatgcacaggatacggctgaaggagatgatgtcacctacatgctagagaaggaaagagagaggctgactcaacagttggaatttgaaaaatcccaagtgaaaaagtttgaaaaagaacagaagaagctctctagtcagctggaagaggagcgctcccgccacaagcagctctcatccatgctagtgcttgagtgcaagaaagccaccaacaaggcagccgaggaaggacagaaggcaggagagctgagcctgaaattggagaaggagaagagccgggtgagtaaactggaagaagagttggcagctgagagaaagagaggcttgcagactgaggcccaggtagagaagcagttatcagagtttgacatcgaaagggaacaactgagagcaaaactgaaccgagaagagaaccggaccaaaaccctgaaagaagaaatggaaagtttaaaga

SEQ ID NO: 3329 - DNA, 3615 bp, Homo sapiens
  source 1..3615: mol_type = genomic DNA
gggagccgggaggcagcggaggagcgaccgccgccatattagggaccgcggagcccgggatcccgtcagcggcggccgcggccgggcctgcgggagctgcggaggccggaggcgggcgctgtgcggtgccaggagaggcggggtcggcgggagccagcgagccacgggagcgagccaggctaaccttgccgcgggccgagccctgcctcgccatggaccaggactatgagcggcgcctgcttcgccagatcgtcatccagaatgagaacacgatgccacgcgtcacagagatgcggcggaccctgacgcctgccagctccccagtgtcctcgcccagcaagcacggagaccgcttcatcccctccagagccggagccaactggagcgtgaacttccacaggattaacgagaatgagaagtctcccagtcagaaccggaaagccaaggacgccacctcagacaacggcaaagacggcctggcctactctgccctgctcaagaatgagctgctgggtgccggcatcgagaaggtgcaggacccgcagactgaggaccgcaggctgcagccctccacgcctgagaagaagggtctgttcacgtattcccttagcaccaagcgctccagccccgatgacggcaacgatgtgtctccctactccctgtctcccgtcagcaacaagagccagaagctgctccggtccccccggaaacccacccgcaagatctccaagatccccttcaaggtgctggacgcgcccgagctgcaggacgacttctacctcaatctggtggactggtcgtccctcaatgtgctcagcgtggggctaggcacctgcgtgtacctgtggagtgcctgtaccagccaggtgacgcggctctgtgacctctcagtggaaggggactcagtgacctccgtgggctggtctgagcgggggaacctggtggcggtgggcacacacaagggcttcgtgcagatctgggacgcagccgcagggaagaagctgtccatgttggagggccacacggcacgcgtcggggcgctggcctggaatgctgagcagctgtcgtccgggagccgcgaccgcatgatcctgcagagggacatccgcaccccgccactgcagtcggagcggcggctgcagggccaccggcaggaggtgtgcgggctcaagtggtccacagaccaccagctcctcgcctcggggggcaacgacaacaagctgctggtctggaatcactcgagcctgagccccgtgcagcagtacacggagcacctggcggccgtgaaggccatcgcctggtccccacatcagcacgggctgctggcctcggggggcggcacagctgaccgctgtatccgcttctggaacacgctgacaggacaaccactgcagtgtatcgacacgggctcccaagtgtgcaatctggcctggtccaagcacgccaacgagctggtgagcacgcacggctactcacagaaccagatccttgtctggaagtacccctccctgacccaggtggccaagctgaccgggcactcctaccgcgtgctgtacctggcaatgtcccctgatggggaggccatcgtcactggtgctggagacgagaccctgaggttctggaacgtctttagcaaaacccgttcgacaaaggagtctgtgtctgtgctcaacctcttcaccaggatccggtaaacctgccgggcaggaccgtgccacaccagctgtccagagtcggaggaccccagctcctcagcttgcatggactctgccttcccagcgcttgtcccccgaggaaggcggctgggcgggcggggagctgggcctggaggatcctggagtctcattaaatgcctgattgtgaaccatgtccaccagtatctggggtgggcacgtggtcggggaccctcagcagcaggggctctgtctcccttcccaaagggcgagaaccacattggacggtcccggctcagaccgtctgtactcagagcgacggatgccccctgggaccctcactgcctccgtctgttcatcacctgcccaccggagccgcatgctcttcctggaactgcccacgtctgcacagaacagaccaccagacgccagggctgattggtgggggcctgagaccccggttgcccattcatggctgcaccccaccatgtcaaacccaagaccagccccaaggccagaccaaggcatgtaggcctgggcaggtggctcggggccactggcggagccagcctgtggatccaagagacagtccccacctgggcttcacggcatccttgcagccacctctgctgtcactgctcgaagcagcagtctctctggaagcatctgtgtcatggccatcgcccggcggtcagtgggcttcagatgggcctgtgcatcctggccaagcgtcaccctcacactggaggaggatgtctgctctggacttatcaccccaggagaactgaacccggacctgctcactgccctggctggagaggagcacaacagatgccacgtcttcgtgcattcgccaacacgtgccctcacagggccagcgtcctccttccctgcgcaagacttgcgtcccccatgcctgctgggtggctgggtcctgtggaggccagcagcggtgtggcccccgcccccaggctgcctgtgtcttcacctgtcctgtccaccagcgccaacagccgtggggaagccaaggagacccaaggggtccaggaggtgggcgccctccatccttcgagaagcttcccaggctcctctgcttctctgtctcatgctcccaggctgcacagcaggcagggagggaggcaaggcaggggagtggggcctgagctgagcactgccccctcacccccccaccaccccttcccatttcatcggtggggacgtggagagggtggggcgggctggggttggagggtcccacccaccaccctgctgtgcttgggaacccccactccccactccccacatcccaacatcctggtgtctgtccccagtggggttggcgtgcatgtgtacatatgtatttgtgacttttctttggatttgttttgtgtttttgttgactagtcctggaaatgtttgaggctagacggggaggggccaggacccacccactgctcctgggggatgaggtcctggttttaaagccccgtcatttcaagcgggtcgatcttccacattcactggagagactctccccacctctgtctgggtggggcgcggacccctcactgtgcgcctgtgcagggggtgctggtgcacgtggcagtgtggatttccagtggtcacggtcttactgtttcaaggtttttaaataagaaaaccaaccctgccttcgcccatgcccgcccctgcccgcagttgccaaagagccgccttgtcgctgtgggcgtcagggcttggctggctcagtgcacaacccacagtggccttcagaggctcctcctgggactgggaaccgccgcagggccaggcggacggcgtgaggtttgtgttggggctggttctgcccatgctagggggtgggggagctcccaggacagaccagccttgtttctcatgtaatgcagtgacgctgtcattaaacacgtggattcatgtgtgg

SEQ ID NO: 3330 - DNA, 564 bp, Homo sapiens
  source 1..564: mol_type = genomic DNA
gcggcagctggaggatgaagaaggagcatgtgcttcactgccagttctccgcgtggtacccgttcttccgaggcgttaccatcaagagtgtcattcttccacttcctcagaatgtgaaggattatttactcgatgatggaactctggtggtttcaggaagggatgatccaccaacacattctcagccagacagtgatgatgaagcagaagaaatacagtggtctgatgatgagaacacagccacgcttacggatgcgtattggatagcaatgaatagttctctgaaatgtaaaaccctcagcgacatctttctgcttttcaagagttccgatttcatcactcgtgacttcactcagccgtttattcattgtactgatgattctccagatccatgtatagaatatgagctcgttctccgaaaatggtgtgaattgattcctggggctgagtttcgatgttttgtcaaggaaaacaagcttattggtatttctcaaagagactacacacaatactatgatcatatttctaaacaaaaggaagaaattcgcagatgcatacaagact

SEQ ID NO: 3331 - DNA, 4554 bp, Homo sapiens
  source 1..4554: mol_type = genomic DNA
ttcctgtgctggatcctgggcggcctgagggcccgcgggccagcaccatggaggacgtgaagctggagttcccttcccttccacagtgcaaggaagacgccgaggagtggacctaccctatgagacgagagatgcaggaaattttacctggattgttcttaggcccatattcatctgctatgaaaagcaagctacctgtactacagaaacatggaataacccatataatatgcatacgacaaaatattgaagcaaactttattaaaccaaactttcagcagttatttagatatttagtcctggatattgcagataatccagttgaaaatataatacgttttttccctatgactaaggaatttattgatgggagcttacaaatgggaggaaaagttcttgtgcatggaaatgcagggatctccagaagtgcagcctttgttattgcatacattatggaaacatttggaatgaagtacagagatgcttttgcttatgttcaagaaagaagattttgtattaatcctaatgctggatttgtccatcaacttcaggaatatgaagccatctacctagcaaaattaacaatacagatgatgtcaccactccagatagaaaggtcattatctgttcattctggtaccacaggcagtttgaagagaacacatgaagaagaggatgattttggaaccatgcaagtggcgactgcacagaatggctgacttgaagagcaacatcatagagtgtgaatttctatttgggaaggagaaaatacaagagaaaattataatgtaaaatggtaaaaacataagtagtttttttttcaattacatgttgcttccagacatacttctctgcaacttgttgagcaacattttaagatgttggacttctgcaatagatgacactgatggttttactcctttttttaaaaacacatgcgcgcgcacacacacatgctttacaagttttattataaaccaagaattttggacttgcaaagaggtattattgcaataatgcacttttcatacttgaaatttatttgtatgatataaagttattactttaaacaaaatgcaagtatggggggattgtttataaagtttgggtaatttataacaaaatttgctaaggtttgctaaaaattcatttttctgttctatatattacatttttaacataattttacagttcaattttatgatggagcctcttacagaaacattaacaaaatgcaggaatctgccacatttcttttttagtataacttaatagcttaattaccattttattttttatacttcttccattattaatctttaaatcatgatcctaattagctgtccttactttaacttgatctaattattgcttcctttcttattactttcctaatttttctatattttaaaaactacagtttccatgataaaaggaaaacgttttgatttatagtaccaagtgcttaaacacaaggatagtgttagattttcgagtgactttcctttttgcattttttggcagtaaaagccaaacgttgtatttgttcttttcagagttgtccagcccttttttcctttgtccaaaatgattctaaatagaatctaataaaccaatgtagcattatttttttctaaatgaagccccaaaaaagaaaagtgccttgcatcatttaaaaaaaataattaaatcctcatggcctctaaattagtatgtagaacactgaaaagttcttaacatttttgtgtaatttcctttctttttaaaccataaattagtttaaactgaaagtacgaggctggaagaaatattagtaaattatttggaatatagaatgtttactctttctttttatgttgtcttaatgattctgtgagattgttccggctcaaacagaagcttttctttggggaaggtgatttgtgggagactagtgtattttaaattagcattttaatccattcttgacattcagttagtccagatctgccccataatttgctttagtaaagtcactttatggatttttggctatgttttagtttgtgtgtataaaagttctaagaaaacatttttgctattttaagtatgtaagggaagagaggagtgtttttaactttttatagttgatgactttagggtagcacaaacaaaactcctttgtatctaacttttctcaatcctctcttgaggtgctttactaatgggaatgatttctgtatgttcccttggtaccaagaggtactatgcaaagtaacctattacaccaagttacttgctttgctttcctctctatgatgtgataatacagtaaaagctttcttacccagcatagtgggagagtggagattaattaaaattgttaattaagagttaattcctattgacccaggtgatatttctcttctgatttccctccccttcccttctcttatcttaccactgtgaaaacagcatattgttaatctcgttgtcgtccagtattctgctttgtgattaggtcttttgatgtacagtggtctagtggagtcaagattcgcattgggttttctaaaattccagttgataaaagttccagataacacagctttcctgtatatagatcactattgggcaggtcagcaaagatctcttacagtgtaataataatctatgatgcttcatttagcagaaactctgcttaaaagaatcttcataatagtaagtttaggttttaaaaacttgtttcataaatatacatatatcctctctagtagtctggccaaaagaacagattttgttattgataatttgtagctggtaattttccacattttctatccactgtaatttttatgttgtcactgaagtgcctgcccagtactgtatattacagtctctcacaaacactgggaaaagggactgtcatcatcttgagtactctgtgtgtatatatatatatatagatagatagatttttttttttttttgagacagagtctctaatgtcacccaggctggagtacagtggcacaatcttggctcactgcaacctccacctcctgggttcaagtgattttcctgcctcagcctcccaagtagctggggttagaggcacatgccaccatgcctggctaatttttgtagttttagtagagatggggtttcaccatgttggccaggctggtctcaaactcctgacctcaagtgatccacccacctcggcctcccaaagtgctgggattacaggcgtgagccactgcgcctggctgagtacaatattaatgtagacaaaccatgaagtttattatttcatataagaacattacaggtttgttttttcttgcatgtctgtccacctaatgtttaagtagttctggtagctcttcctattctttattctatttgattccatttctgtgattcttttattaccactgatgttttgtgatagttaactatgataaatttaactgatcatgatttatcttctagagtatttaaataatgtatgagtgaccacccaattccaacattaaaagtgtaatctgggcccataatttatagtgaaattgtatcaaaacatagggaaactgtattactgtccattttgaaaatatgaaacttgagtattgaaaatattcaaacatggaatggcagtattctaatttcagttagttggttcatgttaatttcttacctgttagatgtttaaactgcagtgacctttacttgtatctactctgtggtggaaatgttaaaccatgatagcttttgctaccaactcaaccacttaacttttagagcagttttggggagagtttatgcttcatctgagtttagaagtaatgtcagaaaatgttaagcatgtctgtattaagaaaatataaggtttctaattgtcttattaatatggtaattcaagtgaattagaaatatttaactgcaatcttgaattataaagttgagatatatatatatatgtatcaagatctcaacttgatgtaaagtaaatgagcagttacctggcggatttttttttttttaaataactgatttaatccataatcccataacaaacatagcttcacctcagtattttctttctttctttgttcaacagtgctccgataagggaatgctagaaaatagatgagaagtactgaaagacctttttttttaattgattagaaaagtaagtctctagggtctttgaatgctggaatttttttttttttttttgtctttcccatctgtggcagctaaaacaaaaatcactcaaaatattcaggtttacatgttagctctctctcatagggagctgccatacctcacagttcaaagtgtattctatagatcagtaacattatactgacatgtaattgcaatttactatgcagcaaaaatgattcaagaagaaaaataacctacagtgtctgtatacctttgtatacacaattgcttaagttactctgcttttaacatttgtacttggataaaatgcttatgtctgtataggaatgtcacagtgcaagatgctgctagcccaggcacaaagtattaaaattattttgt

SEQ ID NO: 3332 - DNA, 2494 bp, Homo sapiens
  source 1..2494: mol_type = genomic DNA
agtagaacggcgaggcggtgtatcacgtggctcggggacgtgtcaggggcggagcctccgcagcccctgcccgagttaaaaccggagtgtgagagagaaaagcgcttcagtagcgagaggggctgagaaagtggtgacaccgccggggtgcggagggagtccctgaaacttctcccaacagccccagggccaatcttccctcagcccactcccctcttcgccagctcccaggtccccactcctgtaccgggggtggggtggggagccaggcccgtctcccgctgggacacacacaggggccgggagcggggacgggacccccgaggcgggggggacgaaccgacagacagacggctgggcgcccgccccagcgggcaggcaggcaggaggaggcggaggcgggggtacgacggggagcactgggtctggggagtttcctctcaactatcgggggagaaactccccgcagccggaggaaagacccagacagtgttttcctcccgggggccgtgctcccccgccccgcgtagcggcggtcgccgccaccggcgcctccacctctaccatctcctctttctccaccacctcgggccccggtgtccccggccagcactatgcccatcttactgttcctgatagacacgtctgcctctatgaaccagcgcagccatctgggcaccacctacctggacacggccaaaggcgcggtagagaccttcatgaagctccgtgcccgggaccctgccagcagaggagacaggtatatgctggtcactttcgaagagccgccctatgctatcaaggctggatggaaagaaaaccatgcaacgtttatgaatgaattgaaaaaccttcaggctgaaggacttacgactcttggccaatccctaaggacagcttttgatttattaaatttaaatagattagtaactggcatagacaactatgggcaggtaggttgaataataaggtggcaaaatagttgatttttcattttgtggaaaaacacagtccagtccaaaaactacataacatgaaatgcaagtataaaacattccaaattaaaatagaatatgcacattgttcaaaggcaaaactcttaccctactatatatattttacatccctcattttttccccctctaaaatgcattggtattcaggattagaatctgaaacttttgctataaagttgacatacattggttttaatcccttgaaagttcagtaaagacctaaaaggaaaagcatcctaccacaccacactcatgttgtatgtgcaactattatagtggcttagagacactagttcgtgttcttcgtttctatattagtaaagatgttagaggaaattaatctgtttgttgcatcagggtttaatgtgaccatgttgtataactattctgaaaggtaagaagtttttcactggagtacagtcactggctgagaacatttaagttttcttttgaagcatacacagttaacaactattgcaggaagaactctgaattaaatttcaggcccagagttttgatttaaactccaaacccttggaaaaaaagactgctggaaaatatgaaagaacccttcgtttcttaacccccacaagtccttttattgcacttactttcatgtatttgaggatgagaggagctttaaatcaacaataattcactaaggaataatgcaaggtggtctattgtaacattttatgatattattgccctggaaataaaagatactgaacaatgtataatgttacatgtaacaaaggaatattatttccaaggagctcagttcttatgttgtagtgaaaagcactattcctaattatatattgggtatatgttgtattttcccaagtcccacagtccctagttttgtgagtttcgtacatttcagggaaattctttctgtgactacaacttttatttgcttcctattgaaggaaattgacttgtttctgttttaggaaattttaagcttcttagggataacttcagtgcttaagtgtctttggaaataactgaatttagttctataacatttaaaatgtacactgaaattcagagtgagcttaccaaattgaacttccaacgtttagttaggtaaatatgtactttcttaccacattaatacttttatgtttttcccatctctgctgcttttattttgcaacttttaataatttaggtagatttgcaatgaactttttggtttgtttctgtaaaatagtagtggatttccttctcttttatattcctttgtgatatgtagtgcaacacagtcttactgcttaaggttttcatccttacctctttgagttcaaagagatatttaaaacttgccattatttggttacctttatttggttgtcatgttgttagtgtatggcagaactattagtttcctctttttctgcatcacatttcataagtggtcaaggcatttggacatattcacctcctattacctattaaaaatacttcttaaa

SEQ ID NO: 3333 - DNA, 521 bp, Homo sapiens; identical to SEQ ID NO: 1926
  source 1..521: mol_type = genomic DNA

SEQ ID NO: 3334 - DNA, 2722 bp, Homo sapiens
  source 1..2722: mol_type = genomic DNA
cgcgtctcttgtttgtgcggctgaccagttggcgacatggtggcacccgtgctggagacttctcacgtgttttgctgcccaaaccgggtgcggggagtcctgaactggagctctgggcccagaggacttctggcctttggcacgtcctgctccgtggtgctctatgaccccctgaaaagggttgttgttaccaacttgaatggtcacaccgcccgagtcaattgcatacagtggatttgtaaacaggatggctccccttctactgaattagtttctggaggatctgataatcaagtgattcactgggaaatagaggataatcagcttttaaaagcagtgcatcttcaaggccatgaaggacctgtttatgcggtgcatgctgtttaccagaggaggacatcagatcctgcattatgtacactgatcgtttctgcagctgcagattctgctgttcgactctggtctaaaaagggtccagaagtaatgtgccttcagactttaaactttggaaatggatttgctttggctctctgcttatcttttttgccaaatactgatgttacctggaagactggccaggtggaacgaggcagggcctggaagccaccagcctctctcgccctctgtagcaggagctgcgactctatggtttcatgttacgcttccattctgtgcaaggctctgtggaaggagaagctgcacacattctggcatcataacagaatttcatttcttccatctgcattcaggccaataccaatattagcatgtggcaatgatgattgcagaattcacatatttgctcaacaaaatgatcagtttcagaaagtgctttctctctgtggacatgaggattggattagaggagtggaatgggcagcctttggtagagatcttttcctagcaagctgttcacaagattgcctgataagaatatggaagctgtatataaagtcaacatctttagaaactcaggatgacgataacataagactgaaagaaaatacttttaccatagaaaatgaaagtgttaaaatagcatttgctgttactctggagacagtgctagccggtcatgaaaactgggtaaatgcagttcactggcaacctgtgttttacaaagatggtgtcctacagcagccagtgagattattatctgcttccatggataaaaccatgattctctgggctccagatgaagagtcaggagtttggctagaacaggttcgagtaggtgaagtaggtgggaatactttgggattttatgattgccagttcaatgaagatggctccatgatcattgctcatgctttccacggagcgttgcacctttggaaacagaatacagttaacccaagagagtggactccagagattgtcatttcaggacactttgatggtgtccaagacctagtctgggatccagaaggagaatttattatcactgttggtactgatcagacaactagactttttgctccatggaagagaaaagaccaatcacaggtgacttggcatgaaattgcaaggcctcagatacatgggtatgacctgaaatgtttggcaatgattaatcggtttcagtttgtatctggagcagatgaaaaagttcttcgggttttttctgcacctcggaattttgtggaaaatttttgtgccattacaggacaatcactgaatcatgtgctctgtaatcaagatagtgatcttccagaaggagccactgtccctgcattgggattatcaaataaagctgtctttcagggagatatagcttctcagccttctgatgaagaggagctgttaactagtactggttttgagtatcagcaggtggcctttcagccctccatacttactgagcctcccactgaggatcatcttctgcagaatactttgtggcctgaagttcaaaaactatatgggcacggttatgaaatattttgtgttacttgtaacagttcaaagactctgcttgcctcagcttgtaaggcagctaagaaagagcatgcagctatcattctttggaacactacatcttggaaacaggtgcagaatttagttttccacagtttgacagtcacgcagatggccttctcacctaatgagaagttcttactagctgtttccagagatcgaacctggtcattgtggaaaaagcaggatacaatctcacctgagttcgagccagtttttagtctttttgccttcaccaacaaaattacttctgtgcacagtagaattatttggtcttgtgattggagtcctgacagcaagtatttcttcactgggagtcgagacaaaaaggtggttgtctggggtgagtgcgactccactgatgactgtattgagcacaacattggcccctgctcctcagtcctggacgtgggtggggctgtgacagctgtcagcgtctgcccagtgctccacccttctcaacgatacgtggttgcagtaggattggagtgtggaaagatttgcttatatacctggaaaaagactgatcaagttccagaaataaatgactggacccactgtgtagaaacaagtcaaagccaaagtcatacactggctatcagaaaattatgctggaagaattgcagtggaaaaactgaacagaaggaagcagaaggtgctgagtggttacactttgcaagctgtggtgaagatcacactgtgaagatacacagagtcaataaatgtgcactgtaatggacttaat

SEQ ID NO: 3335 - DNA, 2219 bp, Homo sapiens
  source 1..2219: mol_type = genomic DNA
cagcctctgccgggttccgggaaaaggagctcctgctgccactgctcttccggagcctgcagcatggggcccctgccgcgcaccgtggagctcttctatgacgtgctgtccccctactcctggctgggcttcgagatcctgtgccggtatcagaatatctggaacatcaacctgcagttgcggcccagcctcataacagggatcatgaaagacagtggaaacaagcctccaggtctgcttccccgcaaaggactatacatggcaaatgacttaaagctcctgagacaccatctccagattcccatccacttccccaaggatttcttgtctgtgatgcttgaaaaaggaagtttgtctgccatgcgtttcctcaccgccgtgaacttggagcatccagagatgctggagaaagcgtcccgggagctgtggatgcgcgtctggtcaaggaatgaagacatcaccgagccgcagagcatcctggcggctgcagagaaggctggtatgtctgcagaacaagcccagggacttctggaaaagatcgcaacgccaaaggtgaagaaccagctcaaggagaccactgaggcagcctgcagatacggagagagaagtggatgggccctatacctccagccgtgaatgccagactttaagattgcccggaggaagcaaactcttcgtataaaaaaagcaggccatctgcttaacccttggctccaccataaggcactgggactcggatttctctatctgatagagaaactcccctggtctctctatcagcaacagaaaaccaagccagatggactttgcaactaatcaagtttgggatttactgtcttctgaccaaccacagtgactgagatggggctgggaccagaagcccagtgggagtgaacagccgagggaaccagagtctggctgagcttgtggccagatatttaaactgggtccagccacacctgcaaaaccagggcaaggcagtaccgggaaactggctggagttgctgcggtttggggaagttgcacaccctttcatagatacctcccttaaccctcagtgcagattctgagaaaactccaaggcttctctgcctaacctagtataacccctgttccctactacatacatataacttttccattcccccagtaattgacccaaagtccctgcctctagctgtgcccattgtgcaatgatcagaatcccttgtttcaatagtattttgacttctttaagaatactctgtatttggaagctgaaacctcacttggatccattgttgggaaccaagtacggagccttacatagcccggaggagtttcaggagcaatgccactttcccttccatccctccctctgggtctggctcttcccatagtccattttccccttttatctcccattaatttctgtcttcctctctcaccttttccatgtctctagcatcctccaggatttaaaatcatctttacccaacttatctgtgaagtaatggcaaaagaacatctccaaattaagtactccttttcttcaaaggagtttcatgggatgtacagctagtataaaataaaaatatgggaagatgtccaatcttaaaaaccataagggcaaattaagacaaaactaagctgcccagagcagggtgagtggaaccagttttatgaataaagatgcttgtctcagcactatatgtggatatcaaaaattgtgaacaacttgaacacctatcaggaggagaatactttaatcaattatggcacattcaggagataatgttttacagtcatcaaaaattgtatatgagggccagcacggtggctcacacctgtaatcccagcactttgggaggccaaggcaggcggatcacctgaggtcaggagttcgagaccagactggctaacatggtaaaaccctgtttctactaaaaatacaaaaaagtaaccgggtgtggtggcacgtgcctgtaatcccagctactcgggaggctgaggcaggagaatcgcttgaacccgggaggcagaggttgtggtgagctgagattgcactattgcactccagcttgggcaacaagagcgaaactctgtctcaaaaaaaaattgtatttctgaagaattgttaagaacattggaaattcttgagatataatattgattggaaaaagatgaaactatatggtatgatctcaatatgtcctgatgaataaaaacataatacagag

SEQ ID NO: 3336 - DNA, 1678 bp, Homo sapiens
  source 1..1678: mol_type = genomic DNA
aagagccgcgccgcaggagaggcaggctggaccgggggctccccgggcccgcgacccccgccgtgaccccgcagcccccagctcgcccccaagatgatgaagaggcagctgcaccgcatgcggcagctggcccagacgggcagcttgggacgcaccccggagaccgctgagttcctgggtgaggacctgctgcaggtagaacagcggctggagccggccaagcgggcagcccacaacatccacaagcggctgcaggcctgtctgcagggccagagcggggcagacatggacaagcgggtgaagaagcttcccctcatggctctgtccaccacgatggctgagagcttcaaggagctggaccctgattccagcatggggaaggccttggagatgagctgtgccatccagaatcagctggcccgcatcctggccgagtttgagatgaccctggagagggacgtcctgcagccactcagcaggctgagtgaggaggagctgccagccatcctcaaacacaagaaaagcctccagaagctcgtgtccgactggaacacactcaagagcaggctcagtcaggcaaccaagaattcaggcagcagtcaaggcctaggaggcagcccgggtagtcacagccatacgaccatggccaacaaggtggagacgctgaaggaggaggaggaggagctgaagaggaaagtggagcaatgcagggacgagtacttggctgacctgtaccactttgttaccaaggaggactcctatgccaactacttcattcgtctcctggagattcaggccgattaccatcgcaggtcactgagctcgctggacacagccctggctgagctgagggagaaccacggccaagcagaccactccccttcgatgacagccacccacttccccagggtgtatggggtgtcgctggcaacccacctgcaagagctgggccgggagattgccctgcccatcgaggcctgcgtcatgatgctgctttctgagggcatgaaggaagagggtctcttccgtctggctgctggggcctcggtgctgaagcgtctcaagcagacaatggcctcggacccccacagcctggaggagttctgctccgacccgcacgctgtggcaggtgccctcaagtcctatctgcgggagctgccagagcctctgatgaccttcgacctctatgatgactggatgagggcagccagcctgaaggagccaggggcccggctgcaggccctccaagaggtgtgcagccgcctaccccccgagaacctcagcaacctcaggtacctgatgaagttcctggcacggctggccgaggagcaggaggtgaacaagatgacacccagcaacatcgccatagtcctgggacccaacttgctgtggccacctgagaaagaagggctggagtacagtggcgcaatctcggctcactgcaacctccgcctcccgggttcaagcgattcttctgcctcagcctgccaggtagctgggactacagggaccaggcccagctggatgcagcctccgtgtcttccatccaggtggtgggcgtcgtcgaggcgctgatccagagcgcagacaccctcttccctggagacatcaacttcaacgtgtcaggcctcttctcagctgttaccctccaggacacagtcagtgacaggctggcctc

SEQ ID NO: 3337 - DNA, 570 bp, Homo sapiens
  source 1..570: mol_type = genomic DNA
ctgtctcagccagctgccctcctcctccaagctggctccacttctctaagcgccaacagcgatggaaataaatagcatgtgtacagacgcctggacccttgagaaactcagaatatttctgcatgccttcctagctcctctagcgctctagaaggtgccttggaatttgtgtcgctgagtcagcaagcctttcagatttgcccggtttttgttgtttgtggtttgtatcaagatgggaactcaaacaagtcattcctcctaaggagctggtgtcttcatccagaagggacagtttgtgccagctctccagagagaaaaggatctggtactgttctggagtggcctgtagcagacactgaaccaccagccagctgcatttgttgtcctggaagtcattgccaactctgccagtcacactggggtccccagagaagtcaagatctgccggaggcgctgggcaatgaccccgggactccaggccagaggggtctgaagctgtttgggaaagcagcgggactccttgggaagatggccatggccccaagcccttccctggtgcaggtgtacacc

SEQ ID NO: 3338 - DNA, 1831 bp, Homo sapiens
  source 1..1831: mol_type = genomic DNA
ggaagtacggccggaagcccgccatagagtttagtggccagagcgactcttcagggaggtggcaggaaaggcttggaacagctgccggaggtgacggagcggcggccccgcccggtgcgctggaggtcgaagcttccagctctggacatcctgagcccaagtcccccacactcagtgcagtgatgagtgcggaagtgaaggtgacagggcagaaccaggagcaatttctgctcctagccaagtcggccaagggggcagcgctggccacactcatccatcaggtgctggaggcccctggtgtctacgtgtttggagaactgctggacatgcccaatgttagagagctggctgagagtgactttgcctctaccttccggctgctcacagtgtttgcttatgggacatacgctgactacttagctgaagcccggaatcttcctccactaacagaggctcagaagaataagcttcgacacctctcagttgtcaccctggctgctaaagtaaagtgtatcccatatgcagtgttgctggaggctcttgccctgcgtaatgtgcggcagctggaagaccttgtgattgaggctgtgtatgctgacgtgcttcgtggctccctggaccagcgcaaccagcggctcgaggttgactacagcatcgggcgggacatccagcgccaggacctcagtgccattgcccgaaccctgcaggaatggtgtgtgggctgtgaggtcgtgctgtcaggcattgaggagcaggtgagccgtgccaaccaacacaaggagcagcagctgggcctgaagcagcagattgagagtgaggttgccaaccttaaaaaaaccattaaagttacgacggcagcagcagccgcagccacatctcaggaccctgagcaacacctgactgagctgagggaaccagctcctggcaccaaccagcgccagcccagcaagaaagcctcaaagggcaaggggctccgagggagcgccaagatttggtccaagtcgaattgaaaggactgtcgtttcctccctggggatgtggggtcccagctgcctgcctgcctcttaggagtcctcagagagccttctgtgcccctggccagctgataatcctaggttcatgacccttcacctcccctaaccccaaacatagatcacaccttctctagggaggaggcaaatgtaggtcatgtttttgttggtactttctgttttttgtgacttcatgtgttccattgctccccgctgccatgctctctcccttgtttccttaagagctcagcatctgtccctgttcattacatgtcattgagtaggtgggtagccctgatgggggtcgctctgtctggagcataacccacaggcgttttttctgccaccccatccctgcatgcctgatccccagttcctataccctacccctgacctattgagcagcctctgaagagccatagggcccccacctttactcacaccctgagaattctgggagccagtctgccatgccaggagtcactggacatgttcatcctagaatcctgtcacactacagtcatttcttttcctctctctggcccttgggtcctgggaatgctgctgcttcaaccccagagcctaagaatggcagccgtttcttaacatgttgagagatgattctttcttggccctggccatctcgggaagcttgatggcaatcctggaagggtttaatctccttttgtgagtttggtggggaagggaagggtatatagattgtattaaaaaaaaaaaggtatatatgcatatatctatatataatatgacgcagaaataaatctatgagaaatctatct

SEQ ID NO: 3339 - DNA, 3587 bp, Homo sapiens
  source 1..3587: mol_type = genomic DNA
aattcccagagccggggctggggctctaggctgccgcggcggctctaggctgggctgctgggcgcgaggccagggcgggccgggagaggctgcgccggcggcggatcgcgcagagggcggtggcctgggctggccgaaccatggcggccccggagccggcgccgaggcgggcccgggaacgggagcgggagcgggaggacgagagcgaggacgagagcgacatcctggaggaaagcccgtgtggtcgctggcaaaagcgacgggagcaggtaaaccaagggaacatgccagggcttcagagcaccttcctagccatggacacggaggagggggtagaggtggtgtggaacgagctccacttcggagacaggaaggccttcgcggcgcacgaggagaagatccagaccgtgttcgagcagctggtgctggtggaccacccgaacatcgtgaagttgcacaagtactggctggatacctctgaggcctgcgcgagggtcatcttcatcacagagtacgtgtcatcaggcagcctcaagcaattcctcaaaaagaccaagaagaaccacaaggccatgaacgcccgggcctggaagcgctggtgcacgcagatcctgtctgcgctcagcttcctgcacgcctgcagccccccaatcatccacgggaacctgaccagcgacaccatcttcattcagcacaacggcctcatcaagatcggctccgtgtggcaccgaatcttctccaatgcacttccagatgatctccgaagccccatccgcgctgagcgagaggaacttcggaacctgcacttcttccccccagagtatggagaggtggccgatgggaccgctgtggacatcttctcctttgggatgtgtgcgctggagatggctgtactggaaatccagaccaatggggacacccgggtcacagaggaggccattgctcgcgccaggcactcgctgagtgaccccaacatgcgggagttcatcctttgctgcctggcccgggaccctgcccgccggccctctgcccacagcctcctcttccaccgcgtgctcttcgaggtgcactcgctgaagctcctggcagcccactgcttcatccagcaccagtacctcatgcctgagaatgtggtggaggagaagaccaaggccatggacctgcacgcggtcttggcggagcttccccggccccgcaggcccccgctgcagtggcggtactcggaagtctccttcatggagctggacaaattcctggaggatgtcaggaatggaatctacccactgatgaactttgcagccactcgacccctggggctgccccgtgtgctggccccacccccggaggaggtccaaaaggccaagaccccgacgccagagccctttgactctgagaccagaaaggtcatccagatgcagtgcaacctggagagaagcgaggacaaggcgcgctggcatctcactctgcttctggtgctggaagaccggctgcaccggcagctgacctacgacctgctcccaacggacagcgcccaggacctcgcctcggagctcgtgcactatggcttcctccacgaggacgaccggatgaagctggccgccttcctggagagcaccttcctcaagtaccgtgggacccaggcctgacccggagccccagccccaggggaccatgccggggtgctgcctgggcaggccatgttggggagactccagcaccgtggggctgccctcctccatgcgcctgggagcacaaaggccccggtagtgaaggaaccccccgtctcctgagagtggggctgaccctgccttgggcgccgaggggttggggggtgggtgtgggggagccgttaggcctcccaggtccttaggatcagggttgcccccagaaccccttcccatatcctccattctccgccctgagttcctacccaggctgcctggccggggccactgcctcctcagcatgcaggaggctgccctgtagggaaccccagctctggggcttgggggtgagggtcagccctggacagacctctgcccagggaactgctccatggggtctgggagagcagccatcccctgctggcaccatagacccacacaaggagcctgcacagcaagccagcggtgacacacctgcaggtgtcaggcatggcactgggcacaacagggacctggcaggagaaacagaccacagagaggtctggagttgaggctgttgtcagcaaagcccctggtcccacacagctctgccctagagccacctctttgaccctttacccaccctgagaccagaacttgcagcccctctgcagatctcctctggccactgcagcccctccaatgggctttttctctcatgcattccctggcctggaggcgtcagggaccccacatcctccctgctcctcagactcacagcccctccatgttacctcccgcacctcctccctggggcagctgctccctgggcctctgaggatgtcagctcctggctccctgcctctctcccactccactcctggctcagtcttagagatttctatgccctcatggattctacccctgccttcctggcctcttgattcttggcttgcctctcctccaattccaaacttagtgaaatggccttaagcattttaaactgtatgtatacattagcgcattcatgcctttctaaacgcatttcaaatgtcaaccaggaaggcacaccactgtattagttttatactgccgctgtaaaatttaccacaaacttagtgacttaacacaaatttattgcaattctgtaggctggaagtctgactatgggtctcactggactagaatcaaggctggcaggctgccttccttcctggaggttctaggggagactctgtctcctgctccttcaggctgctggcagaatccacatcctttcggtggcagggccaaggtccccactttcttgctgactgtaaactaaggccacttccagcttgtagaggctgcctacattccttggctcttggccccctcctccatcttcagagctagcaggttcagtctgtgtcacgaaccatttctctggttccctgcagacaggaaaggttgtccctaaggactcatgagattaggttgggcccagccagataatacatgataatctccctcctcaaggtttttaatattaaacacatctgcaggacacattttgccatgtaaactaacattcactggttccagggattaaggaatgaacctcttttgttggggaagggtggcattctgctgaccacagcactccaaccaaaagccaaaaaccaaagcaagacttactaacgcatatcaaataaattaaaggtacaaaatcgtgaatctcagttatcttaaatattccaatactatttacaaaattattcaaattctcacgccttccaactcaaaattagcaatctaaagtaatttccatatcctagatggaaaccctcatgctaaactgtctgattatgcatggttctaaatggtttcagtggcaaatacataacattgtactactgattaaactgaacttaaaagcatcaataccaccattgctgcacttaa

SEQ ID NO: 3340 - DNA, 657 bp, Homo sapiens
  source 1..657: mol_type = genomic DNA
ttaactcttggactttgttccatgtttataacttagtatttcacgaacgccccgcggtgtttgttcatttttcccacacataatggaccataaaggtcggcttctttgctttatgactcgttctgaacaagtccttttccgcgctgtgtctcactttcctcttttgtaaaatggaaatattaactctagacgccggtctgattaggttgctttgaagatcgaaccagatgagggaagccaaatacttcataggctgtaaagtggtgaagctgaactgctaccgagttgctatttttttctcctcctccctctcaagctaaacgttctttagatcttttgtgatttcttcaggtggtctttgcgactccctaggctccgacctggaagaaatcttttttacacttccctttcacagagccctgcattttaacttccctatcagaagcgagaaaaatagttatcattttgagagggcttactctatgccaagccctgagaaaactctttacgtggattatctcgtttaatttcacaacatccttttaagttttccatggacacagcctagcagaaagacgcagccttcgtgcttcgctgactgctgaccactgacccaccgccttgatgacagcaccctcgtgtgccttcccagttcag

SEQ ID NO: 3341 - DNA, 1062 bp, Homo sapiens
  source 1..1062: mol_type = genomic DNA
gttgccattaggggactcctgaggtcctatctccaggctgcggtgactgcactttccctggagtggaagctgctggaaggcggaccggccgccatgtccacgttcaggcaggaggacgtggaggaccattatgagatgggggaggagctgggcagcggccagtttgcgatcgtgcggaagtgccggcagaagggcacgggcaaggagtacgcagccaagttcatcaagaagcgccgcctgtcatccagccggcgtggggtgagccgggaggagatcgagcgggaggtgaacatcctgcgggagatccggcaccccaacatcatcaccctgcacgacatcttcgagaacaagacggacgtggtcctcatcctggagctggtctctggcggggagctctttgacttcctggcggagaaggagtcgctgacggaggacgaggccacccagttcctcaagcagatcctggacggcgttcactacctgcactctaagcgcatcgcacactttgacctgaagccggaaaacatcatgctgctggacaagaacgtgcccaacccacgaatcaagctcatcgacttcggcatcgcgcacaagatcgaggcggggaacgagttcaagaacatcttcggcaccccggagtttgtggccccagagattgtgaactatgagccgctgggcctggaggcggacatgtggagcatcggtgtcatcacctatatcctcctgagcggtgcatccccgttcctgggcgagaccaagcaggagacgctcaccaacatctcagccgtgaactacgacttcgacgaggagtacttcagcaacaccagcgagctggccaaggacttcattcgccggctgctcgtcaaagatcccaagcggagaatgaccattgcccagagcctggaacattcctggattaaggcgatccggcggcggaacgtgcgtggtgaggacagcggccgcaagcccgagcggcggcgcctgaagaccacgcgtctgaaggagtacaccatcaagtcgcactcctccgcgagccccatcgtcgcgcctgtggacgcctag

SEQ ID NO: 3342 - DNA, 2226 bp, Homo sapiens
  source 1..2226: mol_type = genomic DNA
attgacaaacagagcggtcgcggcggcgactctcggcgtgcggtgatagccaagccatgggagacaagaagagccccaccaggccgaagcggcagccgaagccgtcctcggatgagggttactgggactgtagcgtctgcaccttccggaacagcgccgaggccttcaagtgcatgatgtgcgatgtgcggaagggcacctccacccgatccacattgtttgaagttattgtgagtgcctcgaggaccaaggaaccgttgaaatttccaatttcaggaaggaaacctcgacctgtctcccagttggttgcacagcaggttactcagcagtttgtgcctcctacacagtcaaagaaagagaaaaaagataaagtagaaaaagaaaaaagtgaaaaggaaacaactagcaaaaagaatagccataagaaaaccaggccaagattgaaaaatgtggatcggagtagtgctcagcatttggaagttactgttggagatctgacagtcattattacagactttaaggagaaaacaaagtcaccgcctgcatctagtgctgcttctgcagatcaacacagtcaaagcggctctagctctgataacacagagagaggaatgtccaggtcatcttcacccagaggagaagcctcatcattgaatggagaatctcattaaagtttattttctccaatttcttagtcacttctgtcctaccatgcaaatacacagattatgccaagaggtaccacattttcatgacagatacattcatgcacaatccataatttgagttttacataaaatagaaatttgttagaatttgttagattttattgcaatgatgcctaccaaacatttccagacttaacattttggtctctgcagttaagtgccatgaaaatgtggttgaattattcattatgcagtgttattggtaagtgtattttcacttttagtttagtgaattctaacacataattcttgaattctctactattggcatgtaacgaatttaaattttttataacatagtgcaagctgcctaaatatgtattatttgagaattgtgaaacagatagttatatgtatacaagtcaaagaacaacttaactattgctgcaacaggtttttcttaatggttatcctcttaaatacacctgctggtacttggtgtggttaaataggaaaattgttattaaataaagaatttgtatgaacctttgccaatgtttttgacacgttttactaattattgttcctgaattatgtttctggttttatctattttttgaggtttttttgtttgcttatttttcaaaacattcatttattgtaatgtttactagcggactagtaaacaataaaacattgattatttagctttataattcaggtttagtgctattgtcattgaacactggtattttctgtatcatataaaacattaaaattcaaataattataagcatttggcaaaaacaagagaaaagaaacttgccatattttacaagctgcaattttagaaaagctttaacttaatgatagttttatcattgttttcttgtcccaaacttatccagggccatagaagtatgaatctaattaaaacagaaatgggaattattgcacagaaatgggaaataactaattttaaatcagtcaaattggcttcttattaaatacaataattcttatgaaaatcatagtaccctattttcagacacagctgccagtttacacatttctcagtatcctgaaaggaaaaaagtatagccccacttatactatgtaaaattaccaataaaatatttttatgactacagattttgcatttttgtttacaactatttaaagagttttatgttgtatttagaatttcaacctagaaaccacacagtacttaaattctcctggggtctcctgctttctcttaaccatttgcttaatatatatctacctaaaggagacttctgaattgtaaatgaacttaaaaatagaatgtggatgcaaaatatcacataagacatcatgataacatttgaagaaaaaataaaactgtagaccctaacagttgtgatatttggtggtttcatgtggtaatgtaattttctgtttaattacagtactttttacaggcacagtggtactgtcttttttgtaagatgctagttgtgaaatacaattaattgcatacagtaaaagtctgtgattaaaacatttatatacctca

SEQ ID NO: 3343 - DNA, 2248 bp, Homo sapiens
  source 1..2248: mol_type = genomic DNA
gcagaactcgcacaagggaccttatttaggttgcgcaggcgcccgctggccatttcgtcttagccacgcagaagtcgcgtgtctagtttgtttcgacgccggaccgcgtaagagacgatgatgttgggcacggaaggtggagagggattcgtggtgaaggtccggggcttgccctggtcttgctcggccgatgaagtgcagaggtttttttctgactgcaaaattcaaaatggggctcaaggtattcgtttcatctacaccagagaaggcagaccaagtggcgaggcttttgttgaacttgaatcagaagatgaagtcaaattggccctgaaaaaagacagagaaactatgggacacagatatgttgaagtattcaagtcaaacaacgttgaaatggattgggtgttgaagcatactggtccaaatagtcctgacacggccaatgatggctttgtacggcttagaggacttccctttggatgtagcaaggaagaaattgttcagttcttctcagggttggaaatcgtgccaaatgggataacattgccggtggacttccaggggaggagtacgggggaggccttcgtgcagtttgcttcacaggaaatagctgaaaaggctctaaagaaacacaaggaaagaatagggcacaggtatattgaaatctttaagagcagtagagctgaagttagaactcattatgatccaccacgaaagcttatggccatgcagcggccaggtccttatgacagacctggggctggtagagggtataacagcattggcagaggagctggctttgagaggatgaggcgtggtgcttatggtggaggctatggaggctatgatgattacaatggctataatgatggctatggatttgggtcagatagatttggaagagacctcaattactgtttttcaggaatgtctgatcacagatacggggatggtggctctactttccagagcacaacaggacactgtgtacacatgcggggattaccttacagagctactgagaatgacatttataattttttttcaccgctcaaccctgtgagagtacacattgaaattggtcctgatggcagagtaactggtgaagcagatgtcgagttcgcaactcatgaagatgctgtggcagctatgtcaaaagacaaagcaaatatgcaacacagatatgtagaactcttcttgaattctacagcaggagcaagcggtggtgcttacgaacacagatatgtagaactcttcttgaattctacagcaggagcaagcggtggtgcttatggtagccaaatgatgggaggcatgggcttgtcaaaccagtccagctacgggggcccagccagccagcagctgagtgggggttacggaggcggctacggtggccagagcagcatgagtggatacgaccaagttttacaggaaaactccagtgattttcaatcaaacattgcataggtaaccaaggagcagtgaacagcagctactacagtagtggaagccgtgcatctatgggcgtgaacggaatgggagggttgtctagcatgtccagtatgagtggtggatggggaatgtaattgatcgatcctgatcactgactcttggtcaaccttttttttttttttttttttttctttaagaaaacttcagtttaacagtttctgcaatacaagcttgtgatttatgcttactctaagtggaaatcaggattgttatgaagacttaaggcccagtatttttgaatacaatactcatctaggatgtaacagtgaagctgagtaaactataactgttaaacttaagttccagcttttctcaagttagttataggatgtacttaagcagtaagcgtatttaggtaaaagcagttgaattatgttaaatgttgccctttgccacgttaaattgaacactgttttggatgcatgttgaaagacatgcttttatttttttgtaaaacaatataggagctgtgtctactattaaaagtgaaacattttggcatgtttgttaattctagtttcatttaataacctgtaaggcacgtaagtttaagctttttttttttttaagttaatgggaaaaatttgagacgcaataccaatacttaggattttggtcttggtgtttgtatgaaattctgaggccttgatttaaatctttcattgtattgtgatttccttttaggtatattgcgctaagtgaaacttgtcaaataaatcctccttttaaaaactgc

SEQ ID NO: 3344 - DNA, 344 bp, Homo sapiens
  source 1..344: mol_type = genomic DNA
aaaacagggctcactggatccccttcatcactgtgggacctgctgcgagaaatgtttgttgtgtgctctaaagaacaactacaatcgggtgggaaatattcacaccaggtctgggcacccttttcacccttggcttctggagctgccttctgatttatctgtacctcaaccccggtgacatcgaatatgtgtttccaacctagcgcagctgcagaacctaccagcagttccgattcatcacctccaagctccttaagatgcacagtcagggcttcttgtcctgttaaataccaccccaaccccaggcctccactggagattaaaaaccttcattcaaagccaaa

SEQ ID NO: 3345 - DNA, 7648 bp, Homo sapiens
  source 1..7648: mol_type = genomic DNA
agagcctcggtggtttgcagcagtggaaccaggcaggcccagttgtgggtaggagaggccgtcacctgttgaggcctcccccccacacccccgcatcgccctgccctggcagagcccagcccccagtccccggagagcgcgcctgaggacggacggacggacggacggacagacctagggacggagggccaggggcaggggagatccaagaggccccgcgctggaatgcagttttctcgggcgagggagactttgcaccggagtggaaaatagtttggggtggggtttcgcaccgtcccctcctccccagccccgggccccctcccaggcgctttctgggagcttttagaactgcgctctgaagtttccagagagcgaggagcttttgcggcaggcagagacaatggaagaaaatgaaagccagaaatgtgagccgtgccttccttactcagcagacagaagacagatgcaggaacaaggcaaaggcaatctgcatgtaacatcaccagaagatgcagaatgccgcagaaccaaggaacgcctttctaatggaaacagtcgtggttcagtttccaagtcttcccgcaatatcccaaggagacacaccctaggggggccccgaagttccaaggaaatactgggaatgcaaacatctgagatggatcggaagagagaagcgttcctagaacatctgaagcagaagtacccccaccacgcctctgcaatcatgggtcaccaagagaggctgagagaccagacaaggagccccaaactgtctcacagtcctcaaccacccagtctgggtgacccggtcgagcatttatcagagacgtccgctgattctttggaagccatgtctgagggggatgctccaacccctttttccagaggcagccggactcgtgcgagccttcctgtggtgaggtcaaccaaccagacgaaagaaagatctctgggggttctctatctccagtatggagatgaaaccaagcagctcaggatgccgaatgaaatcacaagtgcagacacaatccgtgctctcttcgtaagtgcctttccacagcagctcaccatgaaaatgctggaatcgcccagtgtcgccatttacatcaaagatgaaagcagaaatgtctattatgaattaaatgatgtaaggaacattcaagacagatcactcctcaaagtgtacaacaaggatcctgcacatgcgtttaatcacacaccaaaaactatgaatggagacatgaggatgcagagagaacttgtttatgcaagaggagatggccctggggcccctcgccccggatctactgctcatccaccccatgcgattccaaattccccaccgtctactccagtgccccattccatgcccccctccccgtccagaattccttatgggggcacccgctccatggttgttcctggcaatgccaccatccccagggacagaatctccagcctgccagtctccagacccatctctccaagcccaagcgccattttagaaagaagagatgtcaagcctgatgaagacatgagtggcaaaaacattgcaatgtacagaaatgagggtttctatgctgatccttacctttatcacgagggacggatgagcatagcctcatcccatggtggacacccactggatgtccccgaccacatcattgcatatcaccgcaccgccatccggtcagcgagtgcttattgtaacccctcaatgcaagcggaaatgcatatggaacaatcactgtacagacagaaatcaaggaaatatccggatagccatttgcctacactgggctccaaaacaccccctgcctctcctcacagagtcagtgacctgaggatgatagacatgcacgctcactataatgcccacggcccccctcacaccatgcagccagaccgggcctctccgagccgccaggcctttaaaaaggagccaggcaccttggtgtatatagaaaagccacggagcgctgcaggattatccagccttgtagacctcggccctcctctaatggagaagcaagtttttgcctacagcacggcgacaatacccaaagacagagagaccagcgagaaaatgatgaaaaccacagccaacaggaaccacacagatagtgcaggaacgccccatgtgtctggtgggaagatgctcagtgctctggagtccacggtgcctcccagccagcctccacctgtgggcacctcagccatccacatgagcctgcttgagatgaggcggagcgtggcggaactcaggctccagctccagcagatgcggcagctccagctgcagaaccaggagttgctgagggcaatgatgaagaaggccgagctggaaatcagtggcaaagtgatggaaacaatgaagagactggaggatcccgtgcagcgacagcgcgtcctagtggagcaagagagacaaaaatatcttcatgaggaagagaagatcgtcaagaagttgtgcgagttggaagactttgttgaagacttgaagaaggactccacggcagccagccgattggttactctgaaagacgtggaagacggggctttcctcctgcgtcaagtgggagaggctgtagctaccctgaaaggagaatttccaaccttacaaaacaagatgcgagccatcctgcgcatagaagtggaggccgtgcggtttctgaaggaggagccacacaagctggacagtctcctgaagcgtgtgcgcagcatgacagacgtcctgaccatgctgcggagacatgtcactgatgggctcctgaaaggcacggacgcagcccaagccgcacagtacatggctatggaaaaggccacagccgcagaagtcctgaagagtcaggaggaggcagcccacacctccggccagcccttccacagcacaggtgcccctggcgatgcgaagtcggaagtggtgcctttgtccggcatgatggttcgccacgcgcagagctcccctgtggtcatccagccctcccagcactccgtggccctgctgaaccctgctcagaacttgcctcacgtggccagctccccagccgtcccccaggaagcaacctccactctgcagatgtcgcaggctccgcagtccccacagatacccatgaatgggtctgccatgcagagcttgttcattgaagaaatccacagtgtgagtgccaagaacagggcagtgtctatcgagaaagcagaaaagaaatgggaggaaaaaaggcaaaatctggatcactataatgggaaagagtttgagaagctcctagaagaagctcaggccaatatcatgaagtcaataccaaatctggagatgccgccagccacaggcccactgccaaggggagatgccccagtggacaaggtggaactttcagaagattctccaaattcggaacaggacttggaaaagctggggggaaagtcgccccctcctcctccgccacctcctcgtcgaagctacctgccaggatcgggactcaccaccacgaggtcaggcgatgtggtctacaccggcagaaaggagaacatcaccgctaaggcaagcagtgaagatgctggaccaagcccacagaccagagctacaaaatatccagcagaggagcctgcttcagcctggaccccatccccaccgcctgtcaccacctcctcctcaaaggatgaggaggaagaagaagaagaaggagacaaaataatggcagaactccaggcattccagaagtgttcctttatggatgtaaattcaaacagtcatgctgagccatcccgggctgacagtcacgttaaagacactaggtcgggcgccacagtgccacccaaggagaagaagaatttggaatttttccatgaagatgtacggaaatctgatgttgaatatgaaaatggcccccaaatggaattccaaaaggttaccacaggggctgtaagacctagtgaccctcctaagtgggaaagaggaatggagaatagtatttctgatgcatcaagaacatcagaatataaaactgagatcataatgaaggaaaattccatatccaatatgagtttactcagagacagtagaaactattcccaggaaactgtgcctaaggccagtttcggtttctctggcattagtccattagaagatgaaataaacaaagggtctaaaatctcaggcctgcaatactctatacctgacaccgagaaccagacgctgaattacggaaagacaaaggagatggaaaagcaaaatacggataagtgtcacgtttcctctcacactagactaacagaatcaagcgtgcatgattttaaaacagaagatcaagaggttatcacgacagattttggccaagttgttctaagacccaaggaggcaaggcatgctaacgtgaaccctaatgaggatggagaatcaagttcaagttctcccactgaagaaaatgcagccactgacaatattgccttcatgattaccgaaaccactgtccaggttctttccagtggggaggtgcatgatattgttagccaaaagggagaagacatacagacggttaatatcgatgccagaaaagagatgaccccccgacaagaagggactgacaatgaggatccagtcgtgtgcctggacaagaaaccagtgatcatcattttcgatgagcccatggacatccggtctgcctataagagactttcaactatctttgaggaatgtgatgaggaattagagagaatgatgatggaggaaaagatagaggaggaggaagaggaggaaaatggggattctgtagtccagaataataacacttcccagatgtctcataagaaggtggccccaggcaatcttagaaccggacaacaggtggaaacaaagtcacagccacactccctggccacagagaccagaaacccaggaggacaggaaatgaacagaacggagctgaacaagttcagccacgtggattctccaaattcggaatgcaagggtgaggacgcgaccgatgaccagtttgaaagccccaagaaaaagtttaaattcaaattccctaagaagcaactcgccgctctcactcaagccattcgcaccggaactaaaacagggaagaagactttgcaagtggtagtctatgaagaagaggaagaggatggcaccctgaaacagcacaaagaagccaagcgcttcgaaatcgctaggtctcaacctgaagacacccctgaaaacacagtgaggaggcaagagcagcccagcatcgagagtacatctccgatttcaagaactgatgaaattagaaaaaacacctacagaacattggatagcctggagcagaccattaaacagctcgaaaatacaatcagtgaaatgagtcccaaagccctagttgatacctcatgttcttccaacagagattctgttgcaagttcatcccacatagcccaagaggcctctccccgacccttgctagttccggatgaaggtcccactgccctagagccccctacgtcgataccttcagcttcacgtaagggctccagcggggccccacagacgagcaggatgcctgtccccatgagtgccaagaacagacccggaaccctggacaaacccggcaagcagtccaaactgcaggatccccgccaatatcgtcaggctaatggaagtgctaagaaatctggtggggactttaagcctacttccccctccttacctgcttctaagattccagccctttctcccagctctgggaaaagcagttctctgccctcttctagtggtgacagctctaacctccctaatccacctgctactaaaccatcgattgcttctaaccctctcagcccccaaacaggaccacctgctcactctgcctccctcatcccttctgtctctaatggctctttgaagtttcagagcctcactcatacaggtaaaggtcaccatctttcattctcaccgcagagtcaaaatggccgagcaccccctcctttgtcattttcctcctcccctccttctcctgcctcctccgtctcactgaatcaaggtgccaagggcaccaggaccatccatactcccagcctcaccagctacaaggcacagaatggaagttcaagcaaagccaccccatccacagcaaaagaaacctcttaaaggtcaaatcctattaggcacaagtcggagttacatttaaaaaaaattaacagtctacaacaactgttttcacaagagaatgtaacatattgctgtatcgtttgaggcttaatgctaaatatgtgctaaatactggattaatagatttcagtaaagctcgttcgttttgtttggttttctttttacctagttgctatagtgtctacagtctatactcaatacctataaaatgcagtaagcatgtgttacagaaagaggttctggtgggagagaaaggtgcgtgtgagacaggagaattgtcttaagcatataaaacatgtatgattccagaattttagtatgttttgtataaaactatttttcattacggagactagaagtgaacagagaattacacaagtgtgactatacaaattgtaaaacagatactataatatttccttttattttagtgttatttagctttattacagatttctatttttgtcaaaacttcatggttcctttcaagatcttttttgccaaaacattttgatactatagcattgtacatttgaaagtagtgttctagactataaaaccaatgaacttctacatgagccctacagacaggcatgtgtagaaggcaatttatcaaacctattgcactgccatgaaaagtgtgtataataatttgctagcccaagcaagctagttttctttgcttgcttcttttctttcttttttccttccttttttttttttttttcttttttaacatgttgagattctctagttgttttctttggcgtatctaaccccttcttttgttttctgagacctggtaacccacgctcttgcattgtggattttaaaatgtatactctgtacggttctgtaaaccgaaaaacttttgtaaatatataaatatacatagacataaaaatactgtatgtgacagcacatagagtagttttcccacaccaaagttaatttttatgcatgctttaaaagtatatatcgggaccggcagaaatggaagtatccatacatttttaaaaagcaacaagtttgcacagctagagtgtttttgtaaataaatgtatttgtataacacagtcatgtaatatacagaactataagcagagactttgcaaaactaaataaagggctgcatgcttattattttttgtaccttgtcactataactacttcctagtcaaagaacgaaatgtaactgttaccgagttaaatgtttttccgctttgagggatgtaaccacatccactcagaggacactacttttctgaaagctctggggtgactaatgatgagttcctaataaattaattgcaagtgtggtgccttggatgtggcctgttggctcgctttcttctctgtggcttatcaaggtgtagatgacagaaagcaaacctggatacagagtttccaccctcagttcctggaggggctcttattattttctctctttttaaaaaacttccagtagaagtaaagtggaaataaaatgtctttatc

SEQ ID NO: 3346 - DNA, 3382 bp, Homo sapiens
  source 1..3382: mol_type = genomic DNA
agtcgtgcgacgccgggcggttgcgtgtggtgcgcgggggcgcgggctgcgtgtggcgcggggcggggcgcggctggtgcgcttgagaagcgatggcggcggcctgaactcacctaacaccgcagcagcaaccgggcccggccaggttcggcgttccgtgagtgaacgatttagaaatctggactggccagtgacctctgggcttgccattccagcctggtataacctctggctccatgggcagctactggctcctacagaccggatgaagcagactggagacacaagtggagaaaacctccagctggcaaatcctcagagtgtaggcctctggctgccagtcctgcccagcctgcctcatggagaggatgaattggctgagcagactggcctcccggggccctgggcaccgtatacctcaaggggccaatctccaaaccccagtcatggctgatcccgagacctgcctcatggtcttcaagaatcactggtcccaggtggtgcgaatcctggagcggcaaggccctcgggcagctcctgggggtgcagacgatctcagtgctgtgcgcaaccacacttaccagatgttgacactgctggcagaggaccgtgcagttccctcggcccccacaggccctgggcccctgctggagtttgctctgcacgaggatctgctgacccgtgtgttgacatggcagctgcaatgggatgagcttggggatggggtcgaggaacggcgggctgagcaactgaaactatttgaaatgctagtgagcgaagctcgccagccactgttgcggcatggtccagttcgtgaggctctgctcaccctgctggatgcctgtggccgccctgtgcccagtagcccagcactggatgaaggcttggtgctacttctcagccagctgtgtgtttgtgtggcccaggagccttcattgctcgagttcttcctgcagccacctcctgagcctggagccgctccccgtcttcttctcttttctcgccttgtcccttttgtgcatcgagagggcaccctgggccagcaggcccgtgatgccctacttcttctcatggctttgtcagctgggagccccactgtgggccgctacatcgcggatcactcttacttctgcccggtgctggccacagggctcagtgccctgtactcatcactgcctcgaaagattgaggttccaggggatgattggcactgtctgcgacgggaagactggctgggagtgccagcccttgcactcttcatgagttccctggagttctgcaatgcagtaattcaggtggctcaccccctggtgcagaagcagttggttgattatatccataatgggttcctggtgcctgtcatgggtcctgccttgcacaagacctctgtggaggagatgatcgccagtaccgcctatctggaacttttcctacggagtatctcagagcctgctttgctccgtaccttcctgcgattcctgttgttgcaccggcatgacacccacaccatcctcgacaccctcgttgctcgtattggcagtaactcccggctctgcatggtctctctgagtctcttcaggaccctcctgaacctcagctgtgaggatgtcctgctgcagctggttctcaggtatcttgttccatgtaaccacgttatgctgagccagaagccggctgttcgtgatgtggacctatatggacgagcagctgacaagtttctctccctaatcccacgctgttgtcggcaccacgcccccagcccacctcgtccagagcatgcctcatgggcacgaggtcctggaagcccaagtgtggactcctcttctgtgacgacagtaccccggccctccacaccatctcgtctggctctcttcctgcggcagcagagcctgggtggctctgagtctccaggcccagccccttgctcaccagggctttctgcatcccccgcctccagccctggccgacggcctacccctgcagaggagcctggagagctggaagacaattacctggagtatctgcgtgaggcacgtcgtggtgtggaccgctgtgtccgagcctgccgtacctggtctgccccctatgatggcgagcggccctctcctgagcccagtccttttggctcccggactaagaaacgcagcctactgcctgaggaggacaggaacaacgtgggggaaggggaggaggaagagctggggaggagggggcgggctgggggtgcaggggagggccctggtcacctgccccctccccagctcaatggagtgccaggatcatggcctgagggggccaagaaggttcgtctggtgccaaaggagggagctggggaactgctagagggcatctccgagggcatggcaggactagagggctttgggcaggagctccgggagctagaggtggcattgagcaatgggggaactggctcagagtcccccttagaacctccactgccccttgaggaggaggaggcctacgagagcttcacctgtccccctgagccccctggccccttcctcagcagccctttgcggactctcaaccagctgccaagccagcccttcactggccccttcatggctgtgctctttgccaaactcgagaacatgctgcagaactccgctctttcctgctcaacaccaacatggtcttccagcccagtgtcaagtccctgctgcaggtgctgggctctgtgaagaataagattgagaactttgcggcttcccaggaggacttcccagcactgctgtccaaagccaagaagtacctcattgcccgtggcaagttggactgggctgagggccctgcagcaggacctgccccacgccgttctgatcccctagtgaagagccggaggccatccttgggggagttactcctgcggcatgcacacagtccaaccagggcccggcaggcggcacaattggtccttcagcctgggcgagacggagcaggacttggcctaagtgggggctcccctggggcttcaactccagttctactcacccggggcggggcccctgaacgccaaggtgaggctcttcgagtcaagaatgctgtctactgtgcagtcattttccctgaatttctcaaggagttggctgccatctcccaggctcatgccgtcacctcgcctttcttgttggagacttcagaggaaggatctggccctctcatctcaggctgtgggcccctcaatccttaactttcttccatggacaatcagggccatgggtggcccgggctggggctagggcacaggctcctttttatgtttggaggcagtggcaaaaggactttttaatttatttcagatgaatgttttatggagaacttgttgcaatatgtataaaagggaaatctctattctgtgctc

SEQ ID NO: 3347 - DNA, 1624 bp, Homo sapiens
  source 1..1624: mol_type = genomic DNA
tttctgttgtgtagttctgattttccgaacaggtgtttagatgatgaggggttatattaagaaagtactaaagaatacgtcttatcacgtgaatcagtatctttttattcaacatggatggagtgggagtggagaccaatctgttttatattcctgcaatctgatgaggatggtcacaagaacaaagaaaatatttgtaggcgggttatctgcgaacacagtagtggaagatgtaaagcaatatttcgagcagtttggcaaggtggaagatgcaatgctgatgtttgataaaactaccaacaggcacagagggtttggctttgtcacttttgagaatgaagatgttgtggagaaagtctgtgagattcatttccatgaaatcaataataaaatggtagaatgtaagaaagctcagccgaaagaagtcatgttcccacctgggacaagaggccgggcccggggactgccttacaccatggacgcgttcatgcttggcatggggatgctgggatatcccaacttcgtggcgacctatggccgtggctaccccggatttgctccaagctatggctatcagttcccaggcttcccagcagcggcttatggaccagtggcagcagcggcggtggcggcagcaagaggatcaggctccaacccggcgcggcccggaggcttcccgggggccaacagcccaggacctgtcgccgatctctacggccctgccagccaggactccggagtggggaattacataagtgcggccagcccacagccgggctcgggcttcggccacggcatagctggacctttgattgcaacggcctttacaaatggataccattgagcaggtgctttcgttgccatctcactctgagagcatacctggatgtccaggcaagactgggcgaagtttctgagtggccctttgtttaggtgatgtcctcagacctggacccccaccagcctcactccccatcccaaccagagatggctcacttcggatcgagggttgactacatctcatcatctcacgaatctgctgtaatataagacaacagcttttaaatgtgtatataacccatgatttcggttttgttttgttttgtttttcttgatggtttccctctccctccctctcttcccattctccttttaaatctctttgaatcacatttggtagtgattttgacttagtccagtagtcacatagctttaatatctagttcaaagctaaccatagtataattgttatattaaggagttattttttcttaaaacatttttttttgcttgttttggttctgttctcacttttaaaggatgctgagatggtaatatgactctccatattttggtaccaattctgagactgtatgaattttcaggtggaactttagcacacactgaagcaaagttgtgaagtgcagggcgggaggtgggcgtgagctttctattttgcgttgtagaagaagtgagatgtagtaagctaattaacagactttctagcagttctttttgtgatgtctctttgttaatctgagtctatctattttcggcaataaggtaaggacgacagtgttttgagtgtcctccttttctataagtgctttttttctgttgaaag

SEQ ID NO: 3348 - DNA, 615 bp, Homo sapiens
  source 1..615: mol_type = genomic DNA
attaggaagagtagccagggaagtggaaacttcaggctaccccctgggcttggagccctgagtctgtccccaggggctgacttcctgcattcctctagggagttcctgacagctggattctagaagtagaactatgagctcacctttggcctcccttagcaagacccgaaaagtgcccctgccctcggagcctatgaatcctgggaggcgaggaatccgcatctatggagatgtccctgcatcccatgactcggagctgatggccttcatgacgaggaagttgtgggacctggagcagcaggtgaaggcccagactgatgagatactgtccaaggatcagaagatagcggccctagaggacctggtgcagaccctccggccacacccagccgaggcaaccctgcagcggcaggaggaactggagacgatgtgtgtgcagctgcagcggcaggtcagggagatggagcggttcctcagtgactatggcctgcagtgggtgggcgagcccatggaccaggaggactcagagagcaagacagtctcagagcatggcgagagggactggatgacagccaagaagttctggaagccagggggactcattggcgccccctg

SEQ ID NO: 3349 - DNA, 782 bp, Homo sapiens
  source 1..782: mol_type = genomic DNA
ttcagtgcagtcaccggcacagcagcaggtacctgccagacctggggctccctctgttcaagtgccatctccttttctacttcaaaaccaatatgagcctgttcagccccactggttttactgcaaggaggtagaatacaaacaactgtggatgccttttagtgtgttcgactctttgaatcttgaagaaatctataattcagttcagccagatccggagagcgtggttcttggcacggatggagggcgctacgatgtttacctctatgaccgaataaggaaggctgcctactgggaagaggagccagccgaagtgagacgctgtacttggttttacaagggggacacagatagtcgatttattccctatactgaggagttcagtgaaaaactagaggtacgggtgctttatttctttatgagtttctttaaaaaatgtaggtcctatatacattggtgagtaacatcattcacagtggagcggactttacttacaagacagcttgttttgatgctgttcacagagaagattactttttaagtggtgtcatcactcatgaggtgctaatcgtggcatctgtgtctaaagatagaatatgatttgcagagacacatcacagatctaataaggtgcttgtgtcaagccttcaatagaacctaggccgctgggatttgttgttgatagaagatgccaagcatatggacattttcaaattagtattcagtaaaaggcttgaaattaacctctgatttgtgaaaataaataaatagaattggaagaa

SEQ ID NO: 3350 - DNA, 1544 bp, Homo sapiens
  source 1..1544: mol_type = genomic DNA
ctgagctcctgtgtgtagagcgttgtgctcggtgctgtttgcaagggaatcaaagaagtaggagatgatacttcctcttcttgacagccttatggttaaggtaagaagaaagcagcggcattgttcgacagccaggccccaatttgccccatctgccaggtcctgctgaggcccagtgagctgcaggagcatatggagcaggaactggagcagctagcccaactgccctcgagcaagaattcccttctgaaggatgccatggctccaggcaccccaaagtccctcctgttgtctgcttccatcaagagggaaggagagtctccaacggcatcaccccactcatctgccaccgatgacctccaccattcagacagataccagacctttctgcgagtacgagccaaccggcagacccgactgaatgctcggattgggaaaatgaaacggaggaagcaagatgaagggcaggtatgtcccctgtgcaaccgccccctggcaggatcggagcaggagatgagtaggcatgtggagcattgcctttctaagagggaaggctcctgcatggctgaggatgatgctgtggacatcgagcatgagaacaacaaccgctttgaggagtatgagtggtgtggacagaagcggatacgggccaccactctcctggaaggtggcttccgaggctctggcttcatcatgtgcagcggcaaagagaacccggacagtgatgctgacttggatgtggatggggatgacactctggagtatgggaagccacaatacacagaggctgatgtcatcccctgcacaggcgaggagcctggtgaagccaaggagagagaggcacttcggggcgcagtcctaaatggcggccctcccagcacgcgcatcacacctgagttctctaaatgggccagtgatgagatgccatccaccagcaatggtgaaagcagcaagcaggaggccatgcagaagacctgcaagaacagcgacatcgagaaaatcaccgaagattcagctgtgaccacgtttgaggctctgaaggctcgggtcagagaacttgaacggcagctatctcgtggggaccgttacaaatgcctcatctgcatggactcgtactcgatgcccctaacgtccatccagtgttggcacgtgcactgcgaggagtgctggctgcggaccctgggtgccaagaagctctgccctcagtgcaacacgatcacagcgcccggagacctgcggaggatctacttgtgagctatctgccccaggcaggcctcgcctccagcagccccacctgcccccagcctctgtgacagtgaccgtctccctttgtacatacttgcacacaggttccccatgtacatacatgcacatactcaaacatgcgtacacacacacacatttacacacgcaggactctggagccagagtagaggctgtggcccaggcactacctgctggctcccacctatggtttgggggccatacctgttccagctctgttcccagggtggggcagggaggtgggggttgggggagtagtg

SEQ ID NO: 3351 - DNA, 2744 bp, Homo sapiens
  source 1..2744: mol_type = genomic DNA
gcggcgccgggcttcccacggacggggccccgcggggttgcccggccgtgcccgctgtgcccggctctgcccggcgcggccgcggagcgcacgcctcctgcctgctgaccctctcgtttggtttctcgcaggcctctgccgcagacatggagaaactcagcgcgctgcaggagcagaagggcgagctgcgcaagcggctgtcctacaccacacacaagctcgagaagctcgagaccgagttcgactccacgcgccactacctggagatcgagctgcggcgcgcgcaggaggaactggagaaggtcacggagaagctgcgcaggattcagagcaactacatggcactgcagaggatcaaccaggagctggaggacaagctgtaccgcatgggccagcactatgaggaggagaagcgtgcgctgagccacgagattgttgccctcaacagccatctgctagaagccaaggtgaccatcgacaagctgtcagaggacaacgagctctataggaaggactgcaatctagcggcccagctgctgcagtgcagccagacctacggcagggtccacaaggtgtctgagctgccctcggatttccaggagcgcgtgagcctgcacatggagaagcacggctgcagcctgccatccccgctctgccacccggcctacgccgacagcgtccccacctgcgtcattgccaaggtgctggagaagccggaccccgccagcctgtcctcccgcctgtccgatgcctccgcccgcgacctggccttctgcgacggggtggagaaaccaggcccgcggcccccctacaagggagacatctactgcagtgacacagccctctactgcccggaggagcggcggcgagaccggcggcctagcgtggacgcgcccgtgaccgacgtgggcttcctgcgggcccagaactccactgacagcgcggccgaggaggaggaggaggccgaggcggcggccttcccggcgggcttccagcatgaggccttccccagctacgcaggctcactgcccacgtccagctcctactccagcttcagcgccacgtcggaggagaaggagcacgcgcaggccagcacgctgaccgcgtcgcagcaggccatctacctgaacagccgcgacgagctcttcgaccgcaagccacccgccaccacctacgagggcagccctcgctttgccaaggccacggccgcggtggcggccccgctggaggccgaagtggccccaggcttcgggcggaccatgtcaccgtacccggccgagaccttccgcttcccggcctctccgggtccccagcaggccctgatgcccccaaacctgtggagcctgcgggccaagccggggaccgcccggctccccggggaggacatgaggggccagtggcgtcccctgagcgtggaggacatcggcgcctactcctaccccgtgagcgctgccggccgcgcctcaccctgcagcttctctgaacgctactacggcggggccgggggcagcccgggcaagaaggccgacggccgcgccagcccgctctacgccagctacaaggccgacagcttctccgagggggacgacctctcccagggccacctggcagagccctgcttcctgcgggcgggcggcgacctgagcctcagtcccggccgctcggctgacccactgcccggctatgcacccagcgaggggggggacggggacaggctcggggtgcagctgtgtgggaccgccagcagccctgagcccgagcagggttccagggactccttggagccgagctccatggaggcctccccggaaatgcatcctgccgcccgcctcagcccccagcaggcctttccgcggactggtggctcggggctgagccgcaaggacagcctcaccaaggcccagctctacggaaccttgctcaactgagcgcctgcgtgcaggcctggccgtggttcgctccccgccagcccacgtgccccagaagggccggcctcacctctccccagcccccgctgttcccctgccccggccaacaacgaggagtctgttcctccccgcacctcctctcctccccagccctgtaggcctgaggggagggtcccccacaccacggtgtccacccggccccggcccgtggaactccacttagagcgtttttcacgcgtccttcccccatgtgagaggagcatccccccttttataaagcgaaactatttttatagagaaaaagggtctttcttaacgcacttggcctccagctccctggacggctgccttggcgttttcaacacaaagctcctttattttttgggcgagggtgcgtggggcctgccccttggaagggaagggaaggacggtgtcctgtggagaccagactctgcaagtggggagaccacccccgcaagccagtgacaagggagccctgaagttgtgtccacgaagagggagctgaaacaaattcggggctatgaagtgttttaaaaatccattcttcgcagtgtggccaccacaccgccctgagccctcccacggcccatcgtcccgggtgggccgggatgatgccccagtgcggccggtgctcatctccgcccccgggtccgccccctgacaccgtcttactctacctcagacatgaggaggccctccattcctggtttctgtagcttgcattcttgttgtctctgatgcatgccctgccagttagtactgtattttgcattcattaataaaagacaccggtgg

SEQ ID NO: 3352 - DNA, 456 bp, Homo sapiens
  source 1..456: mol_type = genomic DNA
cttgcccttcagatctctgagaacttgtttagcaacaaagtcctcaatgccttgaaaccagaaaaagatgtggatggagtaacagacataaacctggggaagctggtgcgaggggatgcccatgaatgttttgtttcacctgttgccaaagctgtaattgaacttcttgaaaaatcaggtgtcaacctagatggaaagaagattttggtagtgggggcccatgggtctttggaagctgctctacaatgcctgttccagagaaaagggtccatgacaatgagcatccagtggaaaacacgccagcttcaaagcaagacggagtctcgttctgtcaccaggctggagtgcaggcgcgtgatctaggctcactgcaagctctgcctcccaggttgaagtgattctcctgtgaaagggaattatttttgatgagtcattaaagtatatccattcccagaa

SEQ ID NO: 3353 - DNA, 1533 bp, Homo sapiens
  source 1..1533: mol_type = genomic DNA
attggctgacaggtgatttctggatgtcaggaacatttctgattaggaaaccacagcttctccagggagtctatgccatgggcttcaatcgaccctccaagatacaagagaacgcattacccatgatgcttgctgaacccccacagaatctgattgcccagtctcagtctggcactggtaaaacagctgcctttgtcttagccatgctcagccgagtggagccatcagacagatacccccagtgtctgtgcctctccccaacatatgagctggcgcttcaaacaggaaaagtgattgagcagatgggcaaattttacccagaactgaagcttgcctatgccgttcgaggcaataaattggaaagaggccagaagatcagtgagcagattgtcattggcacccctgggaccgtgctggactggtgctccaagctcaagttcattgatcccaagaaaatcaaggtgtttgttctggatgaggctgatgtcatgatagccactcagggccaccaagatcagagcatccgcatccagaggatgctgcccaggaactgccagatgctgcttttctccgccacctttgaagactctgtgtggaagtttgcccagaaagtggtcccagacccaaatgttatcaaactgaagcgtgaggaagagaccctggataccatcaagcagtactatgtcctgtgcagcagcagagacgagaagttccaggccttgtgtaacctctacggggccatcaccattgctcaagccatgatcttctgccatactcgcaaaacagctagttggctggcagcagagctctcaaaagaaggccaccaggtggctctgctgagtggggagatgatggtggagcagagggctgcggtgattgagcgcttccgagagggcaaagagaaggttttggtgaccaccaacgtgtgtgcccgcggcattgatgttgaacaagtgtctgtcgtcatcaactttgatcttcccgtggacaaggacgggaatcctgacaatgagacctacctgcaccggatcgggcgcacgggccgctttggcaagaggggcctggcagtgaacatggtggacagcaagcacagcatgaacatcctgaacagaatccaggagcattttaataagaagatagaaagattggacacagatgatttggacgagattgagaaaatagccaactgagaagctccaccagccactgatgccagccctggcactgcccctgcacaggagacaagtgcatttagggcacaggccccgacatcaccccaaggacaacggcagaagtagagagaaactacctacctcacttcaaattatgtttggacttgacaaaaataggtgcaaatgatggggggcaatagaagaaaaaatttgcattttggaaaattgggtcctttccccacttttttaaagccacattcccccatctttataataatctggtcacagtggtagtcgctggccccaggaccccctcctgattttggctaggcatcgtggaaccagctccagcccctgaaga

SEQ ID NO: 3354 - DNA, 5961 bp, Homo sapiens
  source 1..5961: mol_type = genomic DNA
ttgagacaatgttataattataattgcccttcctttttggctgctgctttagccagagccacatcagatgaagtccttcagagtgatctttctgcacattatatcccaaaggaaacggatggcacagaagggactgtggagattgagacagtgaaattggcccgttctgtcttcagcaaactacacgagatttgctgcagctgggtgaaagacttccccctccgcaggagaccccagctttattatgagacatcaatccatgccatcaaaaacatgcgcaagctattctataaacatataagcaaaaaaaaaaaaaaaagaaagaaaagagattgggaccaggaagaacaagcttactttgcagtgtttgatggccatgggggagtagatgctgctatttatgcctccattcacctccacgttaacttagtccgccaggagatgttcccccatgatcctgctgaggccctgtgcagggccttccgggtcactgatgagcggtttgtgcagaaagcagccagggagagcttaagatgtgggaccacaggagtggtgactttcatcagaggcaacatgctacatgtggcctgggtgggtgattcccaggttatgcttgtgagaaagggccaagctgttgaactaatgaagccacacaaaccagacagagaggatgaaaagcagagaattgaggcccttggaggttgcgtagtctggtttggtgcctggagggtgaatggaagtctgtcggtttccagagctattggagatgctgaacataagccatatatctgtggggatgcagattctgcctccactgttctggatgggaccgaagactacctcattctggcctgtgatggcttctatgacaccgtgaaccctgatgaggcagtgaaagttgtgtccgaccacctgaaagagaataatggagacagcagcatggttgcccacaaattagtggcatcagctcgtgatgctgggtcaagtgataacatcacggttattgtggtattcctgagggacatgaacaaagctgtaaatgttagtgaggaatcagattggacagagaactcttttcaaggagggcaagaagatggtggggatgataaggagaatcatggagagtgcaaacgcccttggcctcagcaccagtgctcagcaccagccgacctaggctatgatgggcgtgtggattcattcactgatagaactagcctgagcccagggtcccaaatcaacgtgctggaagacccaggctacctagatctcacacaaatagaagcaagcaaacctcacagtgcccagtttttgctaccagttgagatgtttggtcctggtgcaccaaagaaagcaaatcttattaatgagttaatgatggagaaaaaatcagttcagtcatcattgcctgaatggagtggtgctggagagtttcccactgctttcaatttgggttcaacaggggagcagatatacagaatgcagagcttgtctcctgtctgttcagggttggaaaatgaacagttcaaatccccgggaaacagagtttctagattgtctcatttacgccaccactactcaaagaagtggcacagattcaggtttaatccaaagttttattcatttctctctgctcaagagccttcccacaaaataggcactagcctgtcctcacttactggaagtgggaagagaaataggataagaagttctctgccatggaggcaaaatagttggaaagggtacagtgaaaacatgaggaagctcagaaagactcatgatattccatgcccagatcttccttggagctataaaatagaataatttttctttcaagtaggttagctagctctcccccaataaaaataccactatcagagtagaaacaaggtagacatttctaaaacatatgtgcttcattatgaatccatggatggctcaattcttaaatgtaaatagatctctaggaaactcaaagtacagtgttttcaatctaaaaagaagtattggcagtttcacttgcaaaattacacagctggtccctgtgatgtgtctcgacaccaatacacaacccccttcccaccatccttcatgtcactagatacacaacccccttcccaccatcccttcagtcactagtggaagctttcaagttagttatttcagtcaggatatacagtgttgaaatctcaatgcagttgaaatctggtctgatgtgcctaatttatctgtggaaaatttaatgctgaattacatttggttgggaaatgtccctcaaaatcctgggcactatgaaggaaccccctgccccctcacctttttgggtaggtaaaagactaaaagccatatggattttaactgataacaatgaaagtggtaaatcagtgtaaaagtgtcatattctcagacttgtgaggcggtttatagtcagaaagatttacggatttttttcctgtaacataaaagattgtgaactttttttaattaaaaaatatttcctagggctgtagttatttgggagtttcataacctgttatggtgcttttggtggaaatttttattatttagcattttaggagaccgctgtcaactggttttaatctatgatgctaatgtgttttccactgtaccctcatctcaggaataaaactgctttaacggagatgatgtcaggtacaaatacactatagagtcaaaataccatttacaaagaaaatcaaaagcatttctatattttgtctttttttagttcagacagcaaaggcatgtactactataaaatacaaagtgattttagagaatgaaaaatgctacttttatcttctctaaaattatttcccccaaggtagtgaagtaattggaatgaaggaggctgaaagtattgtctaaagtgagcccagaggccactgagaatgcagattactgacagccaggtctgtttagttgtaattggaagacacatgagtgtcctgcttacatgtagcttcagactgcagagacaggacgtgtgcttttcatttcaatatttagttatatttgatattttgaaactgtctgctttttgctatttctgcagtttcaagttagttagaagcatgttgtcaactaaagacaacaaactatcagattcattcattcagtgaagcagcctctgattctctaagagtcacgaatgtcttagtgttaccctcccctagtcaacagcagaccagcctggccaatgcctatgggtggcccctctggagtgctcactaacaagggtgagtgctctcgctaagaagtgtcccccgcctaatcatgtgtttataggatagtacacgttccccaggcccataacagaggactaaaatctctgaattttaaagacacagatgactggcatattttggataccagtatagctatatcaaatagacaaaaacagcttcactttagcaatgatcagattgttaatctacagattttattttttaaaatttggatgtaagtagagactttcagtatttgttttctcttgattttgaagtcatttcttcttctcacgtctgtgacaaatggttgaaaaggagtcaacatggccccaactatagtgccggaaccttttcatcattctgaggctttgccccacacatggtcctcactcatatctgtcaccttctgaagcctagatcttgttaacccatcaggtgcagtgtcagtttcaaatcaaattatctaagaaaacaagaaaacaaaggcagcagactattggtacacattatagtccaaagtgcttagcgaagtaaaaaaaaaagctttttaaaatttctattgttgtctattggtaatgtttttgatcagaataaagagggtaaagggaaaaagttactacacatgctaggctttctcagtggggaaaaaaatggctggatagaactgggacaaacacagacccatctttaggggtctggattttgtaggtccgactacacagcagtgttaactcatttctcatgccattagctctctacaaaataaagcaaagtagttctagtgtggtcgttataaaccaatattgtgaaaaatagcaactattcatttgttcacaacatgcgtatttatagagtagttaggtaccatttgtaaggtaaatcctttaaaattctataatacatactaaaatagtggttattggtctgatatatgctgctcttggttctataaactagataaaagcagtgctttgtgaaatgcagtgttctctcttaacgccactggtgataggaagtagttcccttcagttcaaatcctgtgcccttatttgctgcttgctgacgtaagcaataagtaaccctctaactaatggtatctacatatttctgtaacttgtatttaatgatggtgtacctggtgattgtaaaaatattagacagatataaaagtatctatataatatctataaactgttaatgctgaggtatagtctgtgaattatgtgttttgtatttttattcattgtgtaatttagtggtggtgaaagttctacactcaatccttaaagagtggcagtatccctttttcaatttaacatggtctgcatcaatctgtttgcctgctaaacaagttagaataggaaatagtaaaataaatccaaacaagagtgtaatattggttagggaaacaaacttcaggtcaccaactgaagtcattacaaactccttgtacattcactgtgagtttcaaagggagtcagtccctaatttacaggtttcctttgttcactttctagatgtgtacttttgagggacatgaggttaggcaacattacagcaacacacactggggctattaatcccatttaggtctgtactaaagaggatgggtagaaacacatatgtatataccttttctttacctagaagtgccatccattgtccttgaattattatgattaaagttactgttgcatttaggaggctccttgaaagtaacaccttttccaaggacaatggcaacaatgtcaatgtcaacactgagtctaattttgaccacatttatagtggtatagtgtcaatactgcattttcatgacaaccacactccactgttgaaacactgtgccagtgagaagtgcaacatccagtgggcagatgaaaatgatgcatggccaagttcagtgtttacagataaaactgctgtggttcaagtgcttccttccccatcaaatccttgataaggctttgtgggaaaatgatctaaattattgttttaatttttaaacctaatttattcactcagtgaacattcttacctaagcaaggctataaaagggaatactacagttttgtccacactttaatttgagaccatttttctttgaatcgtaagttagcaaaagaaatttttttcacctttgaaaatcacgtgatgttaaaggacaaatgcccactcttctattctgatctgcaaatagcttaaatgtctcttgcaaaacaaagtaagataccaccagtattacaacacaatgattttccagacaaatggtatggtgttgaaaaataactgttacttcttaaagcagcattttatcttctattttgaagactatttattgtaataattagaaaacatgaaatagggaactccagactgacacagcagttgtttttgaaaaggaaataaactttgatgaattagataatccagatacatcattgtaaactcttactctaggtgctctttggtgagagacaggctttgttctcttgttcataacatttctctgcaaagaattctctatggagtgaagcgaatgaagtgaataatttcttaccaaataaatttatcaatttacaaatctgctctacatctcacttttgagttcagttgtagtcatgagtgatccttcatattttattaaaagtgttcattcaggtaaggtgtatgttgaaattttgccaattatcttaataaaacctggcaattt

SEQ ID NO: 3355 - DNA, 1085 bp, Homo sapiens
  source 1..1085: mol_type = genomic DNA
actcccagactccttgcggagctcgccgcctgattctaggctggtcactactccgagcctgtgacgtttgcggcagccaggccgtcgacgatgcccagtgaaactctctgggaaattgcaaaagctgaagtggaaaaaaggggaattaatggaagtgaaggtgatggagctgaaattgcagaaaaatttgttttcttcattggcagtaaaaatgggggaaagactactattattctaaggtgtcttgacagccaaaagatatcgctcacttttgggaactcggtggaggaacctctttattggacttaatcagcatacccatcacaggtgacaccttacggacgttttctcttgttctcgttctggatctttcaaaacctaatgatctctggcccaccatggaaaatctcttgcaagccacaaaaagccatgtagacaaagtgataatgaaactgggaaagacaaatgctaaagcagtttctgaaatgagacagaagatctggaataatatgccgaaggatcatcctgatcatgaattaattgacccatttccggtacctctggtcataattggaagtaaatatgatgtttttcaggattttgagtctgagaagagaaaggtaatatgcaagacacttcgatttgttgcacattattatggagcatcattaatgtttaccagtaaatcagaagctctattactaaaaatacgtggagttatcaaccagttggcatttggcattgacaaaagcaaatcaatatgtgtggatcagaataaaccgctgtttatcacagcaggattggattctttcggtcaaataggatctcctcctgttcctgaaaatgacattggaaagcttcatgcccactcacctatggagttgtggaaaaaagtgtatgaaaagctctttccaccaaagagtattaacacgctgaaagatatcaaggaccctgcgagagatcctcagtatgctgaaaatgaagtcgatgagatgagaattcagaaggatctggaactggaacagtacaaaagaagttcttccaagtcttggaaacaaatcgagcttgattcttgaacctatttc

SEQ ID NO: 3356 - DNA, 932 bp, Homo sapiens
  source 1..932: mol_type = genomic DNA
cgccgctgaaggtacgcgtgagggcctgcgctggagccggcttgacaggtcggcttacccgctggccgcctcctgacaagcgggagggatccgcggtggacccagggaagcggaggagcctggcggccaccccctcttcctcacttccctgtactctcatcgctctcggcctccgacacgaaaaggaagcaaatgagctgatggaagatctgtttgaaactagacagggtcttgccatgttctggaactcataggctcaagtaatcttcctgcctcaacctcccaaagtgctggaattacagttccaagatgagatgggattctccaacatggaagatgatggcccagaagaggaggagcgtgtggctgagcctcaagctaactttaacacccctcaagctctacggtttgaggaactactggccaacctactaaatgaacaacatcagatagcgaaggaactatttgaacagctgaagatgaagaaaccttcagccaaacagcagaaggaggtagagaaggttaaaccccagtgtaaggaagttcatcagaccctgattctggacccagcacaaaggaagagactccagcagcagatgcagcagcatgttcagctcttgacacaaatccaccttcttgccacctgcaaccccaatctcaatccggaggccagtagcaccaggatatgtcttaaagagctgggaacctttgctcaaagctccatcgcccttcaccatcagtacaaccccaagtttcagaccctgttccaaccctgtaacttgatgggagctatgcagctgattgaagacttcagcacacatgtcagcattgactgcagccctcataaaactgtcaagaagactgccaatgaatttccctgtttgccaaagcaagtggcttggatcctggccacaagcaaggttttcatgtat

SEQ ID NO: 3357 - DNA, 615 bp, Homo sapiens
  source 1..615: mol_type = genomic DNA
cacctcgctcagcagggcctctcaggggtcctcagtctggcccaaggaccagggcctcagcctagccccaagagtgggccacaaccttcagcttcctgctgggaaaacccaggagaaacaaggagaccagtgctggtccagtggctgtgatgggaaaagattattacaagattcttgggatcccatcgggggccaacgaggatgagatcaagaaagcctaccggaagatggccttgaagtaccacccagacaagaataaagaacccaacgctgaggagaagtttaaggagattgcagaggcctatgatgtgctaagtgaccccaagaaacggggcctgtatgaccagtatggggaggaaggcctgaagaccggcggtggcacatcaggtggctccagtggctcctttcactacacctttcatggggacccccatgccacctttgcctccttctttggtggctccaaccccttcgatatcttctttgccagcagccgctccactcggcccttcagtggctttgacccagatgacatggatgtggatgaagatgaggacccatttggcgctttcggccgttttggcttcaatgggctgagtaggggtccaaggcgag

SEQ ID NO: 3358 - DNA, 580 bp, Homo sapiens
  source 1..580: mol_type = genomic DNA
ttagtgctttttatcgtcttaaggaggtatttggtggaggctctttgaagttgggttcaggagtgtagaattggcaaagttattgccagcttcctgcatcaacaacagcaacttgtgattggcggtgaccggatattcagttgcacatccccacatcaatgcactgccaatgatgaggaaactgaggccttggactagaacagaggtctcctgactcagtccaggactctttctattacatcatgcggcctgatatttgtctttatggaactcagcaacatcacatacaggggttatatcctgtgttgtgacctcatggtttaagtgggaataaagatgagtataagcagtgatgaggtcaacttcttggtatatagatacttgcaagagtcaggattttctcattcagcatttacctttggtatagaaagccatatcagtcagtccaatataaatggtgccctcgtcccacccgctgcattgatttctatcatccagaaaggtctacagtatgtagaagcagaagttagtattaatgaggatggtaccttgtttgatggtcgaccaatagagtctctgt

SEQ ID NO: 3359 - DNA, 1502 bp, Homo sapiens
  source 1..1502: mol_type = genomic DNA
agttggcaagatggcgccggtgggggtggagaagaagctgctgctaggtcccaacgggcccgcggtggcggccgccggcgacctgaccagtgaggaggaggaaggccagagcctatggtcctccattctgagcgaagtgtccacccgcgccaggtccaagctgccgtccggcaagaacatcctggtcttcggtgaagatggttctggtaaaacaaccctcatgactaaactacaaggagctgagcatggcaaaaaaggaagaggcctagaatatctctacctcagtgtccatgatgaggaccgagatgttgtgaaagattttcaagactatatggaacctgaagaaggttgtcaaggttccccacagagaagaggccctctgacctcaggctccgatgaagaaaatgttgccctgcctctgggtgacaatgtgctgactcataacctggggatcccggtgttggtggtgtgcacaaagtgtgatgcggtgagtgtcctggagaaggagcacgattacagggatgagcatttggactttatccagtcacacctgcggaggttctgccttcagtatggagctgccttgatttacacatcagtgaaagaagagaaaaacctcgacttgttgtataagtatattgttcataaaacatacggtttccacttcaccacacctgccttagttgtggaaaaggatgccgtttttatacctgcaggctgggacaatgaaaagaaaatagctattttacatgaaaattttacaaccgtgaagccggaagatgcatatgaagactttattgtgaaacctcccgtgagaaagctggtccacgacaaagagttggcagcagaagatgagcaggtgttcctaatgaagcaacagtcactccttgccaagcaaccagccactcccacgagagcttctgaatctcctgcaagaggaccctctggctctccaaggacccagggtcggggagggccagccagtgtgcctagctcctccccaggcacgtcagtaaaaaagccggacccaaacatcaaaaataatgcagcaagtgaaggggtgttggccagcttcttcaacagtctgttgagtaaaaagacaggctctcctggaagtcctggtgctggtggggtgcagagcacagccaagaagtcaggacaaaagactgtgttgtcaaatgttcaggaagaactggatagaatgactcgaaagccagactctatggtaacaaactcttcaacagaaaatgaagcctgaacctccttaaaaagtgcatatgtcgaatgaccaaataactatgtatattgatctgctaagaccaggatttttctgatatggcacatgctatcagttttttggggcaggggagatgaactttaaaaaaaaaaaaaaaacttcattggcttgtccgagtgtgaaatgcacatttaggaaggttacatgtcagaccctttgttaaggataacccttggactctggggcatgtggctcttttgtggga

SEQ ID NO: 3360 - DNA, 2672 bp, Homo sapiens
  source 1..2672: mol_type = genomic DNA
gaatctccgctgtagcgtcacctggaaggcagatctaacagagaacctggactgtctcctatcatgattcccgggaaatatcgctctgtttctggccgggctgcgaacaacgtgaactgcgggcttcatctggttattcaaacatcatcgcttcctgaaaaaaacaaagttgaattcaagctaaataaagacacatcgtcattccccggtagacttttacaacatgaccttgaaagaaactactcaagtaggcaagattttaccaagaatataaagaatgtaaaatgaggtccatcacccaaggagcttgtagatttatttgggaagacaagggctacatatctggtgatcatattaatttggtgagctcatcattgtcatcatttcctattcttcaacgttcttctgaagagaaaattctttactcagacaggttgagcctagaaagacaaaagctgaccgtatgtcctatcatcaatggggaagaccaccttcgtttgttgaactttcaacacaattttataactcggatacaaaatatttctaatctacagaagttaatatcgttggatttatatgataaccagattgaagaaattagtgggctttcgactctgagatgtcttcgtgtccttctgttggggaaaaacagaatcaagaaaatctcaaatctggagaatctaaaaagcttagatgtcttggatcttcatggaaatcagattaccaaaattgaaaatattaatcatttgtgtgagttgagagttttaaatcttgccaggaactttttaagtcatgttgataatcttaatgggctggattcactaactgaacttaacttgcgacacaatcaaatcactttcgtgagagatgtggataatttgccctgcctccaacatctctttctcagctttaacaatatatctagttttgacagtgtttcctgccttgctgactcttcttccctctcggacatcacctttgatggcaatcccatagctcaagagtcatggtacaaacacactgtccttcagaatatgatgcagctgcgccagctagatatgaagagaatcacggaagaagaaaggcgtatggcatctgttttagccaaaaaagaggaagagaagaagcgggaaagtcataaacaatctttgcttaaggagaagaaaaggttaacaattaacaacgtagctcgacagtgggacttgcaacaacaacgagtagccaatattgctacaaatgaagatagaaaagattctgactctcctcaggacccctgtcagattgatggaagcaccctctctgcattcccagaggaaacagggcctctagactcaggactcaacaatgctttacaaggtttatctgtcatagacacataccttgttgaagtggacggggatacactttccctatatggctcaggagcactggaatctctggataggaattggagtgttcaaacagcaggaatgatcacaacagtctccttcactttcatagaatttgatgaaatcgtccaagtgcttcctaaactgaagattaagtttcctaattctctgcaccttaaattcaaggaaacaaatcttgtaatgctgcagcaatttaacgcactagcccaactccgtcgtattgaccagttgacaattgatcctcaaggaaatccagttgtcaattttacactctggaaatactatgtactgtttaggctaagccatttcagtatgcagaaaataaatggaacagaggtgacacagaatgatatgataatggctgaaaggctctttggaatcctagcacatgtagcatcttctgagttaccccagtatcgtctgatttccattctgggtgatgccaggaaaaagcaatttcggtatctactagaatccaaaggaaaaaaacctggtattatcaacgaagaaaataatgacagcaaaagacttgtaggagaaaacacaaatcgtgctacattaaattatactacaagagacttttataatgaaaagctagaggaaataaaggaaaagaagaaattctgtaaaacatatatagaagaccttgtgaaggaagccacagaaatcaacatgaaaaatgaggctttgcagaagctttggccacagatgttcattgagcttgttagggatgcagtcatagaaattcgcaataaaaattcctatatgaagctctgcctacagcagataacagaccaaaaataaaaatggcctttagttacagttgattttggcagttttattttttgaaggttgaaaatatgcaggttatacatgttaaaacaacaacaacactatcctataaactagaaagactagtataaaagcattattgcccactgttctcatagctaaaagttaagaaggaaggaaggaaagcaggagaaaggaaggattaattgcctgtatgtgaggaccaaacaacctttgggaactaaacagttttcagagatggcgtggcactgcatccttggttcttgctttgattggtgccctgctatagcccaaagcacgtagtatttgctgatgattcagcatgagctgcatctacctacttttagctgataattttcagttatttccctttttattttatgtcatgatttcaaagccaaaaatatgttctttttatgagtgaagaataaacttactaacaaattagtc

SEQ ID NO: 3361 - DNA, 430 bp, Homo sapiens
  source 1..430: mol_type = genomic DNA
cgccttgggaggtatgaggtagagaaacgctgtgccgtggagaaggaagactacgatctcgccaaggagaagaagcagcagatggagcagtatcgtgccgaggtgtacgagcagctggagctgcacagcctcctggatgccgagctgcattctgcagtagacccgttactccctgccacagatcctcatccaaagatcaatgcagagtccctgccctacgatgagcggcctcttccagctattcgtaagcattatggggaggcagtggtggagccggaaatgagtaatgcagacatcagcgatgctcggaggggaggcatgttaggggagccagagcccttaaccgagaaggccttgagagaagccagctctgccatcgatgtgttgggagaaaccttggttgctgaggcctattgtaagacgtggtcct

SEQ ID NO: 3362 - DNA, 4599 bp, Homo sapiens; identical to SEQ ID NO: 516
  source 1..4599: mol_type = genomic DNA

SEQ ID NO: 3363 - DNA, 850 bp, Homo sapiens
  source 1..850: mol_type = genomic DNA
agaagctgggcagcctctgccgggttccgggaaaaggagctcctgctgccactgctcttccggagcctgcagcatggggcccctgccgcgcaccgtggagctcttctatgacgtgctgtccccctactcctggctgggcttcgagatcctgtgccggtatcagaatatctggaacatcaacctgcagttgcggcccagcctcataacagggatcatgaaagacagtggaagtttgtctgccatgcgtttcctcaccgccgtgaacttggagcatccagagatgctggagaaagcgtcccgggagctgtggatgcgcgtctggtcaaggaatgaagacatcaccgagccgcagagcatcctggcggctgcagagaaggctggtatgtctgcagaacaagcccagggacttctggaaaagatcgcaacgccaaaggtgaagaaccagctcaaggagaccactgaggcagcctgcagatacggagcctttgggctgcccatcaccgtggcccatgtggatggccaaacccacatgttatttggctctgaccggatggagctgctggcgcacctgctgggagagaagtggatgggccctatacctccagccgtgaatgccagactttaagattgcccggaggaagcaaactcttcgtataaaaaaagcaggccatctgcttaacccttggctccaccataaggcactgggactcggatttctctatctgatagaggtattttctgtggccctgggagctgtctgtctttcccctacccccaaggatgccaggaagacgtccaccattagccatgtggcaacctttacttctatgcctcacaagtgcctttcaga

SEQ ID NO: 3364 - DNA, 1210 bp, Homo sapiens
  source 1..1210: mol_type = genomic DNA
gagggcaccagtggtaagacagcgctgcacctggctgtggaaacccaagagcggggcctggtacagttcctgctccaggctggtgcccaggtagatgcccgcatgctgaacgggtgcacacccctgcacctggcagctggccggggtctcatgggcatctcatccactctgtgcaaggcgggtgctgactccctgctgcggaatgtggaggatgagacgccccaggacctgactgaggaatcccttgtccttttgccctttgatgacctgaagatctcagggaaactgctgctgtgtaccgactgaagccagtacagtcctgagccgaggaggagggactgcaagtggaagagagccagtctggaaggaagagctttccaggtggacagggcttcttggaagacccccaaagccccaggtatcctgggtgaagcctgtttgcctctcttgaaaatggcaggtgctcttgttttacccatgttgggtcagcctgaaactgccaaccagtaggaagcatggactctcctgagtgagaagagactgaaataggagcaagcagaaccctgagaggtgtcccatcttattgctgttgaggaccctgaaacaccgttgtttaaagacttcacacagaaggctctgaactgagccactggggaagggaagtttcagtaacatgacactaaaatggcagagacgttaaaaaaagtttttcccttctagagctgttttgcgcgcatgcatgtctgtgtgcattggggctttttagacaggcctgccctgtgactttgtggtagaggcagagagaaggaaattgtcccctgagcacggtagggccttgctgggtggggtcagaggccagtagttccaggcctttctctgtgtccagcacagacccttgtccttgctgtggaaatgatgagggatggagggacaagaggaagaatgagaggacacacgccctggagccctcaccactgccctgggggttgccatctggaggagcctggggataagggtaacccagggaggctgggcacgagggagctgactccacgtttttccccccgttcctcaccttcgagggccctgctaggtcacccctatgctggcatgaagagcatggggcaataaaccagcacagtctctgaccacttggagcgtctcatccagtgagagagacagccgttaaaagcataaacatccaaataaa

SEQ ID NO: 3365 - DNA, 15137 bp, Homo sapiens
  source 1..15137: mol_type = genomic DNA
cctctgcggagccgggctcgggtcgccggagccgcgccccaccccgccagctccagagccacgactaatggctgaaggataaatcaacatggcaactatgattccaccagtgaagctgaaatggcttgaacacttgaacagctcctggattacagaggacagtgaatctattgctacaagagagggagttgctgttctgtattctaaactggttagcaataaggaagtagtacctttgccccaacaagttttatgcctcaaaggaccacagttgccagactttgaacgtgagtctctttcaagtgatgagcaggaccactatttggatgcccttcttagcagccagctagcattggcaaagatggtatgttcagattccccatttgccggggcacttagaaaacgactgcttgtactccagcgtgtcttttatgcactttctaataaataccatgacaaaggcaaggtgaagcagcagcagcattctccggagagcagttctggttcagcagatgtccattctgttagtgaacgcccccggtcaagcactgatgcacttatagaaatgggtgttcgaactggtctaagtttattatttgcgcttctaagacaaagttggatgatgcctgtgtcaggacctggtctcagtctttgcaacgatgtcattcatactgcaattgaagttgtgagctctttgccaccattatcattagcaaatgaaagcaagattcctcctatgggcttggactgcttatcgcaagtaacaacatttcttaaaggagtcactattcctaattctggggcagacactttaggtcgtagattagcttctgagttgctgcttggtttggcagctcaacgaggctcattgcgatatcttcttgaatggatagaaatggctttgggggcttcggcagttgtacacaccatggagaaaggcaaactactctcaagccaggaaggaatgatcagctttgactgctttatgaccatattaatgcagatgaggcgttctttgggttcatctgctgatcggagtcagtggagagaaccaaccagaacatcggatggcttgtgctccctttacgaggcagcattatgtctctttgaagaggtttgcagaatggcttctgattattcgagaacatgtgctagcccagatagcattcagactggtgatgctcccattgtctccgaaacctgtgaggtttatgtttgggggagcaatagcagccatcagttggtagaaggtacacaggagaaaatactgcaacccaaactggctcctagtttctctgatgcacagaccattgaagctggacagtactgcacttttgtcatttctacggatggctctgttagagcttgcgggaaaggcagctatgggagactgggccttggagactccaataatcagtcaactttaaaaaagttaacattcgagcctcacagatccattaaaaaggtttcatcttctaaaggatctgatggtcacactttagcctttacgacagaaggagaagtcttcagttggggagatggtgattatgggaaactggggcatggaaatagttcaacacagaaatatcccaagcttattcagggacctctacaaggaaaggtagttgtttgtgtgtcagctggatacagacatagtgctgctgtcacagaggatggggaattatacacatggggtgaaggagactttggaagattaggtcatggtgacagcaatagtcgtaacattccaacattagtaaaagacatcagcaatgtaggagaggtttcttgtggcagttcacatactattgctctgtctaaagatgggagaactgtatggtcttttggaggaggagacaatggtaaacttggtcatggtgataccaacagagtgtataaacctaaagttattgaagctttacaaggaatgttcattcgcaaagtttgtgctgggagccagtcttcacttgctttgacatcaacagggcaggtctatgcttggggctgtggagcttgtctaggttgtggttcttcagaagctactgctttgagacccaagcttattgaagaactggctgccacaagaatagttgatgtttctattggagacagtcattgtttggctctttctcatgataatgaagtttatgcctggggcaataactcaatggggcaatgtggtcagggaaattccacaggtcctattactaaaccaaagaaagtgagtggcttagatggcatagctattcagcagatttcggctggaacatcacatagtctggcatggactgctcttcctagggacagacaagttgttgcatggcaccgaccttattgtgtagatcttgaagagagtaccttctcacacctgcgttcttttcttgagagatactgtgataaaataaacagtgagattcccccactccctttcccttcatcaagagaacaccacagttttctcaagctgtgcctgaagctactttcaaatcaccttgctcttgcacttgcgggaggggtagctaccagcattctcgggaggcaggcaggtccacttcgaaatttgctcttcagactgatggactcaactgtcccagatgaaatccaagaggtggtaattgaaactttatcagtgggagcaaccatgctgttacctccattacgagaacggatggaattacttcattctcttttacctcaaggacctgatagatgggaaagcttatctaaaggacagagaatgcaactggatatcatcctgacaagtttgcaagatcatacccacgtagcctccctacttggctatagttcaccctctgatgctgctgacctatcttctgtgtgtactggctacggaaatctgtcagatcaaccttacggcactcagagctgccatccagatacccacctggctgaaattttgatgaagaccctcttaagaaatttaggattttatacagatcaagcatttggagagctagaaaagaatagtgataaatttctacttggaacatcatcatcagaaaacagtcagcctgctcatcttcatgaactgctatgttcactacagaaacagctgctggcattttgccatatcaataacattagtgagaactcaagcagtgtggcattgcttcataaacatcttcagcttttgttgcctcatgccacagatatttattcacgttctgcaaatttgctcaaagaaagtccttggaatggcagtgttggagaaaaattaagagatgtgatatacgtctcagctgctggcagtatgctctgccagattgttaactccctgctgttactccctgtgtcagtggctcggcctttattgagttacctcctcgacttgttgccacctcttgattgccttaatagactcctgccagctgctgatcttttagaagaccaggagttacagtggcctcttcatggagggccagaactaattgatcctgctggtctgccattacctcagccagctcagtcctgggtatggcttgtggatctagaaagaacaattgctctccttattgggcggtgtcttggtggcatgcttcagggctcccctgtgtctccagaggaacaggacactgcatattggatgaaaacgccactgttcagtgacggtgtagaaatggacactcctcaattggataaatgtatgagttgcctgttagaagtagcactttctggaaatgaagaacagaagccttttgattataaattgcggcctgaaattgctgtctatgtagacttggcattgggttgttctaaagagcctgcccgaagcctttggatcagcatgcaggactatgctgttagtaaagattgggacagtgcaactttaagtaatgagtcactcttggacactgtgtctagatttgttcttgcagctcttctgaaacacacaaatttacttagtcaagcatgtggagaaagccgatatcaacctggtaaacacttatcagaagtgtaccgttgtgtatacaaagttcgaagtcgtttacttgcttgcaagaaccttgaacttattcaaacaaggtcatcatcacgggacagatggatatcagaaaaccaggactctgcagatgttgatcctcaggagcattcatttactcgaactattgatgaagaagctgaaatggaagaacaggctgagagagaccgggaagaggggcatccggagccagaggatgaagaggaggaacgggaacatgaagtgatgacagctggcaaaatctttcagtgtttcctctcagcccgtgaagtagctcgtagccgagaccgagatagaatgaacagtggggcagggtctggggctcgagctgatgatccacctcctcagtctcagcaagagcgaagggtcagcacagaccttcctgagggtcaggatgtgtacactgctgcatgcaactccgtgatccatcggtgtgccctgttaatattaggagtaagtcctgtgatagatgagcttcagaagcgaagagaagaaggacagttgcagcaaccttcaacaagtgcctctgaagggggtggacttatgaccaggagtgaaagtcttactgcagagagccggctagtccacacaagcccaaattatagactgatcaaatcgaggagtgaatctgatttgtctcagcctgaatcagatgaagagggttacgcactgagtggcagacgaaatgttgatttggatttggcagcatctcacagaaagagaggtcctatgcacagtcaattggaatccctgagtgactcttgggctcgcctgaaacatagcagagactggttatgcaactcctcctattcctttgagtcagattttgatcttaccaagtctttgggagttcacactttgattgaaaatgttgtaagctttgtgagtggagatgtggggaatgccccaggttttaaagagccagaggaaagtatgtctacaagtccccaggcctccatcattgcaatggaacagcagcagttaagggcagaacttcgtttagaggcacttcatcagatcctcgttctattgtctgggatggaagaaaaaggtagcatctcactggcaggaagcagattgagttcaggcttccagtcctccacactactcacgtctgtgaggctgcagttcctagcagggtgttttggtttaggcactgttggacacacaggaggcaagggagagagtggccgattgcatcactatcaggatgggatcagagcagctaagagaaatattcagattgaaatccaggtagctgtgcataaaatttatcaacagttgtctgctaccctggaaagagccctgcaagcaaacaagcatcacattgaagcccagcaacgtctgcttctggttacagtttttgccctaagtgttcattatcaaccagtagatgtttctttggcaatttccactggtctgctaaacgtattgtcacagttgtgtggtacagacaccatgctaggacagcccctgcagttgttgccaaagacgggtgtttcccagcttagcacagctttgaaagtggccagtacaaggttgctccagattctagccatcactactgggacctatgctgataaactgagtcccaaagtagttcaatccttgttggatctactctgtagtcagttgaagaatttattgtcccaaactggtgtactacatatggcctctttcggagaaggggagcaagaagacggtgaagaagaagaaaaaaaagttgactccagtggagaaactgagaagaaagatttcagagctgctcttaggaaacaacatgcagccgaactccatctaggggattttttagtttttcttcgcagagttgtatcttcaaaagcaattcaatcaaaaatggcttccccaaagtggaccgaagtgcttctaaatatagcatctcagaaatgttcttcaggtatccctctggttggtaacttaagaacaaggctccttgcacttcatgtccttgaagctgtgctgccagcttgtgaatctggtgtagaagatgatcaaatggcccagattgttgagcgcttattttcccttctctctgattgtatgtgggagacacccattgctcaggccaaacatgctattcagataaaggaaaaagaacaagaaataaaactacagaagcagggcgagttggaagaagaagatgagaatcttcctatccaagaagtatcctttgacccggagaaagctcagtgttgcctagtggagaatggacagattttaactcacggcagtggagggaaaggatatggattggcatctacaggagtaacttctgggtgctatcagtggaagttttatattgtgaaggaaaacagaggtaatgaaggcacgtgtgttggagtttctcgctggccagtacatgactttaatcaccgcactacctcggatatgtggctctatagggcctacagtggtaacctctatcacaatggagaacagactctcacattgtccagctttactcaaggagatttcattacctgtgtgttagacatggaagccaggaccatttcttttgggaaaaatggagaggaacccaaattagcttttgaagatgtggatgcagcagagttgtacccatgtgtgatgttctatagtagcaatccaggggaaaaggtgaaaatttgtgatatgcagatgcgtggcacaccccgagacttacttccaggagaccctatttgtagtccagtagcagcagtgctggctgaggccactattcagctcatccgtatccttcaccgaacagaccgttggacttactgcattaacaaaaaaatgatggaaaggcttcacaaaattaagatatgtattaaagagtcaggtcagaagctaaagaaaagccgctcggttcagagccgagaggaaaatgaaatgagagaggagaaggagagcaaagaggaagagaaaggtaaacatactaggcatggcctcgctgacctctcagagctgcagctgaggactctttgcatagaggtgtggcccgtgctggctgtgataggaggagttgatgctggtcttagagttggaggtcggtgtgttcacaagcaaactgggcgccatgccacgctgctgggagtggtcaaagagggcagcacgtctgccaaggtccaatgggatgaagcagaaattactatcagcttcccaactttttggtcgcctagtgatactccattgtataatctggaaccctgtgaaccattgccgtttgatgtggcgcgattccgaggcctgacggcttctgtgctgctggacctaacatatctcactggcgttcatgaagacatgggcaaacagagcaccaaacgacatgaaaagaaacaccgacatgaatccgaggagaaaggggatgttgagcagaaacctgagagtgaatccgctttagatatgcgaacaggcctaacatctgatgacgtcaaaagtcagagtaccacaagctccaaatcagaaaatgaaatcgcttcattttctttagatccaacactgccaagtgtggaatcccaacatcaaataacagaagggaaaagaaaaaatcatgaacacatgtccaaaaaccatgatgtagcccagtcagaaatcagagcagtccagctgtcctatctttacctcggtgctatgaagtcacttagtgcccttcttggctgtagtaaatatgctgagctgttgctgataccaaaagttctggctgaaaatggccacaactcagactgtgcaagttctccagttgttcatgaagacgtggagatgcgagcagccctgcagttcttgatgcgacacatggtgaagcgagcagtcatgcggtcacccataaagagagcattgggattagctgatctggaacgagcgcaagccatgatctataaattagtggttcatgggcttttggaagaccagtttgggggcaaaattaagcaagagattgatcaacaagctgaagaaagtgaccctgcccagcaggcacagacaccagttactactagcccatcagcctcaagcacgacctcctttatgagcagctctctggaggacaccacaactgccaccactccagtcactgacacagaaacagtgcctgcatccgagtccccgggagtgatgcctcttagtcttctcaggcaaatgttctctagttacccaactaccactgtacttcccacacgtcgggcacagactcctccaatatcttcgttaccaacctctccttctgatgaagtaggaaggaggcaaagtttaacttctcctgattcccagtcagcaaggccagctaaccgcacagccttgtcagacccaagcagtagactttcaacttctcctcctcctccagcaattgcagttcccttgctggaaatggggttctctcttcggcagattgccaaagccatggaagctacaggtgctaggggagaggctgatgcccagaatatcactgtccttgccatgtggatgatagagcaccctgggcatgaggatgaagaggagccccagtcgggcagcacagcagactctaggcctggagcagccgttctaggcagtggcgggaagtcaaatgatccctgttatttgcagtcacctggagacataccatcagctgatgctgctgaaatggaggaaggttttagtgaaagccctgataatttggatcatacagagaatgcagcttctggaagtggaccatcagctagaggtcgctcagcggtaacaagaagacacaagtttgacttagctgctcgcacactgctagcaagagcagcgggattataccgctctgtgcaggcccacaggaatcaaagtcggagagaaggaatatctttgcagcaagacccaggggcgttgtatgactttaatttagatgaggaattggaaattgatcttgatgatgaggcgatggaagctatgtttggacaagacctgaccagtgacaatgatattctgggaatgtggatcccagaggtactggattggcctacctggcatgtttgtgagtctgaagacagggaagaagtggtggtgtgtgaactgtgtgaatgcagcgtcgtcagcttcaatcagcacatgaagagaaaccatccaggctgtgggcgcagtgcaaaccgccagggctatcgcagcaatggttcctatgtggatggctggtttggcggtgaatgtgggagtggaaatccgtactacctgttatgtggcacctgcagggagaagtacttagccatgaagaccaaatctaagtcaacaagttctgaaaggtacaagggacaagctccagatctaattggcaagcaagacagtgtgtatgaagaagactgggacatgttggatgttgatgaagatgaaaagctaactggtgaagaagaatttgaattacttgctggaccgcttggtttaaatgaccggcgcattgtaccagaaccagttcagttccctgacagcgatccactgggagcatcagtagcaatggtcacagccaccaacagtatggaagagactctgatgcaaataggttgccatggctccgtagaaaagagctcctctgggagaataacgttaggagagcaggcagctgccctagcaaaccctcatgaccgtgtggtggctttaaggagagtgactgctgctgctcaggttcttctggccagaaccatggtcatgagagcgctgtctcttctctcagtcagtggttccagttgtagcctggctgctggtcttgagtctctggggctaacagatatccgaacgctagttcgattaatgtgcttggcagcagcagggagagctggcctctccaccagcccttctgccatggctagcacctcagaacgatcacgaggtgggcatagcaaggctaacaagcctatctcttgcctggcctatttgagcacagcagtgggatgtctggcatcaaatgctcctagtgctgccaaactgcttgtacagttgtgtacacagaacttgatttctgctgcaacaggtgtaaatctaaccacagttgatgactcaattcagcgaaagtttctacccagctttctccgaggaattgctgaagagaacaagcttgtgacctccccaaactttgttgtaacacaggcccttgtggcattgctagcagacaaaggggccaaactaagacctaactatgataagtcagaagttgaaaagaaaggccctctggagttggctaatgccctggcagcctgctgcctctcctccaggctgtcctcacagcatcggcaatgggcagctcagcaactcgtgcgcactcttgctgcacacgaccgtgacaaccaaactactctgcagacacttgctgatatgggaggagatcttagaaaatgctcctttatcaaattggaggctcatcagaacagagtaatgacatgtgtttggtgtaataaaaaaggtcttttggctacaagtggcaatgatggcaccatccgcgtatggaatgttaccaagaagcaatattcactgcaacagacctgtgtgttcaacagattggaaggggatgctgaggaaagcctgggatcacccagtgatccaagtttctcaccagtttcctggagtatcagtggcaaatatctagcaggcgctttggaaaagatggtgaatatctggcaagttaatggaggaaaaggattagtagatattcagcctcattgggtatctgccctggcttggccagaagagggtccggctacagcctggtcaggagagtctccagaattgttgttggtgggacggatggatggatctctgggactgattgaagttgttgatgtgtccaccatgcaccgtcgagaattggagcattgctatcgaaaggatgtgtctgttacttgcattgcatggttcagtgaagacagaccatttgcagtgggatattttgatggaaaactgttactgggaacaaaggaaccacttgagaaaggaggcattgttctaattgatgcacataaggatactcttattagcatgaagtgggaccctacaggtcatattcttatgacatgtgccaaagaagacagtgtgaaactctggggctctatttcgggatgctggtgctgtctacattcactctgccatccatctattgtaaatggcattgcttggtgccgccttccagggaaaggatccaagttgcagttactgatggctactggctgtcagagtggcttagtatgtgtttggcgcattcctcaagatactacacagaccaatgtgactagtgcagaaggatggtgggagcaggaatcaaattgccaggatggatataggaaatcatcaggagccaagtgtgtttatcagctgcggggacacatcactcctgttcggactgttgcctttagttctgatgggttggccctggtgtctggtggactaggtgggctcatgaacatttggtctttaagggatggctctgtcttgcaaactgttgtgataggctctggagctattcagaccacagtatggattccagaagttggagtagctgcttgctcaaatagatcaaaggatgttttggtcgtgaattgtacagcagaatgggcagctgccaatcatgttttggcaacctgtaggacagcattgaaacagcagggtgttctgggattgaacatggctccctgcatgagagcatttttggagcggctccccatgatgcttcaggagcagtatgcctatgaaaagcctcatgtggtttgtggtgaccaacttgttcatagcccctatatgcaatgcttggcttcccttgctgtgggacttcatctggatcagctgttgtgtaaccctccagtgccaccacaccaccagaactgtctccctgaccctgcatcctggaatccaaatgaatgggcctggttagaatgtttctcaaccactataaaagctgccgaagccctgaccaatggagcccagtttccagaatcttttaccgttccagatctagaacctgttccagaggatgaacttgtatttctaatggataacagtaaatggattaacggcatggatgaacaaattatgtcttgggcaacttccagacctgaggactggcacctgggaggtaaatgtgatgtctacttatggggtgctggtaggcatggacagctggcagaagctggaagaaatgtaatggtacctgcagcagctccctcattctcacaggcccaacaggtcatttgtggtcagaattgtacctttgtcatccaggccaatggcacagtgttggcttgtggggaaggaagttatggcagattaggacaaggaaattcagatgaccttcatgtgctgacagttatttcagccttacaaggctttgtggtgacccagctggtgacttcctgtggttctgatgggcactctatggccctaactgaaagtggtgaggtctttagctggggagatggtgactatggtaaacttggccatgggaacagcgacaggcagcggcggcccaggcagatcgaggccttacaaggagaagaagtggtgcagatgtcttgtggcttcaagcactcagcagtggtcacttcagatggcaaactgttcacctttgggaatggtgactatggtcgtctgggtcttggaaatacctctaacaaaaaacttccagagagagtgactgcactggagggatatcagattggacaggtggcctgtggattaaaccacactttggcagtgtcagcagatggttccatggtgtgggcttttggagatggagactatggaaaactaggcttaggaaattccactgcaaaatcttcacctcagaaaattgacgtcctttgtggaattggaataaaaaaggttgcttgtggaactcagttttctgttgctttgaccaaagatggtcatgtgtatacctttggtcaagatcgcctgataggcttgccagaggggcgtgctcgcaatcacaatcgaccgcaacaaatccctgtcctggctggagtaatcatagaagatgtggcagttggagctgaacacacacttgctttggcatcaaatggagatgtgtatgcctgggggagcaattcagaagggcagctcggcttaggccataccaaccatgttcgagaaccaaccctggtaacaggtctgcaagggaaaaatgttcggcagatctcggctggccgctgccacagtgctgcatggacagcaccacctgtcccaccaagagcaccaggtgtgtcagtacctctgcagctgggcctgcctgacacagtgcccccccagtatggggcgctgagagaagtcagcattcacacggtgcgggccaggctccggctgctctaccacttctctgacctcatgtactcatcctggagactgctgaaccttagccccaacaaccagaacagcacatcccattataatgctggaacttggggcattgtacagggacaacttcggcctttgttagccccaagagtctacactctgccaatggtgcgctccataggaaaaaccatggttcaaggcaaaaactatggacctcagataactgtaaagaggatatcaaccagaggacggaagtgtaagcctatttttgtccaaatagcgagacaagtagttaagctgaatgcttcagacctccgcctgccttcccgagcgtggaaggttaagctggttggagaaggggctgatgatgctggaggagtgtttgatgacaccatcacagagatgtgccaggaacttgaaactggtattgttgaccttcttataccctctcccaatgccaccgcagaagtgggttacaatagggacaggttcctttttaacccttctgcctgcctcgatgaacacttaatgcagtttaagtttttaggaattttaatgggggttgccattcgcacaaagaagcctctggacctccacttggcccctctggtgtggaagcagctgtgctgtgtcccactcaccctagaggacctggaggaggtggatctgctctacgtgcagactctcaacagcattcttcacattgaagacagtgggattaccgaggagagtttccatgagatgattcctcttgattcttttgttggccagagtgctgatggcaaaatggttcctataatccctggtggaaatagtatcccactcacattttccaacaggaaggaatatgtggagagggccattgaatatcgacttcatgagatggacagacaggtggctgcagtccgagaagggatgtcctggattgttcctgtgccgctgctgtccctcctcacagcaaaacaactggagcagatggtgtgtgggatgcccgagatctctgtggaagtcttgaagaaagtggtgcggtaccgtgaggtggatgagcagcatcagctggtgcagtggttctggcacacgctggaagagttctccaatgaggagcgggtgcttttcatgaggtttgtgtcaggaagatctcgactaccagccaacactgctgacatttctcagagatttcaaatcatgaaggttgataggccttacgacagtctgcctacctcacagacctgcttcttccagctgaggctgcccccgtactccagccagctggtcatggccgagcgcctgcgctatgccatcaacaactgccgctcaatcgacatggacaactacatgctctcgagaaacgtggacaacgccgagggctccgacactgactactgaccgtgcgggtgctctcaccctcccttctctccctcaataatgctcacttctgatttgatgttgatatacttttatggtaactacatagatgttataagaacataaaccaacattataaacaatggccacatttagttactctaaatgtaacaaagaaattagatgtttttatttttctgtgattgtacaaaaacaacaaaaacgaagtgctctcagtcaggtttttccctccatatttttggtcacttttgataagtttgcatgaaaccattttggtgcatttttagttgggaatggtacatttttgtaaatccacccagtgaacatgaaattgtacattgtgtataattgttcattagaaaggacagttttacatgaatattcatatatttattttgttttaatttgaattgcctgttcagggttccttatgcagagaaataaagcagattcaggaattgga

SEQ ID NO: 3366 - DNA, 8082 bp, Homo sapiens
  source 1..8082: mol_type = genomic DNA
gcagagtctgcagtgcggagggggcgggaagtccaggccccgcactcgatccacgctggctccctacggaggcccacctactcgaggcccaccgactcctactgcaatcagtactatgcgatcgtcctagagagtccattcagctgcacttccgcctcagtatggcatcacagctgcaagtgttttcgcccccatcagtgtcgtcgagtgccttctgcagtgcgaagaaactgaaaatagagccctctggctgggatgtttcaggacagagtagcaacgacaaatattatacccacagcaaaaccctcccagccacacaagggcaagccaactcctctcaccaggtagcaaatttcaacatccctgcttacgaccagggcctcctcctcccagctcctgcagtggagcatattgttgtaacagccgctgatagctcgggcagtgctgctacatcaaccttccaaagcagccagaccctgactcacagaagcaacgtttctttgcttgagccatatcaaaaatgtggattgaaacgaaaaagtgaggaagttgacagcaacggtagtgtgcagatcatagaagaacatccccctctcatgctgcaaaacaggactgtggtgggtgctgctgccacaaccaccactgtgaccacaaagagtagcagttccagcggagaaggggattaccagctggtccagcatgagatcctttgctctatgaccaatagctatgaagtcttggagttcctaggccgggggacatttggacaggtggctaagtgctggaagaggagcaccaaggaaattgtggctattaaaatcttgaagaaccacccctcctatgccagacaaggacagattgaagtgagcatcctttcccgcctaagcagtgaaaatgctgatgagtataattttgtccgttcatacgagtgctttcagcataagaatcacacctgccttgtttttgaaatgttggagcagaacttatatgattttctaaagcaaaacaaatttagcccactgccactcaagtacatcagaccaatcttgcagcaggtggccacagccttgatgaagctcaagagtcttggtctgatccacgctgaccttaagcctgaaaacatcatgctggttgatccagttcgccagccctaccgagtgaaggtcattgactttggttctgctagtcacgtttccaaagctgtgtgctcaacctacttacagtcacgttactacagagctcctgaaattattcttgggttaccattttgtgaagctattgatatgtggtcactgggctgtgtgatagctgagctgttcctgggatggcctctttatcctggtgcttcagaatatgatcagattcgttatatttcacaaacacaaggcttgccagctgaatatcttctcagtgccggaacaaaaacaaccaggtttttcaacagagatcctaatttggggtacccactgtggaggcttaagacacctgaagaacatgaactggagactggaataaaatcaaaagaagctcggaagtacatttttaattgcttagatgacatggctcaggtgaatatgtctacagacctggagggaacagacatgttggcagagaaggcagaccgaagagaatacattgatctgttaaagaaaatgctcacaattgatgcagataagagaattacccctctaaaaactcttaaccatcagtttgtgacaatgactcaccttttggattttccacatagcaatcatgttaagtcttgttttcagaacatggagatctgcaagcggagggttcacatgtatgatacagtgagtcagatcaagagtcccttcactacacatgttgccccaaatacaagcacaaatctaaccatgagcttcagcaatcagctcaatacagtgcacaatcaggccagtgttctagcttccagttctactgcagcagctgctactctttctctggctaattcagatgtctcactactaaactaccagtcagctttgtacccatcatctgctgcaccagttcctggagttgcccagcagggtgtttccttgcagcctggaaccacccagatttgcactcagacagatccattccaacagacatttatagtatgtccacctgcgtttcaaactggactacaagcaacaacaaagcattctggattccctgtgaggatggataatgctgtaccgattgtaccccaggcaccagctgctcagccactacagattcagtcaggagttctcacgcagggaagctgtacaccactaatggtagcaactctccaccctcaagtagccaccatcacaccgcagtatgcggtgccctttactctgagctgcgcagccggccggccggcgctggttgaacagactgccgctgtactgcaggcgtggcctggagggactcagcaaattctcctgccttcaacttggcaacagttgcctggggtagctctacacaactctgtccagcccacagcaatgattccagaggccatggggagtggacagcagctagctgactggaggaatgcccactctcatggcaaccagtacagcactatcatgcagcagccatccttgctgactaaccatgtgacattggccactgctcagcctctgaatgttggtgttgcccatgttgtcagacaacaacaatccagttccctcccttcgaagaagaataagcagtcagctccagtctcttccaagtcctctctagatgttctgccttcccaagtctattctctggttgggagcagtcccctccgcaccacatcttcttataattccttggtccctgtccaagatcagcatcagcccatcatcattccagatactcccagccctcctgtgagtgtcatcactatccgaagtgacactgatgaggaagaggacaacaaatacaagcccagtagctctggactgaagccaaggtctaatgtcatcagttatgtcactgtcaatgattctccagactctgactcttctttgagcagcccttattccactgataccctgagtgctctccgaggcaatagtggatccgttttggaggggcctggcagagttgtggcagatggcactggcacccgcactatcattgtgcctccactgaaaactcagcttggtgactgcactgtagcaacccaggcctcaggtctcctgagcaataagactaagccagtcgcttcagtgagtgggcagtcatctggatgctgtatcacccccacagggtatcgagctcaacgcggggggaccagtgcagcacaaccactcaatcttagccagaaccagcagtcatcggcggctccaacctcacaggagagaagcagcaacccagccccccgcaggcagcaggcgtttgtggcccctctctcccaagccccctacaccttccagcatggcagcccgctacactcgacagggcacccacaccttgccccggcccctgctcacctgccaagccaggctcatctgtatacgtatgctgccccgacttctgctgctgcactgggctcaaccagctccattgctcatcttttctccccacagggttcctcaaggcatgctgcagcctataccactcaccctagcactttggtgcaccaggtccctgtcagtgttgggcccagcctcctcacttctgccagcgtggcccctgctcagtaccaacaccagtttgccacccaatcctacattgggtcttcccgaggctcaacaatttacactggatacccgctgagtcctaccaagatcagccagtattcctacttatagttggtgagcatgagggaggaggaatcatggctaccttctcctggccctgcgttcttaatattgggctatggagagatcctcctttaccctcttgaaatttcttagccagcaacttgttctgcaggggcccactgaagcagaaggtttttctctgggggaacctgtctcagtgttgactgcattgttgtagtcttcccaaagtttgccctatttttaaattcattatttttgtgacagtaattttggtacttggaagagttcagatgcccatcttctgcagttaccaaggaagagagattgttctgaagttaccctctgaaaaatattttgtctctctgacttgatttctataaatgcttttaaaaacaagtgaagcccctctttatttcattttgtgttattgtgattgctggtcaggaaaaatgctgatagaaggagttgaaatctgatgacaaaaaaagaaaaattactttttgtttgtttataaactcagacttgcctattttattttaaaagcggcttacacaatctcccttttgtttattggacatttaaacttacagagtttcagttttgttttaatgtcatattatacttaatgggcaattgttatttttgcaaaactggttacgtattactctgtgttactattgagattctctcaattgctcctgtgtttgttataaagtagtgtttaaaaggcagctcaccatttgctggtaacttaatgtgagagaatccatatctgcgtgaaaacaccaagtattctttttaaatgaagcaccatgaattcttttttaaattattttttaaaagtctttctctctctgattcagcttaaatttttttatcgaaaaagccattaaggtggttattattacatggtggtggtggttttattatatgcaaaatctctgtctattatgagatactggcattgatgagctttgcctaaagattagtatgaattttcagtaatacacctctgttttgctcatctctcccttctgttttatgtgatttgtttggggagaaagctaaaaaaacctgaaaccagataagaacatttcttgtgtatagcttttatacttcaaagtagcttcctttgtatgccagcagcaaattgaatgctctcttattaagacttatataataagtgcatgtaggaattgcaaaaaatattttaaaaatttattactgaatttaaaaatattttagaagttttgtaatggtggtgttttaatattttacataattaaatatgtacatattgattagaaaaatataacaagcaatttttcctgctaacccaaaatgttatttgtaatcaaatgtgtagtgattacacttgaattgtgtacttagtgtgtatgtgatcctccagtgttatcccggagatggattgatgtctccattgtatttaaaccaaaatgaactgatacttgttggaatgtatgtgaactaattgcaattatattagagcatattactgtagtgctgaatgagcaggggcattgcctgcaaggagaggagacccttggaattgttttgcacaggtgtgtctggtgaggagtttttcagtgtgtgtctcttccttccctttcttcctccttcccttattgtagtgccttatatgataatgtagtggttaatagagtttacagtgagcttgccttaggatggaccagcaagcccccgtggaccctaagttgttcaccgggatttatcagaacaggattagtagctgtattgtgtaatgcattgttctcagtttccctgccaacattgaaaaataaaaacagcagcttttctcctttaccaccacctctacccctttccattttggattctcggctgagttctcacagaagcattttccccatgtggctctctcactgtgcgttgctaccttgcttctgtgagaattcaggaagcaggtgagaggagtcaagccaatattaaatatgcattcttttaaagtatgtgcaatcacttttagaatgaatttttttttccttttcccatgtggcagtccttcctgcacatagttgacattcctagtaaaatatttgcttgttgaaaaaaacatgttaacagatgtgtttataccaaagagcctgttgtattgcttaccatgtccccatactatgaggagaagttttgtggtgccgctggtgacaaggaactcacagaaaggtttcttagctggtgaagaatatagagaaggaaccaaagcctgttgagtcattgaggcttttgaggtttcttttttaacagcttgtatagtcttggggcccttcaagctgtgaaattgtccttgtactctcagctcctgcatggatctgggtcaagtagaaggtactggggatggggacattcctgcccataaaggatttggggaaagaagattaatcctaaaatacaggtgtgttccatctgaattgaaaatgatatatttgagatataattttaggactggttctgtgtagatagagatggtgtcaaggaggtgcaggatggagatgggagatttcatggagcctggtcagccagctctgtaccaggttgaacaccgaggagctgtcaaagtatttggagtttcttcattgtaaggagtaagggcttccaagatggggcaggtagtccgtacagcctaccaggaacatgttgtgttttctttattttttaaaatcattatattgagttgtgttttcagcactatattggtcaagatagccaagcagtttgtataatttctgtcactagtgtcatacagttttctggtcaacatgtgtgatctttgtgtctcctttttgccaagcacattctgattttcttgttggaacacaggtctagtttctaaaggacaaattttttgttccttgtcttttttctgtaagggacaagatttgttgtttttgtaagaaatgagatgcaggaaagaaaaccaaatcccattcctgcaccccagtccaataagcagataccacttaagataggagtctaaactccacagaaaaggataataccaagagcttgtattgttaccttagtcacttgcctagcagtgtgtggctttaaaaactagagatttttcagtcttagtctgcaaactggcatttccgattttccagcataaaaatccacctgtgtctgctgaatgtgtatgtatgtgctcactgtggctttagattctgtccctggggttagccctgttggccctgacaggaagggaggaagcctggtgaatttagtgagcagctggcctgggtcacagtgacctgacctcaaaccagcttaaggctttaagtcctctctcagaacttggcatttccaacttcttcctttccgggtgagagaagaagcggagaagggttcagtgtagccactctgggctcatagggacacttggtcactccagagtttttaatagctcccaggaggtgatattattttcagtgctcagctgaaataccaaccccaggaataagaactccatttcaaacagttctggccattctgagcctgcttttgtgattgctcatccattgtcctccactagaggggctaagcttgactgcccttagccaggcaagcacagtaatgtgtgttttgttcagcattattatgcaaaaattcactagttgagatggtttgttttaggataggaaatgaaattgcctctcagtgacaggagtggcccgagcctgcttcctattttgattttttttttttttaactgatagatggtgcagcatgtctacatggttgtttgttgctaaactttatataatgtgtggtttcaattcagcttgaaaaataatctcactacatgtagcagtacattatatgtacattatatgtaatgttagtatttctgctttgaatccttgatattgcaatggaattcctactttattaaatgtatttgatatgctagttattgtgtgcgatttaaactttttttgctttctccctttttttggttgtgcgctttcttttacaacaagcctctagaaacagatagtttctgagaattactgagctatgtttgtaatgcagatgtacttagggagtatgtaaaataatcattttaacaaaagaaatagatatttaaaatttaatactaactatgggaaaagggtccattgtgtaaaacatagtttatctttggattcaatgtttgtctttggttttacaaagtagcttgtattttcagtattttctacataatatggtaaaatgtagagcaattgcaatgcatcaataaaatgggtaaattttctga

SEQ ID NO: 3367 - DNA, 2391 bp, Homo sapiens
  source 1..2391: mol_type = genomic DNA
gtccctctctggccaccgcacgacgggcgcagaaatctgggccccagagctgcgctgagagatcccccgacgcttccccagcctcccagggaggccttcgcggagtcggggcgtcgcgggtcggggcgctcgctgtgtcccttcagctccagactgcgtgaagctcctccagcaggccccagcgcccagggattttgtcctaaaaaagggtcatggagtgggtggattgcgggcggcccggcgctttttctgcatacggatttcgtcccaaatttgctaacatgagaaccacagtttttcagaagagcagaatgtttatttgccaagacctgtttggcaggtgtgaatgttttagagaagaaatgccgagaaaatgctggcattttgcgttgcgggtttttttttaaattgagaaataggttactggcttactttgtttctccagaatattttcacttggctttaatttaagtcatgtggctttaatttccttccagattatgcgttcagatgtggcaaaggcttaagagaatcattatctcttaatcgtagcggttttgattatcttttttcccacatcatatttttctttctttctttttaaatcacagctttacgtttttaagagtctctatctggttcattgattgattcaacaaatatttattaagtgtctaatatgtgccaggcatagttgctggggatgcagcaggaaacaacgcagaatttttggccttcttggaaatgggcagtaagcagaatgatatcctgagagaagatgggaaagggctgcaaggttgtggtttgtggattgttatctgtggggaaaactgcaattttggagcagctcctttatggaaatcatactattggaatggaagattgcgaaacaatggaagatgtatacatggcttcagtagaaacagaccgaggagtaaaagaacagttacatctttatgacaccagaggtctacaggaaggcgtggagctgccaaagcattatttttcatttgctgatggcttcgttcttgtgtacagtgtgaataaccttgaatcctttcaaagagtggagcttctgaagaaagaaatcgataagttcaaagacaaaaaagaggtagcaattgtggtattaggaaacaaaatcgacctttctgagcagagacaagtggacgctgaagtggcacagcagtgggcaaaaagtgagaaagtaagactgtgggaggtgactgttacagatcggaaaactctgattgaaccattcactttattagccagtaaactttctcaaccccagagcaaatcaagctttcctttgcctgggaggaaaaacaaagggaactctaattctgagaactaaaaatcagtaatttccacaattgtatgttgaatagtgattgcctttaagtgtctgtgaacatggagtaatattactatttaaaataggccatttgtatctacctttggtccttaggaaaattcctaaggaagtcaattaatgcactttagatgttaaaagtatttgggctaaggttattattgcctgatatgaaataatatattcttattctcattgtttgaaacctgtctttgaaattagcacctttgttatttatgttgtacttgtgaaaacagtaaaatagtttggatagttatgcaaatgcacctatgtgtaacttccccccaaccccaagctgtttcggaagatatcataatcattctgtgtaacattatgcaaacttctaagcccaaacatgactttgtttttaaaaagttcattaatctaatgtctaggattataaaacatttttttgtgtctaaattggacccaaaacattgaacagtttggggtagtaagctaaatttcatcttgtggagattttgctaaacagactaagacccatgatttagctttgctcaaattagaatgtttagcatgagttgaggtaccaggtagtgttaagtaggttcatcacgctctaaggccgttttttccttagccagacccctgttgatagaccagatacttgagggcaaactgtttgctcctcctcttgaaaatgattaggcacttaaggacagtaaagctgtattttctggaaggaagactgtatcttctggaatagttttctagaaaactagtcatatacaataaaagtatcaaaaatattgggctctaatttgatctgacttagatgtctgagtttgtgttgtttctctaaagattttggcaagactcaagcaatgtggctgactgtaactttattaatttaaaaggtaggaagtaagctacttagtggtttcacctgtgaaataactattttgactgaaatgtaaaataagctattcaacaaagaacatattaaaacatcaagtaatttgtaacatcttaaa

SEQ ID NO: 3368 - DNA, 2163 bp, Homo sapiens
  source 1..2163: mol_type = genomic DNA
gacgccgatgcggagctgagctggctttcctccagggctctggactccctgctgagcaagagagaaagaggcccgcccttccaccaggacgcctgaccctggggtccttcccaaacccgggtctcttccgactccgggcccaacagtttgtgcgattaaagtgaagaaacaatggccagcaatcacaaatcttcagcagctcgccctgtttcaagaggtggagttgggttaacaggaaggcctccttctgggatacgacccctatcaggaaatattcgagtggcaactgcaatgccacctgggacagcaagaccaggttctcgtggttgtcccatagggactggtggagttctgtcttctcaaatcaaagttgcccatcgccctgtaacacaacaaggtttgactggaatgaaaactgggacgaaaggtccccagaggcaaattttagacaaatcttactatcttgggcttcttagaagtaaaataagtgaacttacaactgaagttaataaacttcagaagggaatagaaatgtacaatcaagagaattcagtatatttgtcatatgaaaagagggctgagactttagctgttgagataaaagagcttcaaggacaactagcagactacaacatgttggtagataaacttaataccaacactgaaatggaagaagtaatgaatgattacaatatgcttaaagctcaaaatgatcgagaaacacaaagtttggatgtcatatttactgaaagacaagcgaaagaaaaacaaatcagaagtgtcgaagaagaaattgaacaggaaaaacaagcaacagatgacattatcaaaaatatgtcttttgaaaaccaagtcaagtacctagagatgaaaaccacaaatgagaaactgttacaggaattagatacacttcaacaacaattggattcacagaacatgaaaaaagagagcctggaagcagaaatagctcactcccaggtgaaacaggaggcggtattgctgcatgaaaaactttatgagttggagtcccatcgagatcaaatgattgcagaagacaaaagcataggatctccaatggaagagagagagaaattacttaagcagattaaagatgataatcaggaaatagccagcatggaaagacagttaacagatacaaaagaaaagataaatcagtttattgaagaaattagacaacttgacatggatttagaggaacaccaaggtgaaatgaaccagaaatacaaggagctaaagaaaagggaggaacatatggacacttttattgagacttttgaggaaacaaagaatcaggaactgaaacgaaaggcacagatagaagccaacattgttgcactcttggagcactgcagtcgaaatataaatcgtatagaacagatatcctctatcaccaatcaagagctaaagatgatgcaggatgacctcaattttaaatctactgaagtgcagaaatcacaaagtacagctcagaatttgacttcagacattcaacgtctgcagttggatctgcagaaaatggagcttctagaaagtaagatgactgaagaacagcattctctaaaaagcaaaattaagcaaatgacaactgatctggagatatataatgatttgccagctttaaaatcatcaggtgaagaaaagataaagaaattacatcaggagagaatgatattatcaacccacagaaatgcctttaagaaaataatggagaagcaaaacatagagtatgaggcactaaaaacacaattgcaagaaaatgagacacattctcagcttacaaatttggagagaaagtggcaacaccttgagcaaaataattttgcgatgaaagaattcatagcaaccaagagtcaagagagtgattaccagccaattaagaaaaatgtgaccaagcagattgcagagtacaataaaaccatcgtggatgctttacatagcaccagcggaaactgagtttaagtccactgaaagtctctaaggaagtatcctcttgctgctaaacttggtacaagttgactaccaaaaaaaaaaaaagcttacttttggagtttacctaaaatttctgaatgttataatttttgtggcctcttttaagaatgatattttaaaatagtaaatagttcaataaatggtttgcatatt

SEQ ID NO: 3369 - DNA, 1647 bp, Homo sapiens
  source 1..1647: mol_type = genomic DNA
atgctgctgctgccgggtgtccatggcccgcacccccaagctgccactgcagcagtcagagtggcagctgaaggctcggttcatgccgtgcccccgggcagttctggtgaggctaagcaagaggcctctgcatcttgacacctaggagagcagggacggagtctcccagggtggaggaccatgctgcgccgcaagccctccaatgccagtgagaaggagtttaatctggatgataacattccagaagatgactcaggtgtccccaccccagaagatgctgggaagagtggcaaaaagctggggaagaagtggagggcagtgatttcccgaaccatgaacaggaagatgggcaagatgatggtgaaggccctgtcagaagagatggcagacactctggaggagggctctgcctccccgacatctccagactacagcctggacagccctggccctgagaagatggcgctggccttttctgagcaagaggagcatgaacttccggtgctcagccgccaggcatcaacaggcagtgagctctgcagccccagcccaggttctggcagcttcggggaggaaccacctgccccccagtacacagggcctttctgtggccgggcacgagtccacaccgacttcactcccagcccctatgaccacgactcgctgaaactgcaggtaagatcagcatccgggcttctctggagcctggcaggctgtgcccaaaaaggaagctggactgaaccaggctatgacagtgtcagtggaggccaaggccccccatatcctctctcccttgctcccttctcctctcctctcccccaacagaaaggagatgtgatccagatcattgaaaagccacctgtgggcacgtggctgggcctactcaatggcaaggtgggctctttcaaattcatctatgtggatgtgctgcccgaggaggccgtggggcatgcccgccccagccgccgacagagcaagggcaagaggcccaagcctaagaccctgcatgagctgctggagcgcatcggcctggaggagcacacatccaccctcctgctcaatggctaccagacactggaagacttcaaagagctgcgagaaacacacctcaatgagctgaacatcatggatccacagcaccgggccaagctgctcacggccgccgagctgctgctggactatgacactggcagtgaggaggctgaagagggcgccgagagcagccaggagccagtggcacacacagtgtcggaacccaaggtggacatcccgcgcgactcaggctgctttgagggctcggagagcgggcgcgatgacgcagagctggcaggcactgaggagcagctgcaaggcctctccctggccggggcaccttgaggtggcggtggcaataggccaaggctgggacccagctgcaaaggctgtaggagtggggtttatcgaggggaccagaggggcctcaggctttcagatgaaatggctcctcctactcacccactttattcctctccatgtaattcaggacaagctgcaacttcccccagcttaacacaatgcccatacctcatacgatatgcgccctcccgttccatccctggccccctcaaacgagacttctcacaaggctgattacagatggtcaaacct

SEQ ID NO: 3370 - DNA, 1521 bp, Homo sapiens
  source 1..1521: mol_type = genomic DNA
gttgcggcagtcgcgtcccgggagcgtcgctgcctggtgaacgctagaatgggtactaggaaaaaagttcatgcatttgtccgtgtcaaacccaccgatgactttgctcatgaaatgatcagatacggagatgacaaaagaagcattgatattcacttaaaaaaagacattcggagaggagttgtcaataaccaacagacagactggtcgtttaagttggatggagttcttcacgatgcctcccaggacttggtttatgagacagttgcaaaggatgtggtttctcaggccctcgatggctataatggcaccatcatgtgttatgggcagacgggagctggcaagacatacaccatgatgggggcaactgagaattacaagcaccgggggatcctccctcgtgccctgcagcaggtttttaggatgatcgaagaacgccccacacatgccatcactgtgcgtgtttcctacttggaaatctataatgagagcctgtttgatctcctgtccactctgccctatgttggaccctcagtcacaccaatgaccatcgtggaaaaccctcaaggagtcttcattaagggcttgtcagttcacctcacaagtcaggaggaggatgcattcagcctcctttttgagggtgagaccaacaggattatagcctcccacactatgaacaaaaactcttccagatcacactgcattttcaccatctacttagaggcccattcccggaccttatcagaggaaaagtacatcacttccaaaattaacttggtggatctggcaggctcagagaggctggggaagtctgggtctgagggccaagtcctgaaggaagccacctacatcaacaaatcgctctcattcctggagcaggccatcattgcccttggggaccagaagcgggaccacatcccctttcggcagtgcaagctcacccacgctctgaaggactcgttagggggaaactgcaatatggtcctcgtgacaaacatctatggagaagctgcccagttagaagaaacgggttccaggctgtggttataaggccagtatgagcagatggtattaagcacctgccatgtgcaccatgctatcttcactgagatttgccagcaggatgaagctagtcaccactgagcctgccatcaatgaaaagtatgatgctgaggaatggccaggatgtctgggcacagaatgaggaattgtacttttgctgtggaagagacagggtagcttctctgatgatccttcctgtcggcccccaccctaccatgtttcccggcagagaatggtcaagaacctggagaaggaactagcactactcaagcaggagctggctatccatgacagcctgaccaaccgcacctttgtgacctatgaccccatggatgaaatccagattgctgagatcaactcccaggtgcggaggtacctggaggggacactggacgagatcgacataatcagccttagacagatcaaggaggtgttcaaccagttccgggtggttctgag

SEQ ID NO: 3371 - DNA, 2755 bp, Homo sapiens
  source 1..2755: mol_type = genomic DNA
cgccgctcgctccgccccccgcccggaagctcccgcccgagcccgcgcaggccctggggccgaccttcctgccgggccgggcggtccgaggctgctggagtgccgtgagcaggccgcgggaacgtcgccgtcaccttgtctcggggcctcggcgctgcttcccgccaaaacacgtttaccgcgcgcccgggcctcccaccttgcggaagggaccccaccaccacttggatttctgttgcaggttgagaacaaaaacatgcacctggagtttccccggagccctctgcgtggttgagcttcggtggaatttcggggctcttggctgccagccgcgcttgcctggtagcaacagaaaccagtcctgctcgcctccgtggacatttcattaccatccagaagtgtctcccactgaaggcatccgtggttgtttttaagccacaaaaaagccacacccaagatcacctgacacccaccctgacaagtgtccatgatgctgggccctgagggaggtgaaggctttgtggtcaagctccgtggcctgccctggtcctgctctgttgaggacgtgcagaacttcctctctgactgcacgattcatgatggggccgcaggtgtccatttcatctacactagagagggcaggcagagtggtgaggcttttgttgaacttggatcagaagatgatgtaaaaatggccctgaaaaaagacagggaaagcatgggacaccggtacattgaggtgttcaagtcccacagaaccgagatggattgggtgttgaagcacagtggtcccaacagtgccgacagcgccaacgatggcttcgtgcggcttcgaggactcccatttggatgcacaaaggaagaaattgttcagttcttctcagggttggaaattgtgccaaacgggatcacattgcctgtggaccccgaaggcaagattacaggggaagcgttcgtgcagtttgcctcgcaggagttagctgagaaggctctagggaaacacaaggagaggatagggcacaggtacattgaggtgtttaagagcagccaggaggaagttaggtcatactcagatccccctctgaagttcatgtccgtgcagcggccagggccctatgaccggcccgggactgccaggaggtacattggcatcgtgaagcaggcaggcctggaaaggatgaggcctggtgcctacagcacaggctacgggggctacgaggagtacagtggcctcagtgatggctacggcttcaccaccgacctgttcgggagagacctcagctactgtctctccggaatgtatgaccacagatacggcgacagtgagttcacagtgcagagcaccacaggccactgtgtccacatgaggggcctgccgtacaaagcgaccgagaacgacatttacaacttcttctctcctctcaaccctgtgagagtccatattgagattggcccagatggaagagtgacgggtgaagcagatgttgagtttgctactcatgaagaagctgtggcagctatgtccaaagacagggccaatatgcagcacagatatatagaactcttcttgaattcaacaacaggggccagcaatggggcgtatagcagccaggtgatgcaaggcatgggggtgtctgctgcccaggccacttacagtggcctggagagccagtcagtgagtggctgttacggggccggctacagtgggcagaacagcatgggtggctatgactagttttgttaggaacatttgagttacttcaatcattttcacaggcagccaacaagcaattaagagcagttataatagaggaagctgggggacccattttgcaccatgagtttgtgaaaaatctggattaaaaaattacctcttcagtgttttctcatgcaaaattttcttctagcatgtgataatgagtaaactaaaactattttcagcttttctcaattaacattttggtagtatacttcagagtgatgttatctaagtttaagtagtttaagtatgttaaatgtggatcttttacaccacatcacagtgaacacactggggagacgtgcttttttggaaaactcaaaggtgctagctccctgattcaaagaaatatttctcatgtttgttcattctagtttatattttcatttaaaatcctttaggttaagtttaagctttttaaaagttagttttgagaattgagacacaatactaatactgtaggaattggtgaggccttgacttaaaactttctttgtactgtgatttccttttgggtgtattttgctaagtgaaacttgttaaattttttgttaactaaatttttttcttaaaataaagactttttcacaatgactggcacagattactcagcaaaagatagcaaaacgggtggttgaagataattcattttaatcgtaatgtattttagtgtgaatttaaaaatttcatacatcaaatctatgatctcccttatattcttatgatgaggctaaataaaagtctaataaaaatgttaaatatgtgaatggtggaaatggtgactagcagcacacattctgggaagcatcaaatagacacacggccccagccacctgcaacttatgtgcactgttgtaaaccattcagaattttcctgctaggcccttgatgctggagtcacatctgttgatagctggagaactttagtttcaagtactacattgtgaaagcaattattttgtttctagtttttataaaatgctgatttaaactttt

SEQ ID NO: 3372 - DNA, 3678 bp, Homo sapiens
  source 1..3678: mol_type = genomic DNA
aatctctactcggcccgcaccagcagcgctggcgtcagggcgcggtgggggcaagacgggtgactggcagcagggcggtgccgggccgagaagggcgcctcacctggcgcctcctgccttcctttccacctcaggttgcagagagccgccagggcaggtggaagggccacgccccgctcccgtgagggtcaccgagagacgttgggggtggggcagggaccccaaccctagaccagtcctgtagggcacaatgtctgaacaagagcgtatacaggaatgtctgcggaaggaaataaggtcacttctcatttccaccaaagatggtttgagcccacaggagttggagaaggagtaccttttgatggttggcaaccatctaccactccgaatccttgggtatcggtccactatggagctggtattggacatgcctgatgttgttcgtgtctgccccggtgcaggtggtactgtaatactgaaagccattccagatgaatctaccaaaggaatagcaagcttagttgcaaaacagaggagcagccataagcttcgaaactcaatgcataagggaagacctagtatttattctggaccgagatctcatcggcgagtaccttaccgaggaagggttgcccctattcttccagctgttgtgaagagtgagttgaaggacctgttggcgttatctcctgttcttctttctgattttgaaaaggcatttgccaaaagatttggacgatcattccaatacatgcaatatggatttctctctatgtttgaagtgcttaatgcggcttcagatgtcatttctgtagagcagaccagagcaggttctttgttgatgctaaagaagagtgtaacagaggaaaagccgagaggatgtccagcaggtaaaatttttacccagccatttagaatgaaacaagggtcatactccacaggctttccggtagcaaagccatgcttttcacaacccacttcaaacatggaaccaccgaagcaaataatgagcatggaaaagacttccaagttaaatgtagtggagacttcaagactgaatcacactgaaaaattaaaccagctggagaacacattcaaatcagttattgcacagattggacctggaggaactatcagttcagaactaaaacataagataaaatttgttgtatctaagttcccagagggtttgtttatttctaaactgcttggagagtatgaggtaatttttaaagagcaactatcaccaaaaaaattaggcttcttaaatgtgacagaacttgttggagctcttagtgacattctccatgttgagttcaggaaaggacaccaagacttactagtgtttgatgcggataagaagcctctaccacctgttcagtcagataagaaaatagaagccaaagcttgtgtctccagtccacctagaaattcattgtctactgctgctgtcaaagagactgtatggaattgcccttcaaaaaaacaaaaagagccacaacagaagatttgcaagaagcctaatctggtggtaaagcctttacagctgcaagtagaaacaaacaaatcagagctcaacttggcaatggcaaatcatgacatcccgccagacgctgtgccgaacaagaaattatgcagactcccaccattagacaccagttccctcataggggtctttgtggagtatatcatctctcctagtcaattctacatccggatctatagcagggattcgtcagagttactcgaagacatgatgattgaaatgcggcgctgttattctaatcagctggtttctgatcgatatgtcatgccagaatgttttattcagccgggacatctctgttgtgtaaggatttctgaggataagtggtggtatcgggtcattatccatcgagtccttgagaaacaggaagttgaagtgttctacccagactttggaaatattggaattgttcagaagtcctccctgaggttcctcaagtgctgctacacaaagcttccagctcaggctatcccttgttctttggcttgggtgagaccagtagaggaacactggacatcgaaagctattttgcagttccagaagttgtgcggtttgaagccattagtgggggtagtggatgaatatgtagatggaatccttaacatttttttgtgtgacacatcctcaaacgaagatgtctatttccatcatgtcttgagaacagagggccatgctattgtatgccgagaaaatatctcttctaagggtttcagtgagctcaaccctttagctttatacacgacatccagtggagggccagaggacattgtcttgacagaactgggttatccttcccagcagcactattttaatgaagaccgaaagataagtccacagtcaaaagagagtgagttacgtatcttgcaagatattaatgatgaaaagtctttaagtcatcttaaatctgagtcaaaggagccattaaaggattctgaatttgagtctttgaaaacctgtaataagagctttgaagaagatccaaagtggtccaacccagaaccaaacgatctgaaggaagaaaatgaggatgagatccccactggaatgccatgcctggagtcagtgaccataggtgatgatatttgggatgagaactggttacctctacaggctaagatgggaaaaggaggtgatgctgcctcccatctatttactgcaagccttggtggaaagaatcagtattcatcatgtaaagaaatgccacagaaggactggtgtttttctacccctaaagatacatgggatgattcttggcagccttcaggccttgtaaatggaacgaaagtagaagttcataagccagaagtactgggtgctcaggaaaaaaatactggcacaaacaggactcaaaagcaactagacataaatggttcttcagattcttccacactgcccaaattggaagaattctgtacctctcttacccagtcagagcagtcagcagacgggagccagtctgaacccaacaacagtcagactcagccaaagcaaattcagctttccacagcagcaccctgttcaacaactgcagtggatgattccgcagaaaagccctctggttctgtggaaagctcaccagagatcctaaagaatgaagatttttctagcagccgtgctattacattgtacaaagacaagcgtcaagaatctgtagaccagctgtctttgattttgtcttatgagtgccagatttctcagaagctctacattcctcgaagtacagccactgctgccttaggtgctgccgcacggttagctacatccaggagcctcctacactggtaccccagtgtgaaaaggatggaagcatgagggagggagggaggagggagaaaaacagaatccagccgcttaggctttgatgaactcccaggccaaaatgaggagttattgaagcaaaatagtatcttgatcattgatacttttgtctttctgtgactatatgttagctttattatgctaacagtctactttgatgtgtaagtaagtattgatatttactgttaatcttgatttttcttgattttattctgtgtcattttgttcacctttgtttttaatgtagtttaaaggaatttgtttttttgtgtttgtttttcttgtacattatcatgactgataaatgaaaattg

SEQ ID NO: 3373 - DNA, 1204 bp, Homo sapiens
  source 1..1204: mol_type = genomic DNA
gagacggaagtttacgacgcccagagcgctccttctggacgtgccctggactcgacttgggactgagtctgtgccgcctaggctggcagggactcggccagatgcactagcggcaaggctgggctgacaccgcctgggactcgctcgccgtacctccaaggggcccaggtcatgagggggcggctggggagacgcccgcccggtgcccgccctgggcccggcgggtgccccctgcccgccgcctgacgcaatccgaggcgcccttgctgcatgccggcgctggagaaacctcccctgccgttgcatcactcctgccaggtttgccacagaggtggagctgaaccaatcagcgggcgcgctgggcccgcggcgcggttaagtgagaagcagaatccgaagttgattggccaaaaggggatttgccccaccccaatcaccgcggcagctggccgcggtgggcgtggtctcccggcaagaaggtttaaagggcgcctccatggggggcgctcagctggagctaccgagcggtgccaggccaggtgtgtgcgtccgtcggtctttccgtgcccacgccggagaccagccccggaggccgcctgggcctatccctgtgccaggcaccatgaagcaggagtctgcagccccgaacaccccgcccacctcgcagtcccctacgccgtccgctcagttcccccgaaacgacggcgaccctcaagcgctgtggattttcgggtacggctccctggtgtggaggcccgacttcgcctacagcgacagccgtgtgggcttcgtgcgcggctacagccgccgtttctggcagggagacaccttccatcggggcagcgacaagatgcctggccgtgtggtgacgctccttgaagatcatgagggctgcacttggggcgtggcataccaagtgcaaggggagcagaaccctggttacctgggccctgcgcctgaagaggccattgccacgcagatcctggcctgccggggcttctccggccacaaccttgaatacttgctgcgtctggcagacttcatgcagctctgtgggcctcaggcgcaggacgagcacctggcagccatcgtggacgctgtgggcaccatgttgccctgcttctgccccaccgagcaggctctggcgctggtgtgaggggctgagcccctgcggggagtgctcatgtggacatcagggccagac

SEQ ID NO: 3374 - DNA, 3182 bp, Homo sapiens
  source 1..3182: mol_type = genomic DNA
aatgtttatgcatagaaatatagctgaggtggatgtggttgctgtcagctattcaggtttgctacctgatcacctcctgaagatgtagggttgacgatgtgtcacactgtgtaagggaatcgcatggagatgggcattccgaactgttaatggggacatgggactccagttgtctctgatcacttgtgtggattttcctggcgtagaacgacagaagccgctagtaagtcgccaagacctacagcaggaattctgcaccaaagggcataaaatcttgttattttaatttgcatctgggagaatgtctgagcaaggagacctgaatcaggcaatagcagaggaaggagggactgagcaggagacggccactccagagaacggcattgttaaatcagaaagtctggatgaagaggagaaactggaactgcagaggcggctggaggctcagaatcaagaaagaagaaaatccaagtcaggagcaggaaaaggtaaactgactcgcagccttgctgtctgtgaggaatcttctgccagaccaggaggtgaaagtcttcaggatcaggaatcaattcatttacagctttccagtttttccagcctgcaagaggaggataaatctaggaaagatgactctgaaagagaaaaagaaaaggataaaaacaaagataaaacctctgaaaaacccaagatcagaatgttatcaaaagattgcagccaagaatacacggattctacaggcatagacttacacgagtttctgattaacacattaaagaataattccagggacaggatgatacttttgaaaatggagcaggaaattattgatttcattgctgacaacaataatcattataaaaagttccctcagatgtcatcgtatcagaggatgcttgtccatcgagtggcagcttattttggattggatcacaatgtggatcaaacaggaaaatctgttatcatcaacaagaccagcagcaccagaataccagagcaaaggttttgtgaacatttaaaagatgaaaaaggtgaagaatcccagaagcggtttatcttgaagcgagataactctagtattgataaagaagacaatcagtcagtttgctcccaggaaagcctttttgtggaaaacaggggcaacagagatggctcagggagaacatctgggagtcgacagagcagctcagaaaatgaactcaagtggtctgaccaccaaagggcctggagcagcacagactccgacagttccaaccgcaatctaaagcccgccatgaccaagacggcgagttttgggggcatcacggtgctgaccaggggtgacagcacttccagtactaggagtaccgggaagctgtccaaagcaggttccgagtcttccagcagtgcaggctcctcaggatcgctgtcccgcacccatccacctctccagagcacacccctagtctcaggtgtggcagctggctctccaggctgtgtgccttatccagagaatggaatagggggccaggttgctcccagcagcaccagctacatcctccttccacttgaagctgcaacaggcatcccgcctggaagcatccttcttaatccacacacaggccagccctttgtgaatcccgatggaactcctgcaatatacaacccacccaccagtcagcagcccctgcgaagcgccatggtggggcagtcccaacagcagccaccacagcagcagccctccccgcagccccaacagcaggtccagccaccgcagccacagatggcaggccctctggtcactcagtctgtccaggggctgcaggcttcctcccagtcagtgcaatatccagcagtctcttttcctccccagcacctcctacctgtgtctccaacgcagcactttcccatgagagatgatgtggcaacacagtttggccagatgaccctgagccggcagtcctcgggggagactcctgaacccccatcaggtcctgtctacccatcctcccttatgccacagccggcccagcagcccagctatgtaatcgcctctacaggccagcagcttcctacaggaggattctcaggctctggccctcccatctcccagcaggtcctccagccccctccctcaccacagggatttgtgcaacagcctccgcctgcacagatgcctgtatattattacccatctggtcagtaccctacctcaaccacgcaacagtaccggcccatggccccggttcagtacaacgctcagaggagtcaacagatgccacaggcagcacagcaagcaggttaccagccagtcttgtctggtcaacagggattccaaggcctaataggagtgcagcagccacctcagagtcagaacgtgataaataaccaacaaggaactccggtgcaaagcgtgatggtttcctacccaacaatgtcttcttatcaggtgccaatgacccagggttctcaaggactgccccagcagtcataccaacagccaatcatgctacctaaccaggcaggtcaagggtcactcccagccactggaatgcctgtttactgtaatgtcacaccgcccacccctcagaacaaccttaggctgattggcccacactgcccctccagcactgtcccagtgatgtcagctagctgcagaacaaactgtgcaagtatgagcaatgctggttggcaggtcaaattctgagagctctggctgtggtacatttcttcagatatttctcatggcctttgatggaagaggaacaaggtgggaaaactggctgaggacttaagtattcactcaacactcaaatgattgctgctggtattctgtaaaaaataaacaaagactaatatacacgttagctggttaatggtgcatatttctgtcatgtctgctaggtatgcctttatagcttagctagtgacatgaattcatcaaggtaagattttctcctaccactgaataccactgtgtagattataatatccctaatttggattagttttgtactttgtgttgagtttgtgatgctaaaagtatttaaaaattatatactaaatcacattgtaccaaagctgtaatggaaaagcaaagaagaattgatgaattgaaggaataatttatatacattatagagttttcttttttaatggatatatactgtattgtagtgtttaatcaaaataaaactatttgacct

SEQ ID NO: 3375 - DNA, 2853 bp, Homo sapiens; identical to SEQ ID NO: 3269
  source 1..2853: mol_type = genomic DNA

SEQ ID NO: 3376 - DNA, 2233 bp, Homo sapiens
  source 1..2233: mol_type = genomic DNA
cgcaggtcccgcccctctcgtagcctcgccccgcccgccgcgcaggcgccgtccgagggctccgtttgaaacatggcgcgggctggccctcggctggtgctgagcgaggaggcggttcgggcgaagagcggcttagggcctcaccgcgacctggctgagcttcagtcattgtctattcctggaacttaccaagagaagatcacccacctgggacattctctgatgagtttaacaggtctgaaatctttggatctctcgcgcaactccttggttagtctggagggcattcagtacctgactgcattggagagtctcaatctctactacaactgcatctcctcgttggcagaagtgtttcggctccacgccttaaccgagctcgtggatgtggacttccggctgaaccccgtggtgaaggttgagcctgactaccgcctttttgttgtgcacctgctccccaagctccagcagctggacgatcgccccgtgagagcaagcgagcggaaggcttcccgactgcattttgcatcagaggactcactcgactccaaagagagcgtcccagcttctttgaaagagggcagaatccagacatctgttgagcccgcagttggtacagtaccagtgtggggactctgggaagcagggccgtgagacgaggaggagcagctgcagagggtgctgtctggagaagatgccttggagccagctctgtggagagcttccgccactgtacggagcggagccagaggcctcccgtgcccccaggccacacacgtacttcaccccacacccagactccatggataccgaggactcggcctcttctcagaagttggatttgtcaggagaaatggtgcctggtcccctgccagcccccggaaagtgcaggaagcgaagaatgcctgttggaagattccagacgttttcggaccaggagggtttgggctgcccggagagaactcatgggtcctccgtgcccaaggagagcctgagcagacaggacagctcagaaagcaggaacgggaggaccttgtctcagcctgaggcctcggagactgaggagcagaggtctcggggtgtgaccgacaccagagagccgtctcccgggtcacactcggctctacccgggaagaagacggccctgcaggcggcgctcctggagacgctcttggacctggtggacaggagctggggcggctgcaggtccctgcacagcaacgaggcattccttgctcaggcaagacacatcttgtcatctgttgaagaattcacagcagctcaggacagctctgcgatggtgggtgaagatgtcggctccctggctctggagagtaagtccctgcaaagccgccttgctgagcagcagcagcagcacgcccgggagatgagcgaggtgacggcggagctgcaccacacacacaaggagctggatgatttgagacaacatttagataaatctttggaagagaacagtaggttaaaatcgcttttgttgagtatgaaaaaggaagtgaagagtgcagacactgcagccacgttaaatttgcagatcgctggacttcaaacaagtgtgaagaggctgtgtggcgagattgtggaactgaagcagcacctggagcactacgacaagatccaggagctcacgcagatgctgcaggagagccacagctccctggtcagcaccaatgaacacctgctgcaggagctgagccaggtgcgggcgcagcacagagccgaggtggagcagatgcactggagctaccaggagctcaagaagaccatggccctgtttccacacagcagcgccagccatggaggctgccaggcctgctgactcctgccgagaagctgggccaccccttaagcttcctggtaaagttacattgtctgcacctttgtacttctttattgagtgtactggctggcaagagttctctcttctgttggtaattatttaggatttttggaatgtattcaggacctgtagcttggttttctaaagcacctcgtaaaatgatatgattactccaagccctctgcatgttttcagacagaacacattgacatattttgagacaaactgactattaatcttgtatccagtatcctgagatgaagtaaatgcagtgttctactgcctgatgtgaaagagagctatgtatgataattaaagaaaataattttctgtgtaacaagcaatctttatttaataaacaaatacattgttctg

SEQ ID NO: 3377 - DNA, 253 bp, Homo sapiens
  source 1..253: mol_type = genomic DNA
ttctcatctcctgacactatgtatttcaattacaaaagtgtgtgtgggagctgtggatttggctcttgctatggttgtgggtatggctgtatacacagcacccactgtggctgtaacggttattatggttgttatgaaaataaatattctgttatagatgatctgatattttttgcttctaagaaatgccattgagcattgtttcttatttagtttctcaaagatctgttctgctttaatcaccttcaatcct

SEQ ID NO: 3378 - DNA, 1756 bp, Homo sapiens
  source 1..1756: mol_type = genomic DNA
tcttgcggctgttctacccctccccctccccgcggtaccttgcacttttctccctccctgccccctctcgagtccaccctccgggccttctgcccctgatcgcttggttttccttgcagtcgcctgctgctgtcgtcgggaggaaagatgaatgggagggctgattttcgagagccgaatgcagaggttccaagaccaattccccacatagggcctgattacattccaacagaggaagaaaggagagtcttcgcagaatgcaatgatgaaagcttctggttcagatctgtgcctttggctgcaacaagtatgttgattactcaaggattaattagtaaaggaatactttcaagtcatcccaaatatggttccatccctaaacttatacttgcttgtatcatgggatactttgctggaaaactttcttatgtgaaaacttgccaagagaaattcaagaaacttgaaaattccccccttggagaagctttacgatcaggacaagcacgacgatcttcaccacctgggcactattatcaaaagtcaaaatatgactcaagtgtgagtggtcaatcatcttttgtgacatccccagcagcagacaacatagaaatgcttcctcattatgagccaattccattcagttcttctatgaatgaatctgctcccactggtattactgatcatattgtccaagtcaaagtaaacaagtatggagatacttgggatgagtgaaaaattacatcattggacatgaaggagtttcaacatccagcttcatctaggtggtcatgattacctgcatgctttgagctcagcagcagtcttcataaacacatttaaaacaagatcctgggtttttgtggtttgacttctatggtgttttaaaaaaacacagatttttagtgttaatattgtgtaaatgtactcaccttagggattcatttgaatgatggtattataccatgattgtatacagtttgtgaaattgttgcaagggcaaagataactcttaaaaaaccgtcgagattacaatgctctagaatcagcatataagaaaataaatgatatctgcatgttgaattggggtggatggggggagcaagcataatttttaagtgtgaagctttgcatcaagaaattattaaaaagctttttttctccagtattttctgtattatcttaatgtttatggcaaataaaatgtaaaggaacatgcaacagccctcatcttccttgattttatggttttattgtttgtaatttattgatttatttttaagctagttataatcatgtaggtataggaaataaagtcatctataatatttctataatatggctataatatggctataaatctataatatggctggaggcagtgggcagtggttcatgcctgtaatcccagcactttgggaggccgaagtgggaggattgcatgagtccaggagtttgagaccagcctgggcaacaaagcgagaccctgtctttacaaaaaaataaaaattagctggcgatggtgtcgtgtgcctgtagtcctagttacttaagaggctgagttgggaggatcagttgaacccagtggttctgggttgcagtgagctgtggtcacaccactgaactccagcctgtgcgactgagtgagaccctgtgtctaaaaaaataaaaatataatgaatgtgatttatgtagataaattgataatatagtaaataggtaaatgccttaaaaagcatttttaaagaatttgtaaatt

SEQ ID NO: 3379 - DNA, 5940 bp, Homo sapiens
  source 1..5940: mol_type = genomic DNA
aggacgttgcgtgctcgctcgcgccaggcgagtctccgcgtctccctcgcgaactcggtgaaaggaattggcgccgttcgacaccaggcggatccgctctgcagcacgaacccatctccagccgcagccgcagccgccgcccgggccgaggagcagccgcagcagccgccaccagtggccgagtgagcggagccgagtttgaggcagcgcctagcggtgaatcggggccctcaccatgagttcctcgcctgttaatgtaaaaaagctgaaggtgtcggagctgaaagaggagctcaagaagcgacgcctttctgacaagggtctcaaggccgagctcatggagcgactccaggctgcgctggacgacgaggaggccgggggccgccccgccatggagcccgggaacggcagcctagacctgggcggggattccgctgggcgctcgggagcaggcctcgagcaggaggccgcggccggcggcgatgaagaggaggaggaagaggaagaggaggaggaaggaatctccgctctggacggcgaccagatggagctaggagaggagaacggggccgcgggggcggccgactcgggcccgatggaggaggaggaggccgcctcggaagacgagaacggcgacgatcagggtttccaggaaggggaagatgagctcggggacgaagaggaaggcgcgggcgacgagaacgggcacggggagcagcagcctcaaccgccggcgacgcagcagcaacagccccaacagcagcgcggggccgccaaggaggccgcggggaagagcagcggccccacctcgctgttcgcggtgacggtggcgccgcccggggcgaggcagggccagcagcaggcgggaggggacggcaaaacagaacagaaaggcggagataaaaagaggggtgttaaaagaccacgagaagatcatggccgtggatattttgagtacattgaagagaacaagtatagcagagccaaatctcctcagccacctgttgaagaagaagatgaacacttcgatgacacagtggtttgtcttgatacttataattgtgatctacattttaaaatatcaagagatcgtctcagtgcttcttcccttacaatggagagttttgcttttctttgggctggaggaagagcatcctatggtgtgtcaaaaggcaaagtgtgttttgagatgaaggttacagagaagatcccagtaaggcatttatatacaaaagatattgacatacatgaagttcgtattggctggtcactaactacaagtggaatgttacttggtgaagaagaattttcttatgggtattctctaaaaggaataaaaacatgcaactgtgagactgaagattatggagaaaagtttgatgaaaatgatgtgattacatgttttgctaactttgaaagtgatgaagtagaactctcgtatgctaagaatggacaagatcttggcgttgccttcaaaatcagtaaggaagttcttgctggacggccactgttcccgcatgttctctgccacaactgtgcagttgaatttaattttggtcagaaggaaaagccatattttccaatacctgaagagtatactttcatccagaacgtccccttagaggatcgagttagaggaccaaaggggcctgaagagaagaaagattgtgaagttgtgatgatgattggcttgccaggagctggaaaaactacctgggttactaaacatgcagcagaaaatccagggaaatataacattcttggcacaaatactattatggataagatgatggtggcaggttttaagaagcaaatggcagatactggaaaactgaacacactgttgcagagagccccccagtgtcttgggaaatttattgagattgctgcccgaaagaagcgaaattttattctggatcagacaaatgtgtctgctgctgcccagaggagaaaaatgtgcctgtttgcaggcttccagcgaaaagctgttgtagtttgcccaaaagatgaagactataagcaaagaacacagaagaaagcagaagtagaggggaaagacctaccagaacatgcggtcctcaaaatgaaaggaaactttaccctcccagaggtagctgagtgctttgatgaaataacctatgttgaacttcagaaggaagaagcccaaaaactcttggagcaatataaggaagaaagcaaaaaggctcttccaccagaaaagaaacagaacactggctcaaagaaaagcaataaaaataagagtggcaagaaccagtttaacagaggtggtggccatagaggacgtggaggattcaatatgcgtggtggaaatttcagaggaggagcccctgggaatcgtggcggatataataggaggggcaacatgccacagagaggtggtggcggtggaggaagtggtggaatcggctatccataccctcgtgcccctgtttttcctggccgtggtagttactcaaacagagggaactacaacagaggtggaatgcccaacagagggaactacaaccagaacttcagaggacgaggaaacaatcgtggctacaaaaatcaatctcagggctacaaccagtggcagcagggtcaattctggggtcagaagccatggagtcagcattatcaccaaggatattattgaatacccaaataaaacgaactgatacatatttctccaaaaccttcacaagaagtcgactgttttctttagtaggctaactttttaaacattccacaagaggaagtgcctgcgggttccttttttagaagctttgtgggttgattttttttcttttcttttttgtacatttttaattgcagtttaaaagtgaatcgtaagagaacctcagcattgtgcacgataagagaatgtgtcagtatttcagggttctacattttatctgtaaaatgtgacttttttttttttttatcacaacagaagtaaaatgttgctttgtacctggtgtcttttattaagaatttactccccccatttctcacagagaataacagtcgggagtcattgtcacaatataatagaaatgttagcaaccagattcatgtaaggactaagtggtcctcatgaattgcattaagactctgtactgctcatattacactccatcctctctgtagtttgctgggtagtggagggggtaagctaaatcatagtttctgacaataactgggaaggttttttcttaaaataacaatggaattggtataattgggattgaaaactaaaacttggaactaagatagagaagatggagtgtatgtagaagggctgttaaaaatgtaaaacttggttgcattatttgtggaggctcaaacttgtgaaggttaataccataatttttccatttgttctgcattttgattctgaaaagaaagctggctttgcccatttcttattaaaaaaacttgttgtaaatccagttgtctaatgggatctatatgaagttagccatgtctgtatgcccttctcccacaaaatactgtataactagtgtgcttgtagtagttaactccaccatctttgtaagctaatgaaattgtgagtcacccatttatatcttaatttttaatcatgtcagttcttgaatgggtatctccttagcctgctgatttctttttctttctaaagaaagtgggtggagaaattaatttagacgtttgtttgcaataaaaagaattcattttactcttgttttgggattctcgccatcaaggttcaaaatccctttatataactcccaagaggagaaatttattaagtgtgtgctttctggacagcttattctttactctgcatagaacatttaggttttaaaaacttaaatgtatactgacaattgatacataattatgaagtaaagttgaattcttcccttcccctcccccccagacaacttttaacatatttaatgaggggaaaaggtactggctgggagaagttaacactgagtttatcatctttacagaatgctaatgctgtcctcaactgattattttatatacatatatatgatacatgaaactctgggatcagatgcttttagaagccatcatgcaagccagtcattgatgtcactgctacacaacactgctaacttgactgtagctatgtaataacattagatcccctaattgtaattatattgggtttgcacagaacactttaatcttcccctcaccaatgtgaagtgaggaatcaggagtcaaactgtagaactaaaatttgacttcagtctagcgtttccttggtgtttttaggttgctttggtaagtttaggtttgctatatttctgattgcttagaattttgttttagccctttaaaatcagatcataaatatgaattcatacttctaaggaattttcttgctataagctggagtttaggtgatgtataggttcagttgagacatttttggaacaggcaaatccttagttaacataagatatttaacagttgaagatagtgtcatggatttttatcttttttagcaagtaatgctaagaaccactggcctgagctactactcttcagtatacattattaggattgcatagacttactagaggaacagtttcaggttttgatgctaatcagtgttgtgtcctaaagttgtcctttgtgcctttaaaaagttttggatatatcttctagtttaaaattgcttattaaggaattcattttataattgcagtgggaaagtaatggtcaagtaacactaggtagactatcatgcctgtttagcccagagaatttggggggagagagaatagataaaaatggcacccagaaaaatgttaaaatctttagtcaagactagaattaatacaattgtctacacttgtatggcagaaataaccttataaagtgtttaaggaattcagagaagggaatgtaccaaataagcaacagggagaaaattaggtaagaagtaagatacgaacgagaaacctgatttattgctcatccttcccttgcctccctaatggcaagcaaaactctgaacatctgaaaaggatgtagttctggacaaatcctgactacccagaggaaactcactgtgagattgctgttgatttgaagggtgctttcactaaggttatattttaaagtagaataacacatgctgagtgtaaactggctttggattggtcagctgcagtagtacaaaaacagcatagaatttgagaaaactaaaactgctatgagatagctatgagaaaactaaaactgctatgagatagaaatgatgtaaaattatgtggaaagttttccctcatatactcacatacagcctttgaagggctctggctctgaccggttgatggccttgagcgagatgaaatcatgaaattgagtcaaatcaatttgacattgaaatgacaagaggaaactcttaaatacataaaaacaagctctcatttgcctaggatagatactgtcttaaaaataaagactgaacctagatgttctgagcactagcaacaaggtattttaacaagtttaaaggaattctctgaaaaagttataaaattattctaggaaacataaccataatagtgttttaagggactttcacctggggattttatattcatgaacagagtgtattctgtatttaaaatgtctcatttgtgggaattggatgacatgttttttgataaatttattcacaatataaattgactttttattctaggaccatgtgaataatgggttccattgcacaaatacaaatattttaatagcttcttaggcagtggtgtagacatcttggatataaataattgtagatcttgtatatttgatttttaaaaaactagaataaacagagaggcataaacatatcttagagtccaagtggtagtgtttagcattggatataataaatggatgttttacaaagtg

SEQ ID NO: 3380 - DNA, 2758 bp, Homo sapiens
  source 1..2758: mol_type = genomic DNA
gagcgaggagccgggagcggggaacagggagtcggggagccgggaaccagggctggcagcggccgccatgagcacggtggaccttgctcgcgtgggcgcgtgcatcctgaagcatgcggtgaccggggaggccgtggagctgcggagcctgtggcgggagcacgcgtgcgtggtggccgggctgcggcgcttcgggtgcgtggtgtgccgctggatcgcccaggacctcagcagccttgctgggctcctggaccaacacggcgtgcgcctggtgggcgtagggcccgaggccctgggtctgcaggagttcctggacggcgactacttcgcgggagagctctacctggatgagagcaagcagctttacaaggagctaggcttcaagcggctctggacccaggcttctccggagtttggccaagcgacctggtgtcttcgcaggtacaacagcctgagcatcctcccagcagctctggggaagcccgtgcgtgatgtggctgccaaggccaaggctgttggcatccaggggaacttgtctggggacctgctgcagagcggagggctgctggtggtcagcaaaggtggtgataaagtgctcctgcatttcgtccagaagtccccaggcgactacgtccccaaggagcacatcctgcaggtcctgggcatctctgcggaggtctgtgccagcgacccgcctcagtgtgacagagaggtgtgagggaggcgaaggccctggcctccgaggatctgggtggcgtctgctgccctaggtgtgctggaagtccacttggaagaactgttccggaggcgctgggtcgggatgccgaacctctcctgatccgccggcagcaacgagccattaaaactgcagttcctgaccacgcactgcttcgcaggctccgagccctgcatcctccacagcccccgccttgctcactgttgggccctcagggcgggcagggtggctgtgagtcccaggtgtcatcttcctgctctgcgactttctctggagaccttgggcctttggcctgtggggcactggggatggtaacctcactgccccgtcactcccttcaaaggcgacagacccaagcccacgtcaggagaggagcgtggggtcagctccagcagggtcggggtcagtgcctgtgtctggtgggggccactcaggagagttgggttttcagggcagagatgggcttgattccacctggtggggtgggtggaccctggagactctcaggtgatgggccagcctgccccaaggctctttactgatgtcagaatcattgtttgcacctgctgggtatggcctttggggcggccggcccgggagggtcttagtctaattaggtgtgtccagcttcttggccacctttccctggggaccctaacaggcccagagcagagccccttacctcccaggtcagactacctgctcaggccctcccctcccatgcaggccgatgacaactgcagccctctctgcactccctagtccagacctggggaccactgtgggttcctgtgggtctcccggctcccttcctgcccccaatgccacccttgcagtggccatttaaaaatgcatagcaggtgacccactgcgtccctttgcgttcagcccctcctctggctttcagttacaccaagctaaaatttcaggttcccagctgcagctctctgggtcccccggtgccccagtggggctccccgcatctgaatgtgtggtccctgggggtgggcacttgggggcatcctggtcactgctggccctagcattggaccctaggagacctgactggaactggctccctccccatcagctcccagctgtcactctctcccacccccgggcagctgttttgcccaagaccactgctacctgtttacccaccctggtccctcccagacaagcaaggcctctgatttctttgaagcatttacttagctcaagtctgaagctgtagatactggaagacaatgcaccttggagggtgggcaggacacagttgattgtctctacagagctgtgacgggggcactgagccccgcgggtgtctgtggagggggctccggtccaggtactgcactggacactgctcatccctgggtgtcaggcaggtggctgcaccctaggccaggcgcagaggcctggcaggcaggcttggcatggttggccggggcgggacgtacactgggtcgccgctagctgcaccttcgcacagatgcctccgagcagcgggtgggcgtgggccgcacagcgcggcagggccttggctaccacacgcggcatcgctccttggggtgcatgggggtgccccgggcacagtggaacgtgtctgcgaaggcggccaggttctgcagcgaccccagtaccctgtgggtgggtgggtgtgacagcaggagcattgccatcttggacaaacatggccattttaagttctccgtgattaaaaaccagcccaaaacatcagcctaatggctcatgtcagtatgagcagaaacatttcaaccatgagataaacccccatctgaccagaaacatgccaatcctgagaataacctcccctccagccagagatattccaactctgcaataaaactctccttcacacagaaacattcgcagcctgcggtaggctcccccttcctaaacccttaaatgcccttagtctgtaagagaatgtccctgaccgaaatcggccagaagcccctctcaggtttattcccaaaataaacctgtctctgttgagcc

SEQ ID NO: 3381 - DNA, 2506 bp, Homo sapiens
  source 1..2506: mol_type = genomic DNA
gagccgggcgtcggaggccctgaggccggccgcagagcccggagattgagcggctttggggaaggggtggttaaggaagtaggcctcggcttccgtcggtcgctgctcggctctgcggcccgtttggaccgcggaggaggtcgccttcccctcccgtggggcgctcggttggactgtggaaaccggggcaacttcccccgtcttcccggctgaggcgcctgcgtgggcctcgcgacccggctcgccaacccgcctcggcccgcacgcccacctcgcctgcggaccccggaggtgcctacgcggactagtgacgccccccgcccgtcggcaactccacccggcgctgaccccctcaactctgcaggacccggcgcgcgaggaccccacgacccgcgggcgcctgcgcggaccccgcgagccccggcgcctgcgcgagtccccgacgccgcccccgcccccactcaccgggccccgcagcaggggccggagccgccggcggcggggcgggggggggcgccccgatgagccccgagtgcgaggagccgccgccccccctcgcagggcgccatgttttggaagtttgacctgcacacaagctcgcacctggacacgctgctggagcgggaggacctgagcctgcccgagctgctggacgaggaagacgtgctgcaggagtgcaaggtcgtcaaccgcaagctgctggacttcctgctgcagccaccccacctgcaagcaatggtggcctgggtcacccaggagccgccagatagcggtgaggagcggctgcgctacaagtaccccagtgtggcctgcgagattctgacctcagatgtgccccagatcaatgatgccctgggtgctgatgagtcccttctgaaccggctctacggcttcctgcagagcaccggcagcctcaacccactgctggccagcttcttcagcaaggtcatgggcatcctcatcaaccgcaagacagaccagctcgtgtcctttcttcggaagaaggatgacttcgtggacctgctgctgcagcacattggcacctcggccatcatggacctcctgctgcgcctgctcacctgtgtggagcggcctcagctgaggcaggatgttgtcaattggctcaacgaggagaagatcgtccagcggctgattgagcagatccacccgtcgaaggatgagaatcaacattccaacgcatcccagtccctgtgtgacatcatccgcctgagccgggagcagatgatccaagtccaggacagcccagtgcctacagatgccccgaccagcccccgagtctccggggaggaagagctgcacactgggcctccagccccacaggggcccctcagtgtgccccagggcctccccactcagagcctggccagccctcctgcccgtgacgccctgcagctcaggtctcaggaccccacacccccctcagcacctcaggaagccacagaaggcagcaaagtcacggagccctcagccccttgccaggccttggttagcatcggggaccttcaggccaccttccacgggatccgttctgcccccagctcctcggacagtgcaaccagagacccctctacctctgtcccagcctccggggcccaccagcccccccagaccacagaaggggagaagagcccagagcccttggggcttccccaaagccagagtgcccaggccctcacgcctcctccgatacccaatggctctgccccggaagggcctgcatccccaggctcccaatagctgcctggtgcggcagcggcggccaaatcttccgtcctcccgtggatctcccggggtgggggcagggcgggtcccacgatggcccccattgccctcatcaccctgacacccccacattctctcctctggacccccaggaggctggtgccagggagacaggcccaacccacccccatttgcactgagaagagaagttttggagcgttgcctcctagaataaagatacagagagtcaaatagagagaatggagagagagaaacatatattatatattatatagagagagggaggagagcgagagagagtgaggacaccgaactgggctggcggctccaaagcacagccttccctgttccgtcccagcgggagctggtgttaggggtcccaaggttgccacccacgtgcccagctgtcccacgctgcagcgcagacggccacgcccacacccggccttttagctcaggtccaccatgggggacggcccagcgtgggtgggggtgccagagggtcccgagtgggggccgtgcctttgcccagaccctgcactttcaaccaggccagtccggctctggggagcaggggcctccccggcaacagccccaggggccttgagggtctgaggtcccagccctgttgccaagtgaccttgtccccagctccctcctcccaggctggtgtgagtgtgcgtgcgtttgtgccgagcttctatttcatattgcaaatataaataaaggaaggcagtttacg

SEQ ID NO: 3382 - DNA, 2791 bp, Homo sapiens
  source 1..2791: mol_type = genomic DNA
gcggccgccgtagttgaatctcctcggcgccggaagccccgccactccgcttcctggttcatgtgcggccttcgttccctcgctatctcgaccttgacttcgcatgtgcatccgccgaagtctttctagatcaatcggccccatctctcgtcttcccgattcggccatgacctcacccgtatcctcgacgtaggacctcggacttcatttccgccaccccgacacttccggaatccccggaagcgacccgttgccatggcgactatgtacacagccaggcagccccgcgtggggagtgcaggtggtttcggttgcggcagtcgcgtcccgggagcgtcgctgcctggtgaacgctagaatgggtactaggaaaaaagttcatgcatttgtccgtgtcaaacccaccgatgactttgctcatgaaatgatcagatacggagatgacaaaagaagcattgatattcacttaaaaaaagacattcggagaggagttgtcaataaccaacagacagactggtcgtttaagttggatggagttcttcacgatgcctcccaggacttggtttatgagacagttgcaaaggatgtggtttctcaggccctcgatggctataatggcaccatcatgtgttatgggcagacgggagctggcaagacatacaccatgatgggggcaactgagaattacaagcaccgggggatcctccctcgtgccctgcagcaggtttttaggatgatcgaagaacgccccacacatgccatcactgtgcgtgtttcctacttggaaatctataatgagagcctgtttgatctcctgtccactctgccctatgttggaccctcagtcacaccaatgaccatcgtggaaaaccctcaaggagtcttcattaagggcttgtcagttcacctcacaagtcaggaggaggatgcattcagcctcctttttgagggtgagaccaacaggattatagcctcccacactatgaacaaaaactcttccagatcacactgcattttcaccatctacttagaggcccattcccggaccttatcagaggaaaagtacatcacttccaaaattaacttggtggatctggcaggctcagagaggctggggaagtctgggtctgagggccaagtcctgaaggaagccacctacatcaacaaatcgctctcattcctggagcaggccatcattgcccttggggaccagaagcgggaccacatcccctttcggcagtgcaagctcacccacgctctgaaggactcgttagggggaaactgcaatatggtcctcgtgacaaacatctatggagaagctgcccagttagaagaaacgctatcttcactgagatttgccagcaggatgaagctagtcaccactgagcctgccatcaatgaaaagtatgatgctgagagaatggtcaagaacctggagaaggaactagcactactcaagcaggagctggctatccatgacagcctgaccaaccgcacctttgtgacctatgaccccatggatgaaatccagattgctgagatcaactcccaggtgcggaggtacctggaggggacactggacgagatcgacataatcagccttagacagatcaaggaggtgttcaaccagttccgggtggttctgagccaacaggaacaggaagtggagtccactttgcgcaggaagtacaccctcattgacaggaatgactttgcagccatttctgctatccagaaggcggggcttgtggatgttgatggccacctagtgggtgagcctgaaggacaaaactttggactcggagtcgcccctttctctaccaaacctgggaagaaagccaagtccaagaagacattcaaagagccactcaggcccgacaccccaccctccaaaccagtggcctttgaggagtttaagaatgagcaaggtagtgagatcaaccgaattttcaaagaaaacaaatccatcttgaatgaacggaggaaaagggccagcgagaccacacagcacatcaatgccatcaagcgggagattgatgtgaccaaggaggccctgaatttccagaagtcactacgggagaagcaaggcaagtacgaaaacaaggggctgatgatcatcgatgaggaagaattcctgctgatcctcaagctcaaagacctcaagaagcagtaccgcagcgagtaccaggacctgcgtgacctcagggctgagatccagtattgccagcacctagtggatcagtgtcgccaccgcctgctcatggaatttgacatctggtacaatgagtcctttgtcatccctgaggacatgcagatggcactgaagccaggcggcagcatccggccaggcatggtccctgtgaacaggattgtgtctctgggagaagatgaccaggacaaattcagccagctgcagcagagggtgcttcctgagggccctgattccatctccttctacaatgccaaagtcaagatagagcagaagcataattacttgaaaaccatgatgggcctccagcaggcacatagaaaatagaacctcatcgccagtaccttaaaggacaagaccagcaactcccacctactgtagtggagctgctcaaccacctgcccagagctgcagccccctctactccaatgctgggacccagcacagagaacacatttggcctgcatgttgggaggagcatcctccaaggacaaccttgctcatctccacagagcactttgggttttaattcactgtcttatatgcagggacaggataaaataactttctagtttggacttt

SEQ ID NO: 3383 - DNA, 565 bp, Homo sapiens
  source 1..565: mol_type = genomic DNA
agctgtggttgccggaagttgagcggcggcttctcaaaccccataatgctggtatccagtgcatccgttctcaaaaactgaagctgatggacaccagattgcatgtgaaggtgaaggatattatagcagaaggaaaccaaaataaaagaaaaacagctcctggaagtaaccaatgagaaggacagataagagtttgaagactgtggatgtgactgcttgttccctggttgacacactgaagaagaaatcatgttgattcagagttggcttggaggcaagaaataatggcggcagctacgggggatcctggactctctaaactgcagtttgccccttttagtagtgccttggatgttgggttttggcatgagttgacccagaagaagctgaacgagtatcggctggatgaagctcccaaggacattaagggttattactacaatggtgactctgctgggctgccagctcgcttaacattggagttcagtgcttttgacatgagtgctcccaccccagcccgttgctgcccagctattggaacactgtataacaccaacacactcga

SEQ ID NO: 3384 - DNA, 544 bp, Homo sapiens
  source 1..544: mol_type = genomic DNA
gccgcccttgcatcctgatgggtccttacagtggggaggctgtaagaataattcaagttttccatctggaaagcatttgcttcgcaaacagccacagcttacagactacaagcagtttagaaacaagactaccacctgaatatactacacatgccttcacctgccttttgatgattgcagcgtcaccctttacaccagaaagctggcgggcactatggggaaaaaacaaaacaagaagaaagtggaggaggtgctagaagaggaggaagaggaatatgtggtggaaaaagttctcgaccgtcgagtggtaaagggcaaagtggagtacctcctaaagtggaagggattctcagatgaggacaacacatgggagccagaagagaacctggattgccccgacctcattgctgagtttctgcagtcacagaaaacagcacatgagacagataaatcagagggaggcaagcgcaaagctgattctgattctgaagataagggagaggagagcaaaccaaagaagaagaaagaagagtcagaaaagcca

SEQ ID NO: 3385 - DNA, 760 bp, Homo sapiens
  source 1..760: mol_type = genomic DNA
tggcgatctgggcaaggcattttcatccctttgcagacaaccccggctgctgttaatgctgaaaatagctcaaatgctctcagaacagtagcaccacccagcagctgggattctttccctctctcatttgcctctctcttgctttttttccttcagacacttggattggacttaatcttaaacctctggagttcaagaccttttaaaaagggctaaataaacaatctctacatgtaaaaggccactgactcctacttcctctgtatagagcaactgttgaactcagctgcctgtagggcgtgattctcagtcaccagactcagcttggagatcttacaatgatggcaatcaggagacactgaacggagatgctacatattcctctcttgcagcaaaaggttttagaagcgttcgaccaaacctacaagataaaagatcaccaactcagagccagataacagtgaatggaaactcaggaggtgccgtgagtcccatgagttactatcagaggccgttttccccctcggcatattctctcccagcctcactcaactccagcattgtcatgcagcacggcacatccctcgattccacagacacatatccccagcatgcgcagtctctggatggcaccaccagcagctctatccccctgtaccgatcctcagaggaagagaagagagtgacagtcatcaaagccccgcattacccagggatcgggcccgtggatgaatccggaatccccacagcaattagaacg

SEQ ID NO: 3386 - DNA, 1692 bp, Homo sapiens
  source 1..1692: mol_type = genomic DNA
gtgaggctgcggaccgggagcagcggccgcaggcgccatggctgcggagcggacccggccgctgcaaggctctggcggtccgagcgtgcctagtagctgtgaacccggcgcgaggtcccgggccccggggcgctcgctcaggtcagtgccgcgcggaacacgattccgagagcaagggacctgggagcaacgaatgggttgatgggatctggattttagagacgggaaaacagggttttggagttactgcctcctactgcctccatttccttagctgcgaaatgagttaacagtgatgtcccagggctaccaaacgtttgaaagacgatgaagtgtgatgaggtggtttatgaagtacaaagcgctatactgcgccataattgtgggtatgccatgaaaacaggtaaatttttccataaccttatggagagaaaggactttgagacatggcttgataacatttctgttacatttctttctctgacggacttgcagaaaaatgaaactctggatcacctgattagtctgagtggggcagtccagctcaggcatctctccaataacctagagactctcctcaagcgggacttcctcaaactccttcccctggagctcagtttttatttgttaaaatggctcgatcctcagactttactcacatgctgcctcgtctctaaacagtggaataaggtgataagtgcctgtacagaggtgtggcagactgcatgtaaaaatttgggctggcagatagatgattctgttcaggacgctttgcactggaagaaggtttatttgaaggctattttgagaatgaagcaactggaggaccatgaagcctttgaaacctcgtcattaattggacacagtgccagagtgtatgcactttactacaaagatggacttctctgtacagggtcagatgacttgtctgcaaagctgtgggatgtgagcacagggcagtgcgtttatggcatccagacccacacttgtgcagcggtgaagtttgatgaacagaagcttgtgacaggctcctttgacaacactgtggcttgctgggaatggagttccggagccaggacccagcactttcgggggcacacgggggcggtatttagcgtggactacaatgatgaactggatatcttggtgagcggctctgcagacttcactgtgaaagtatgggctttatctgctgggacatgcctgaacacactcaccgggcacacggaatgggtcaccaaggtagttttgcagaagtgcaaagtcaagtctctcttgcacagtcctggagactacatcctcttaagtgcagacaaatatgagattaagatttggccaattgggagagaaatcaactgtaagtgcttaaagacattgtctgtctctgaggatagaagtatctgcctgcagccaagacttcattttgatggcaaatacattgtctgtagttcagcacttggtctctaccagtgggactttgccagttatgatattctcagggtcatcaagactcctgagatagcaaacttggccttgcttggctttggagatatctttgccctgctgtttgacaaccgctacctgtacatcatggacttgcggacagagagcctgattagtcgctggcctctgccagagtacaggaaatcaaagagaggctcaagcttcctggcaggcgaacatcctggctga

SEQ ID NO: 3387 - DNA, 2863 bp, Homo sapiens
  source 1..2863: mol_type = genomic DNA
gttcgcgcctggggctgtggtcttcccgcgcctgaggcggcggcggcaggagctgaggggagttgtagggaactgaggggagctgctgtgtcccccgcctcctcctccccatttccgcgctcccgggaccatgtccgcgctggcgggtgaagatgtctggaggtgtccaggctgtggggaccacattgctccaagccagatatggtacaggactgtcaacgaaacctggcacggctcttgcttccggcgcagtaacagtatctccaagtcccctggccccagctccccaaaggagcccctgctgttcagccgtgacatcagccgctcagaatcccttcgttgttccagcagctattcacagcagatcttccggccctgtgacctaatccatggggaggtcctggggaagggcttctttgggcaggctatcaaggtgacacacaaagccacgggcaaagtgatggtcatgaaagagttaattcgatgtgatgaggagacccagaaaacttttctgactgaggtgaaagtgatgcgcagcctggaccaccccaatgtgctcaagttcattggtgtgctgtacaaggataagaagctgaacctcctgacagagtacattgaggggggcacactgaaggactttctgcgcagtatggatccgttcccctggcagcagaaggtcaggtttgccaaaggaatcgcctccggaatggcctatttgcactctatgtgcatcatccaccgggatctgaactcgcacaactgcctcatcaagttggacaagactgtggtggtggcagactttgggctgtcacggctcatagtggaagagaggaaaagggcccccatggagaaggccaccaccaagaaacgcaccttgcgcaagaacgaccgcaagaagcgctacacggtggtgggaaacccctactggatggcccctgagatgctgaacggaaagagctatgatgagacggtggatatcttctcctttgggatcgttctctgtgagatcattgggcaggtgtatgcagatcctgactgccttccccgaacactggactttggcctcaacgtgaagcttttctgggagaagtttgttcccacagattgtcccccggccttcttcccgctggccgccatctgctgcagactggagcctgagagcagaccagcattctcgaaattggaggactcctttgaggccctctccctgtacctgggggagctgggcatcccgctgcctgcagagctggaggagttggaccacactgtgagcatgcagtacggcctgacccgggactcacctccctagccctggcccagccccctgcaggggggtgttctacagccagcattgcccctctgtgccccattcctgctgtgagcagggccgtccgggcttcctgtggattggcggaatgtttagaagcagaacaagccattcctattacctccccaggaggcaagtgggcgcagcaccagggaaatgtatctccacaggttctggggcctagttactgtctgtaaatccaccaggaactccctggcagtggattgtgggaggctcttgcttacactaatcagcgtgacctggacctgctgggcaggatcccagggtgaacctgcctgtgaactctgaagtcactagtccagctgggtgcaggaggacttcaagtgtgtggacgaaagaaagactgatggctcaaagggtgtgaaaaagtcagtgatgctccccctttctactccagatcctgtccttcctggagcaaggttgagggagtaggttttgaagagtcccttaatatgtggtggaacaggccaggagttagagaaagggctggcttctgtttacctgctcactggctctagccagcccagggaccacatcaatgtgagaggaagcctccacctcatgttttcaaacttaatactggagactggctgagaacttacggacaacatcctttctgtctgaaacaaacagtcacaagcaaaggaagaggctgggggactagaaagaggccctgccctctagaaagctcagatcttggcttctgttactcatactcgggtgggctccttagtcagatgcctaaaacattttgcctaaagctcgatgggttctggaggacagtgtggcttgtcacaggcctagagtctgagggaggggagtgggagtctcagcaatctcttggtcttggcttcatggcaaccactgctcacccttcaacatgcctggtttaggcagcagcttgggctgggaagaggtggtggcagagtctcaaagctgagatgctgagagagatagctccctgagctgggccatctgacttctacctcccatgtttgctctcccaactcattagctcctgggcagcatcctcctgagccacatgtgcaggtactggaaaacctccatcttggctcccagagctctaggaactcttcatcacaactagatttgcctcttctaagtgtctatgagcttgcaccatatttaataaattgggaatgggtttggggtattaatgcaatgtgtggtggttgtattggagcagggggaattgataaaggagagtggttgctgttaatattatcttatctattgggtggtatgtgaaatattgtacatagacctgatgagttgtgggaccagatgtcatctctggtcagagtttacttgctatatagactgtacttatgtgtgaagtttgcaagcttgctttagggctgagccctggactcccagcagcagcacagttcagcattgtgtggctggttgtttcctggctgtccccagcaagtgtaggagtggtgggcctgaactgggccattgatcagactaaataaattaagcagttaacat

SEQ ID NO: 3388 - DNA, 682 bp, Homo sapiens; identical to SEQ ID NO: 2784
  source 1..682: mol_type = genomic DNA

SEQ ID NO: 3389 - DNA, 4065 bp, Homo sapiens
  source 1..4065: mol_type = genomic DNA
gccccattgggccgggtgctggggcatcccgggcgctgggtgccccgagcggctacgacgagtcccaggtggggccgggctccaggcccgcgggggagcggagccgtgcgccgcaggcgggctccgtgacgccgggtggggaacgccgggccggtggcgggacttccgccacgggactcggaaggggccgcgccgccgctgctgggagttgtagtccggccgtggttgggggagccgcggctcatgcgcggtgcacagaggcttgtttcacatctgtaacaacaggaggaggcccagcctcgtgatgaggaatagcaaggagagaattcagctccagttcaaaagcctacaaaatctgagactgtcattgcttttataaggattccagctttccctcctggccagaaatgttcagcctggactcattcagaaaagatcgggcccagcacaggcagcgtcagtgcaaacttcccccaccccgccttccacccatgtgtgtcaaccctaccccaggagggaccatctctcgagcttctagggacctattaaaagagttcccacagcccaaaaatcttctcaacagtgtgattggaagagccctcggcatctcacatgcaaaagacaaactagtctacgtgcacacaaatggaccgaagaaaaagaaagtcacactgcacataaaatggcccaagagcgtggaggtagaaggctatggcagcaagaagatcgatgctgagcggcaggctgcagctgcagcctgccagctgttcaagggttggggtctgctaggtccccggaatgagttgtttgacgcagccaaataccgagtgctagctgatcgctttggctcccctgccgacagctggtggcgtccggaacccaccatgccccctacttcctggcggcagctgaatccagagagtattcgaccagggggacctgggggcctatcccgctctttaggccgggaagaagaggaggacgaggaggaagagctagaagaagggaccatagatgttaccgacttcttgtccatgacccagcaggattcccacgctccactcagggactcaagggggagttcctttgagatgacagatgacgacagtgccattagggctctgacccagtttccacttcccaagaaccttctggccaaggtgattcagattgcaacgtcatcctccacagctaagaacctcatgcagttccatactgtgggcaccaagaccaagctgtctacactcaccctgctctggccctgccccatgacctttgttgccaaagggcgccgcaaagcagaggctgagaataaggcggcagccttggcctgcaagaaactgaagagcctgggcctggtggacaggaacaacgaaccgcttacacacgccatgtataacctggcctctttgcgtgagctgggtgagacccagcgccgaccatgcaccatccaggtgcccgagcccatcctccgcaagatagagaccttcctgaaccattaccctgtggagagttcatggatcgccccagaactccggctgcagagtgatgacatcttgcccttgggcaaggactcagggcctctgagtgaccctatcacaggcaagccctatgtgcccctgttggaagcagaggaggtacgtctcagccagagtctgctagaactgtggcggcggcgagggccggtctggcaggaggccccccagctacctgtggacccacatcgggacaccatcctcaacgccattgagcagcacccggtggtggtcatctctggggacacgggctgtgggaagaccacgcgcatcccccagctgttgctggagcgctatgtgaccgagggccgaggtgcccgctgcaatgttatcatcacccaacctcgccgcatctctgctgtgtctgtggcacagcgggtcagccacgaactgggcccctccctgcgccggaatgtgggcttccaggtgcggttggaaagtaagcccccatcccgaggcggggccctgctcttctgcactgtgggtatcctgctgcgtaagctgcagagcaaccccagcctggagggcgtgagccacgtcatcgtggatgaggtgcatgagcgggacgtgaacacagactttctgctgatcctgctcaagggcctgcagcggctcaacccggccctgcggctggtgctcatgagtgccacaggggacaatgagcgcttctcccgatactttggtggctgccccgtcatcaaggtgcctggcttcatgtacccagtcaaggagcactacctagaggacatcctggccaagttgggcaagcaccagtacctgcaccggcaccggcaccatgagtctgaggatgaatgcgcactcgatttggaccttgtgactgatctggttctgcacatcgatgctcgcggggaaccaggtgggatcctgtgcttcctgcctgggtggcaggagatcaaaggagtgcagcagcgcctccaggaggccctgggcatgcacgagagcaagtacctcatcctgccagtgcactccaacatccccatgatggatcagaaggccatattccagcagcctccagttggggtgcgcaagattgtcttggccaccaacattgctgagacttccatcacaatcaatgacatcgtgcatgtggtggacagtgggctgcacaaggaagaacgctatgacctgaagaccaaggtgtcctgcctggagacagtgtgggtatcaagagccaatgtgatccagcgccggggccgggcgggccgctgccagtccggctttgcctaccacttgttccctcgaagccggctggagaaaatggtccctttccaagtgccagagatcctgcgcacacctcttgagaacctggtgctgcaagcgaaaatccacatgcctgagaagacggcggtggagttcctgtccaaggctgtggacagtccaaacatcaaggcagtggacgaggctgtgatcttgctccaggagatcggggtgctggaccagcgggagtacctgactaccctggggcagcgcctggctcacatctccaccgacccccggttggccaaggccattgtgttggctgccatcttccgttgcctgcacccactactggtggtcgtttcctgcctcacccgggaccccttcagcagcagcctacagaaccgggcagaggtggacaaggtgaaagcactgttgagccatgacagcggcagtgaccacctggcctttgtgcgggctgtcgccggctgggaggaggtgctgcgttggcaggaccgcagctcccgggagaattacctggaggaaaacctgctgtacgcacccagcctgcgcttcatccacggactcatcaagcagttctcagagaacatttatgaggccttcctggtggggaagccctcggactgcaccctggcctccgcccagtgcaacgagtacagtgaggaggaggagctggtgaagggcgtgctgatggccggcctctaccccaacctcatccaggtgaggcagggcaaggtcacccggcaggggaagttcaagcccaacagcgtcacatataggaccaaatcaggcaacatcctgctgcacaagtcgaccattaacagggaggccacacggttacggagccgatggctgacgtatttcatggcagtcaagtccaatggcagcgtcttcgtccgggactcctctcaggtgcacccgctagctgtgctgctgctgaccgacggggacgtgcacatccgtgatgacgggcgccgggccaccatctcactgagcgacagtgacctgctgcggctggagggtgactcgcgtaccgtgcggctgctgaaggagctgcggcgggccctgggccgcatggtggagcggagcctgcgcagcgagctggctgcacttccccccagcgtacaggaggagcacgggcagctgcttgcgctactggcagagctgctgcgaggaccctgtggcagctttgatgtgcgcaagacagctgacgactgagccctgcttctgctggggctgtgtacagagtgcaaatgtttatttaaaataaagttctatttatcccttgtga

SEQ ID NO: 3390 - DNA, 575 bp, Homo sapiens
  source 1..575: mol_type = genomic DNA
attctttccctctctcatttgcctctctcttgctttttttccttcagacacttggattggacttaatcttaaacctctggagttcaagaccttttaaaaagggctaaataaacaatctctacatgtaaaaggccactgactcctacttcctctgtatagagcaactgttgaactcagctgcctgtagagcgagaataggacagactcgtataccattctgatctgggtgcatttcttcagaagggcgtgattctcagtcaccagactcagcaaaaggttttagaagcgttcgaccaaacctacaagataaaagatcaccaactcagagccagataacagtgaatggaaactcaggaggtgccgtgagtcccatgagttactatcagaggccgttttccccctcggcatattctctcccagcctcactcaactccagcattgtcatgcagcacggcacatccctcgattccacagacacatatccccagcatgcgcagtctctggatggcaccaccagcagctctatccccctgtaccgatcctcagaggaagagaagagagtgacagtcatcaaa

SEQ ID NO: 3391 - DNA, 2397 bp, Homo sapiens
  source 1..2397: mol_type = genomic DNA
ctatgagcagacgtgtggttcggcaaagcaagttccgccatgtgtttgggcaggcagcaaaggccgaccaggcctacgaggacatccgtgtgtccaaggtcacatgggacagctccttctgtgccgtcaaccccaaattcctggccattattgtggaggctggaggcgggggtgccttcatcgtcctgcctctggccaagacagggcgagtggataagaactacccactggtcactgggcacactgcccctgtgctggatattgactggtgtccacacaatgacaacgttatcgccagtgcctcagacgacaccaccatcatggtgtggcagattccagactatacccccatgcgcaacattacggaacctatcatcacacttgagggccactccaagcgtgtgggcatcctctcctggcaccctactgccaggaatgtcctgctcagtgcaggtggtgacaatgtgatcatcatctggaatgtgggcaccggggaggtgctgctgagcctggatgatatgcacccagacgtcatccacagtgtgtgctggaacagcaacggtagcctgctagccaccacctgcaaggacaagaccttgcgcatcattgaccccagaaaaggccaagtggtggcggagcaagcccggcctcacgagggcgcccgcccgctgcgggctgtcttcaccgcagacgggaagctgctcagcaccggcttcagcaggatgagtgagcggcaactcgcgctctgggacccgaacaacttcgaggagccagtggcactgcaggagatggacacaagcaacggggtcctattgcccttttacgatcccgactccagcatcgtctacctgtgtggcaagggcgacagcagcattcggtactttgagattaccgacgagccgcctttcgtgcactacctgaacacgttcagcagcaaagagccgcagcggggcatgggtttcatgcccaaaaggggactggatgtcagcaagtgtgagatcgcccggttctacaagctacacgaaagaaagtgtgaacctatcatcatgactgtgccccgcaagtcagacctcttccaggacgatctgtacccggatacgccaggcccggagccggccctagaagcggacgaatggctatccggccaggacgccgaacccgtgctcatttcgctgagggacggctatgtgccccccaagcaccgcgagctccgggtcacgaagcgcaacatcctggacgtgcgcccgccctccggcccccgccgcagccagtcggccagcgacgcccccttgtcgcagcagcacaccctggagacgctgctggaagagatcaaggccctccgcgagcgggtgcaggcccaggagcagcgcatcacggctctggagaacatgctgtgcgagctggtggacggcacggactagccccgcgcgccaggcaggcggagcggggcggggcgcacaagctcggccccgccccggcttttagtcccgaactccggaccccgccttcttgggctgggcccgggggcgggactggggagggaactccgcccctcgcgggagaccagaactcttggagcttaggggagacccacgtcgctccagcggaggctggactgcgagcctcgtctgggactcggctggagctggcctagggaggcctggggtaacctggggggctcagcaatggtgctgcacggcgaggtggtgtccccctttgtcctccgcccagggcagggaaagtgcttagtattagcgtgatgcttggggttattggagcctgagcttgacctcaaacgggtggcgatttgatgggtacccccaggctggggaaaatgacagcgcttctcctaatcagctcactggattccatcaccctgagcggtaaaccagatgggcgtcaccccagttctgcagacacatacacaacccgtttgctgcagagccggacccagtggctacacccacagcggtctgtggtagagaactctcttccttctttccaccgacaggggcgagggctgcttcctcgcggcagcccccgcgaagaaatctcgagagaactggcatgaggagttaggttcatcacaaatacacacacactgcccccaaccctctgccgttgcctctctcagaaaaacaagacgtactgaatgaaatattttactaagcgttcagtctgtgcctcctgcatgggtgggagtgaggggaacgagacccccagcctctgcaaatgctacccccaggctcctgggagacctggcgatgcactcctgggctcagggtccatcaggcagcctcttaccctagagctctctccactctgaggttcagaaggaccccaacccacaccgtaggcgttccccccaagtaaagttaggtagcaaaagcctccggt

SEQ ID NO: 3392 - DNA, 389 bp, Homo sapiens
  source 1..389: mol_type = genomic DNA
atacttcactcgctggtacaaaccggaatatgtgtcatcacattggcagaatctcatccagttcttcaaagtggaaaaacaattaaaagcatttcctatcagatcagtaccaactgtagcagacttcagaacaaggtctctgggaaatttaagcggggggcacagtttctaacagagcttgcacctctctgtaagatttactgctcagatggtgaagaatatactgtgtctagttgtgttagaggacgtttgatggaagtgaatgaaaacatcctccataagccatctattcttcaagaaaagccatctactgaaggctacattgcagttgtgttacccaaatttgaagaaagtaaaagcataacagaagggttactgacacaaaaaca

SEQ ID NO: 3393 - DNA, 1645 bp, Homo sapiens
  source 1..1645: mol_type = genomic DNA
ttttctttgtgcctataatataattggctgattgtgcgggtgatgagcgccccctcccccagcccggtcccagctccatgttcctaagcctgcctcactggtttcggagggctggagagcagctcagctcgctagctgcgcgcttcccggcacaggcagtgccactgcgcaggttgatcagcgaaacagcatccattttaatctgcggggagcccctgccttaccagggcgttctctccgcccgccggtggatgctccgcgcctgccctccgcagcctcgctcagcagtcctgcgttggggtctgcgccctaggatgcactgagatggtacatcaggataactgctcgtatcaggcacagaaaaatgagagagagtctatcagacagaagttggcacttggaagcttctttgatgatggcccaggaatttataccagctgtagcaaaagtgggaagccaagcctttcctcccgactgcagagtgggatgaacttgcagatatgctttgtcaacgacagtggcagtgataaggacagtgatgctgatgacagtaagactgaaaccagcttggacacccccttgtctcccatgagcaaacagagttcttcctattctgatagagacactactgaagaggagtctgaatccttggatgacatggacttccttacaaggcaaaagaaattgcaagctgaagccaaaatggcccttgccatggccaaaccaatggccaaaatgcaagtagaagtggagaaacagaacaggaaaaagtctcccgtcgctgatcttctgccacacatgcctcatataagtgaatgcttgatgaaaagaagtttaaaacccaccgacctgagagacatgactattgggcagctacaagtgatagtcaatgatctccattcccagatagaaagcttgaatgaagagttggtccagctgcttctcatccgagatgagctgcacacagagcaggatgccatgctggtggacattgaagacttgaccagacatgctgaaagtcagcagaagcacatggcagagaaaatgcctgcaaagtgaaaagaagccattcaaccagagaacaagctagaatttattttgcttctgtggttgtaaaaatgctgttgctaaaggtggcgcagaaacaaatatcagtgttagtcattgataatgtctgaagcttaatgtccagtgattggcctttgcttcttaatttattttaattttttacttgtgccacttaatatcaggcattttaataaaatattgttacaaaaaatgtacagtactgacaccaccacaaatcatggttaataaaagagagtagttttaactttatttttatttgtttagagattttaagttggaacagtattttcccattgactacttttcattcttcactgtagttttaaagaagaactgtaaatgacggtgctatacaagtcaaaaaatacatgcctgcctcgtagtgaagttgtagctctccgtaatatgtatattttactcagttttcaacattttgtgaatgttgactacctgaagttcctttttagatgtgctattaacattctgttggattcagagggttccttgaaagttttatgtataaatatgtaaaataaaaattaaaactttgtttcat

SEQ ID NO: 3394 - DNA, 3478 bp, Homo sapiens
  source 1..3478: mol_type = genomic DNA
aacagaccgccgtgagagaggaggggcgccggccgggattcgcggcccggagctcgggaccggagtcaggaatggagagaagggtaatggttttacctcttattgtggaaacctgttgagatcacagagaatatactgacggcataaaagggcagaaccatagcagggtgcggttgcttcattccagcctcgcagtcacctctgtgccctgctggttgtcttcccagcgctgctgtagttgccttccatggatctataggagagcaagtcctccaggagctggtggtgtctgtcgattgactgagtgctggagctggcagccctgtgcaggctgccacctttgcccctttactgtgcttgctcctgactctatgtcgcgtctccaaggagaagaagtcctcaccagtgaacggagacctctctgaactaaggataccatggccacgtcagccccactacggagcctggaagaggaggtgacctgctccatctgtcttgattacctgcgggaccctgtgaccattgactgtggccacgtcttctgccgcagctgcaccacagacgtccgccccatctcagggagccgccccgtctgcccactctgcaagaagccttttaagaaggagaacatccgacccgtgtggcaactggccagcctggtggagaacattgagcggctgaaggtggacaagggcaggcagccgggagaggtgacccgggagcagcaggatgcaaagttgtgcgagcgacaccgagagaagctgcactactactgtgaggacgacgggaagctgctgtgcgtgatgtgccgggagtcccgggagcacaggccccacacggccgtcctcatggagaaggccgcccagccccacagggaaaaaatcctgaaccacctgagtaccctaaggagggacagagacaaaattcagggcttccaggcaaagggagaagctgatatcctggccgcgctgaagaagctccaggaccagaggcagtacattgtggctgagtttgagcagggtcatcagttcctgagggagcgggaggaacacctgctggaacagctggcgaagctggagcaggagctcacggagggcagggagaagttcaagagccggggcgtcggggagcttgcccggctggccctggtcatctccgaactggagggcaaggcgcagcagccagctgcagagctcatgcaggacacgagagacttcctaaacaggtatccacggaagaagttctgggttgggaaacccattgctcgagtggttaaaaaaaagaccggagaattctcagataaactcctctctctgcaacgaggcctgagggaattccaggggaagctgctgagagacttggaatataagacagtgagcgtcaccctggacccacagtcggccagtgggtacctgcagctgtcagaggactggaagtgcgtgacctacaccagcctgtacaagagtgcctacctgcacccccagcagtttgactgtgagcctggggtgctgggcagcaagggcttcacctggggcaaggtctactgggaagtggaagtggagagggagggctggtctgaggatgaagaagagggggatgaggaggaagagggagaagaggaggaggaggaagaggaggccggctatggggatggatatgacgactgggaaacggacgaagatgaggaatcgttgggcgatgaagaggaagaagaggaggaggaagaggaggaagttctggaaagctgcatggtgggggtggctagagactctgtgaagaggaagggagacctctccctgcggccagaggatggcgtgtgggcgctgcgcctctcctcctccggcatctgggccaacaccagccccgaggctgagcttttcccagcactgcggccccggagagtgggcatcgccctggattatgaagggggcaccgtgactttcaccaacgcagagtcacaggaactcatctacaccttcactgccaccttcacccggcgcctggtccccttcctgtggctcaagtggccaggaacacgcctcctgctaagaccctgagccctgacatctgcccccagccccaaccctcagatgcttcacttctttggaattccaggactctcaatggggggacgggatgcctggcctaagcacctggagcaggggaccccatatccactggtagccacctccccattgctgtggccccctgaaatctcactcagtgctgttgctccatctactgccctaatggggctcttttcccacctcctgctggtttcccgagggaacttctgaccctggagtccatgagggctcctttcctttttgaccacgaccttggccccagctctgcactctctggaataagggcccgatgcagcattttcttgcccagtgtggcaagacctcagaaaaaccagtcaattacgcctaagatcattttgctgtccttaaaccccccaggttccttcttgcacaaatccactctgctgcccaccttccctggcattttaaacagacctaccccaccccaactcagagttaagcatacatggcaatgctgaaaataaacaaaatccactgaggcttcccaggccatttaaagcctggagtaccagcgcatatcatctcatggggtccagagtggagtccaggcttctctgaaaccagggctgagcatatttccatagccaaggaggtgggactccctggagctatctgtggtcttagggaaggatccagacatacacggctttggggtacaagctgtgatcactgatcaataaattatctctagattggtccttgtgaggggagttttaagaatccagaacatcttgctcttgatcagcacatccaaaaacaccaagacaaacatccagtggagcagaacctctcctgcctcgggagttctgaccaggttccccagcagggtgttaagcctctgtctctggccctaccagcatccaggttccactttcctaggagagagtggagatgggaagacagggaaaggaaggcagcaggaggccacaagcccaccaggtcttcatgtcaagagagggagtaacatgtcttctcattgcccacggacccaacctctgtccaggtgcccctcatcatcacagtttaacacaagctcccctgctccagccaaattgatctcccagtcttgtccttacccattccaagtgctctgccagcccctgttcatccaagttttaagtcctccaccctgttctaagagactgttccaacggctctgggcctcagtggtcacttgaccaccattgtctcagagctgcccactttgtgtgtgtcacatgctgcctgagtcacacgtacatcttatttctgcctctagttttgtaagctcctggagggcggataacatcttatactactcttgtattctcatggcacctagtgcagtgctgggcacagagtaggtgctcaataaagacttgttgaatgaa

SEQ ID NO: 3395 - DNA, 836 bp, Homo sapiens
  source 1..836: mol_type = genomic DNA
ctccgcacctctccatctgccgggaagatctgtgggacaagatccccccccgccctctggcctctccctctggatgccccatgctctttctgggctgctttggggctctggcggctggggggagcggggggctgacccaaggcgggttacacagagaggaaggtgacggggataggccctcggcaggacaggcctactccaggatcggacctacctgagccctgtggggtggctgtccatgttggccctggtccatcaggaggaggaaagaagggagactttggcccaggcttctaggacgtgtgaccgagagctcctgggcctgtgtccccccaggtggtggaattgggcatcctggaccagctctccactgaggagcggaaaaggcaggaggccatgttcgagatcctcacgtcggagttctcctaccagcacagcctgagcatcctggtggaggagttcctgcagtccaaggagctgcgggcgaccgtgacccagatggagcaccaccacctcttctccaacatcctggatgtcctgggtgccagtcagaggttcttcgaggacctggagcagcggcacaaggcccaggtgctggtcgaggacatcagtgacatcctggaggagcacgctgagaagcacttccacccctacatcgcctactgctccaacgaggtctaccaacagcgcacgctgcagaagctgataagcagcaacgccgccttccgagaggccctgagagagattgagaggcggccggcgtgcgggggcctgcccatgctctccttcctgatcctccccatgcagcgggtgacccggctgcccctcctgatgga

SEQ ID NO: 3396 - DNA, 1456 bp, Homo sapiens; identical to SEQ ID NO: 1946
  source 1..1456: mol_type = genomic DNA

SEQ ID NO: 3397 - DNA, 546 bp, Homo sapiens
  source 1..546: mol_type = genomic DNA
agcacaacaatcatttgttgagagcctactcaagactctgtacttgtccgtgacagtcactgggagcatagcctttctccaatgacatcgccctgaacatccactctaaaaatgcagggcgtgattctcagtcaccagactcagcaaaaggttttagaagcgttcgaccaaacctacaagataaaagatcaccaactcagagccagataacagtgaatggaaactcaggaggtgccgtgagtcccatgagttactatcagaggccgttttccccctcggcatattctctcccagcctcactcaactccagcattgtcatgcagcacggcacatccctcgattccacagacacatatccccagcatgcgcagtctctggatggcaccaccagcagctctatccccctgtaccgatcctcagaggaagagaagagagtgacagtcatcaaagccccgcattacccagggatcgggcccgtggatgaatccggaatccccacagcaattagaacgacagtcgaccggcccaaggactggtacaagacga

SEQ ID NO: 3398 - DNA, 552 bp, Homo sapiens
  source 1..552: mol_type = genomic DNA
ggccgggattcgcggcccggagctcgggaccggagtcaggaatggagagaagggtaatggttttacctcttattgtggaaacctgttgagatcacagagaatatactgacggcataaaagggcagaaccatagcagggtgcgaagtcctcaccagtgaacggagacctctctgaactaaggataccatggccacgtcagccccactacggagcctggaagaggaggtgacctgctccatctgtcttgattacctgcgggaccctgtgaccattgactgtggccacgtcttctgccgcagctgcaccacagacgtccgccccatctcagggagccgccccgtctgcccactctgcaagaagccttttaagaaggagaacatccgacccgtgtggcaactggccagcctggtggagaacattgagcggctgaaggtggacaagggcaggcagccgggagaggtgacccgggagcagcaggatgcaaagttgtgcgagcgacaccgagagaagctgcactactactgtgaggacgacgggaagctgctgtgcgtg

SEQ ID NO: 3399 - DNA, 808 bp, Homo sapiens
  source 1..808: mol_type = genomic DNA
gggtctccctgccaagctatgggggaggggatggtggacatgacaacttccagctcagcggtgctttaggagattttgattcgctttccaaggacaatgtcttcgagaataaccgtttggcctttgaagtggctgagaaggagctggggatccccgctctcctggaccccaatgacatggtctccatgagcgtccctgactgcctcagcatcatgacctatgtgtcccagtattacaaccacttctgcagtcctggccaagctggtgtctcgccacccagaaagggccttgcaccctgttccccgccgtctgtagcacccactccagtggaaccagaagatgtggctcagggcgaggagctctcctcaggcagcctgtcagagcagggcaccggccagacccccagcagcacgtgcgcagcctgccagcagcatgtgcacttggtgcagcgctacctggctgacggcaggctgtaccatcgccactgcttccggtgtcggcggtgctccagcaccctgctccctggggcttatgagaatgggcctgaggagggcacctttgtgtgtgcagaacactgtgccaggctgggcccggggacacggtcggggaccaggcctgggcccttctcacagccaaagcagcagcaccagcagcaactcgcagaagatgccaaggatgttccaggaggcggccccagctccagtgctcctgcaggggctgaggccgatggacccaaggccagccctgaggcccggccgcagatccctaccaagccccgggttcctggcaaactacaggagctggccag

SEQ ID NO: 3400 - DNA, 884 bp, Homo sapiens; identical to SEQ ID NO: 2530
  source 1..884: mol_type = genomic DNA

SEQ ID NO: 3401 - DNA, 817 bp, Homo sapiens
  source 1..817: mol_type = genomic DNA
cagaaacaaacagcccaaattactttatcaccatggctttgaacgttgccccagtcagagatacaaaatggctgacattagaagtctgcagacagtttcaaagaggaacatgctcacgctctgatgaagaatgcaaatttgctcatccccccaaaagttgtcaggttgaaaatggaagagtaattgcctgctttgattccctaaagggccgttgttcgagagagaactgcaagtatcttcaccctccgacacacttaaaaactcaactagaaattaatggaaggaacaatttgattcagcaaaaaactgcagcagcaatgcttgcccagcagatgcaatttatgtttccaggaacaccacttcatccagtggcctttccccctggtgctcttcatcctttaccaaagagacaagcacttgaaaaaagcaatggtaccagcgcggtctttaaccccagcgtcttgcactaccagcaggctctcaccagcgcacagttgcagcaacacgccgcgttcattccaacagataattctgaaataatcagcagaaacggaatggaatgccaagaatctgcattgagaataactaaacattgttactgtacatactatcctgtttcctcctcaatagaattgccacaaactgcatgctaaataaagatgtagttcttctggacagaccacaactctaagaagctagtgctgctatctcatatatgagtattaaatatggtatgcttagtatattccaacctaagatagttaactacctgagaccagctgtgatgtttaaagacataaaggataaagtttacttt

SEQ ID NO: 3402 - DNA, 1285 bp, Homo sapiens
  source 1..1285: mol_type = genomic DNA
tacatgcaacagccagtgagagcaggagacatcggtgtttccagagtccagacccaccacaatgccagccccttctcagttccgaagaaacaggatgaatcacccatgattggggatggagaagattatttcctttctttgtttggtgattcaaagaaacttacagcacactcaaactacactcagaaaactttaaaatacttttctatgattcttgaagaagttggccaatttacctccagttctcttggagatgttgaaatagctgaagtgaatgtcaagggtttgttcgtgaagctcattaactcttcccttgacaaagaaatggcaattggagatcatattctccagcaaaatgtgaatggacaaaccatttctttgtaccgattccttccaaacatcgtaatgcaggcaaattccacagtaacagtgtgggcagcagcatctgaagcaaagcatcaacctccatcagattttctttggaaggaacaagacaagtttagagcaagtcctgattgtataacaatcctgtgcaaaccgaacggtcaagccattgcgtggtacacccctatccactggaagcaagcgtgggaaaaattagatgctgacgttgaatttaacagatgttcagtagtatctccaacattccgaaagcgtgtgtttcagtggacagcatctacagctacaataactaaagaaaaacaagatcaacctaagaaagatatctcaaattatcaggtggaacaagctcaagttcttcttaagagagagaaggaaatcccaccaaccgttttccctaatcgcagcccttggtgccagaatccctatgtctctgcacatccttactgtcctctgattgaaccacacaatacatccaccgctggaggcagattggatagacagcccaggactcggtcaaccagacctaatcgagcctcagggtctaagaaaaagaagacatctgagtcacaaaagcaataagcagtcaactcaacctttaaagatggagtctcactctgttgcccaggctggagtgcagtggtgtgatctccactaactgcagcctccgcctcccaggttcaagtgagtctcctgcgtcagcctcccgagtagctgggattacaggcatccgccaccctgcatggctaatttttgtatttttagtagcaacgaggtttcaccatgttggccaggctggtctcgaattcctgacctcaggtgatctgcctgccttggcctcccaaagtgctgggattacacgcatgagccaccatgcccggcgcaa

SEQ ID NO: 3403 - DNA, 1490 bp, Homo sapiens
  source 1..1490: mol_type = genomic DNA
agccagttcctagcgcagagccgcgcccgccatgagggagatcgtgcacatccaggcgggccagtgcgggaaccagatcggcaccaagttttgggaagtgatcagcgatgagcacggcatcgacccggccggaggctacgtgggagactcggcgctgcagctggagagaatcaacgtctactacaatgagtcatcgtctcagaaatatgtgcccagggccgccctggtggacttagagccaggcaccatggacagcgtgcggtctgggccttttgggcagcttttccggcctgacaacttcatctttggccagacgggtgcagggaacaactgcctgcagggcttccagctcacgcactcgctgggcggcggcacgggctcaggcatgggcacgctgctcatcagcaagatccgtgaggagttcccggaccgcatcatgaacaccttcagcgtcatgccctcgcccaaggtgtcggacacggtggtggagccctacaatgccacactgtcggtgcaccagctggtggagaatacagacgagacctactgcatcgacaacgaggcgctctatgacatctgcttccgcactctgaagctgacaacgcccacctacggggacctcaaccacctggtgtccgccaccatgagtggggtcaccacctcgctgcgcttcccgggccagctcaatgctgacctgcgcaagctggcggtgaacatggtgcccttcccgcgcctgcacttcttcatgcctggcttcgcgccgctcaccagccgcggcagccagcagtaccgggccctgaccgtgcccgagctcacccagcagatgttcgacgccaggaacatgatggccgcctgcgatccgcgccatggccgctacctgaccgtggccaccgtgttccgcgggcccatgtccatgaaggaggtggacgagcagatgctggccatccagagtaagaacagcagctacttcgtggagtggattcccaacaacgtgaaggtggccgtgtgcgacatcccgccccgcggcctgaagatggcctccaccttcatcggcaacagcacggccatccaggagctgttcaagcgcatctccgagcagttctcagccatgttccggcgcaaggccttcctgcactggttcacgggtgagggcatggatgaaatggagttcaccgaggcggagagcaacatgaacgacctggtatccgagtaccagcagtaccaggatgccaccgccaatgacggggaggaagcttttgaggatgaggaagaggagatcgatggatagtcggaatagagccgccccaactcagatcctacaacacgcaagttccttcttgaaccctggtgcctcctaccctatggccctgaatggtgcactggtttaattgtgttggtgtcggcccctcacaaatgcagccaagtcatgtaattagtcatctggaacaaagactaaaaacagcagagaattgcgggttctacccagtcag

SEQ ID NO: 3404 - DNA, 963 bp, Homo sapiens
  source 1..963: mol_type = genomic DNA
agctttgcgctcgtgggagagtcccgcctccttctgcgaaccgcaccacccagatcccggggtgcgcggagggcgcgtctctgacggaagccggggcggacggtcggagtccggaagaaaaacagtccgcgacagctaggcgcgtgagaccggccgcccgcagggctgctctggccgggacccgctggccgggagacgcgaacctgccggaccaccgcgcggggacgacggcggccatgagctcgcggaagctgagcgggccgaaaggcaggaggctcagcacatacatcaggaggtctgcctgatcccatggtgaaccccgggaatccgaaatcagattgagataagatcctttagggaagtgacttagcctggtctcttgcctgctctttcacggggaacaacgctaatcgcccacttagtctaagtcacgatgcttggatttgctgctaatcgtcggatttgagagtgggaacaagaaatccggacttttgctctccatcctcttagacatacacgtcgtgacttggaacgtggcttcggcagcgccccctctagatctcagtgacctgcttcagctgaacaaccggaacctcaatcttgacatatatgttattggtttgcaggaattgaactctgggatcataagcctcctttccgatgctgcctttaatgactcgtggagcagtttcctcatggatgtgctttcccctctgagcttcatcaaggtctcccatgtccgtatgcaggggatcctcttactggtctttgccaagtatcagcatttgccctatatccagattctgtctactaaatccacccccactggcctgtttgggtactgggggaacaaaggtggagtcaacatctgcctgaagctttatggctactatgtcagcatcatcaactgccacctgcctccccacatttccaacaattaccagcggctggagcactttgacc

SEQ ID NO: 3405 - DNA, 2099 bp, Homo sapiens
  source 1..2099: mol_type = genomic DNA
ggggacgtaacggaggcaggttggagccgctgccgtcgccatgacccgcggtaaccagcgtgagctcgcccgccagaagaatatgaaaaagcagagcgactcggttaagggaaagcgccgagatgacgggctttctgctgccgcccgcaagcagagggactcggagatcatgcagcagaagcagaaaaaggcaaacgagaagaaggaggaacccaagtagctttgtggcttcgtgtccaaccctcttgcccttcgcctgtgtgcctggagccagtcccaccacgctcgcgtttcctcctgtagtgctcacaggtcccagcaccgatggcattccctttgccctgagtctgcagcgggtcccttttgtgcttccttcccctcagtttgttcgtctgcttgaaagttggccaaaaaatcctgctgctcaccgacttcccgtggtcagctgctgtcaagcgttcactttctcttctgtcattcctcatggaatgagggtggttttgtcttcccgcttcccttgacctcaaaatcaggattaaaacctggggtagcctctgtgctcctttcttctatgccctggtttgttctgtggttctgggcttcttatatccgtgtgcccagggctgaactccttattttcctttctccaagggcagagccgagtcttcagtccctgttggtctttccccacccccacttccagcccaagagccaggaaagggctggtgccacactgtctgctgggatcagcggtggttctttgagctgctgatttgggtgttaggctcttgagctgggatgcagatgtaacagtagctccagtgagtcagacactctgcccagcacattagactgtgtttgaccacttcttccagttcatagtattgacttcagcccaaacggagataactccctgtgtgtccttgaggtattgagctgggctggacagctccccttgagccaactctaggagtacaatgtcaggggaaccccagtttgtgaaaaggacttagactggaggatatttgttatctggggatatgatgcggtggcggcggcgcctcaagataaggggctggggtttctgggtggggggccaacagagtggtgccagtaacagccccagatagaggagtacgcaggcccagcatgaggcaaccttgacccagaaggtggcccagctacccttgatgaaggtcttttccagttctgctccctcatagctgtgtaaccaaaggctctggttagagaatatgaagggccttagcttttagacctgttctacctcctcaccaaatataatggcagacccatgtgtgtctggaatggccttgaattgctctttccttaaaatagctagctcttcaggagagtatctaaggcccactccatcttacctgaaccagttggtaagggtaaccatgacatagagtgaggcaaggaagaagacgaagtggaaggcagaatagttgtaggaaagatgctggacttggactggaggagctggaggggtttcttggtcagctggcctcgcagccccacccctttgccctggagagaggaaatggctgctgggagcagagctgctgaaacacctcttcccctctcccccaactacctttgttaaggctcttgagggttcttatggcactccacagagatctaccacttcttatggttcctcacttggcactcacctttgtctgcctccactgtttcagggcagcagaaacacagtgagggcttctgcaaaacagaacgcaggttttggaatggtcttaaaagatgtgagggtgttaatctaggaaacttcccccgtgaaaagattggtctagtattaaaaagtggaggcacacctgggttcaaattctagctccagcatataagtggctgtgcagactttggtaagatgtttaatcttttgtgcctcgatttctccatttgtaaaatggagcaaatacctacctcacagggttgttgtgagggttaaattaaatgagattatgtaaaagtatctagcacagttgcctagcacattgtgggtactcaataaaaggtaacagcagctataatctgagcattctgggtagaggttggta

SEQ ID NO: 3406 - DNA, 861 bp, Homo sapiens
  source 1..861: mol_type = genomic DNA
atggatgaaactgagattggaagctgctttggtagatacggttcagtgaaagaagtgaagataatcacgaatcgaactggtgtgtccaaaggctatggatttgtttcgtttgttaatgacgtggatgtccagaagatagtaggatcacagatacatttccatggtaaaaagctgaagctgggccctgcaatcaggaaacaaaagttatgtgctcgtcatgtgcagccacgtcctttggtagttaatcctcctcctccaccacagtttcagaacgtctggcggaatccaaacactgaaacctacctgcagccccaaatcacgccgaatcctgtaactcagcacgttcaggcttactctgcttatccacattcaccaggtcaggtcatcactggatgtcagttgcttgtatataattatcaggaatatcctacttatcccgattcagcatttcaggtcaccactggatatcagttgcctgtatataattatcagccatttcctgcttatccaagatcaccatttcaggtcactgctggatatcagttgcctgtatataattatcaggcatttcctgcttatccaaattcaccatttcaagtcgccactggatatcagttccctgtatacaattatcagccatttcctgcttatccaagttcaccatttcaggtcactgctggatatcagttgcctgtatataattatcaggcatttcctgcttatccaaattcaccatttcaagtcgccactggatatcagttccctgtatacaattatcaggcatttcctgcttatccaaattcaccagttcaggtcaccactggatatcagttgcctgtatacaattatcagaaatttcct

SEQ ID NO: 3407 - DNA, 4867 bp, Homo sapiens
  source 1..4867: mol_type = genomic DNA
gcaggcgcgccctggcacccgggccaagacgcccggagcggctgctgcagccagtagcggccccttcaccggctgccccgctcagacctagtcgggaggggtgcgaggcatgcagctgggggcccagctccggtgccgcaccccgtaaagggctgatcttccacctcgccacctcagccacgggacgccaagaccgcatccaattcagacttcttttggtgcttgtgaaactgaacacaacaaaagtatggatatgggaaaccaacatccttctattagtaggcttcaggaaatccaaaaggaagtaaaaagtgtagaacagcaagttatcggcttcagtggtctgtcagatgacaagaattacaagaaactggagaggattctaacaaaacagctttttgaaatagactctgtagatactgaaggaaaaggagatattcagcaagctaggaagcgggcagcacaggagacagaacgtcttctcaaagagttggagcagaatgcaaaccacccacaccggattgaaatacagaacatttttgaggaagcccagtccctcgtgagagagaaaattgtgccattttataatggaggcaactgcgtaactgatgagtttgaagaaggcatccaagatatcattctgaggctgacacatgttaaaactggaggaaaaatctccttgcggaaagcaaggtatcacactttaaccaaaatctgtgcggtgcaagagataatcgaagactgcatgaaaaagcagccttccctgccgctttccgaggatgcacatccttccgttgccaaaatcaacttcgtgatgtgtgaggtgaacaaggcccgaggggtcctgattgcacttctgatgggtgtgaacaacaatgagacctgcaggcacttatcctgtgtgctctcggggctgatcgctgacctggatgctctagatgtgtgcggccggacagaaatcagaaattatcggagggaggtagtagaagatatcaacaaattattgaaatatctggatttggaagaggaagcagacacaactaaagcatttgacctgagacagaatcattccattttaaaaatagaaaaggtcctcaagagaatgagagaaataaaaaatgaacttctccaagcacaaaacccttctgaattgtacctgagctccaaaacagaattgcagggtttaattggacagttggatgaggtaagtcttgaaaaaaacccctgcatccgggaagccaggagaagagcagtgatcgaggtgcaaactctgatcacatatattgacttgaaggaggcccttgagaaaagaaagctgtttgcttgtgaggagcacccatcccataaagccgtctggaacgtccttggaaacttgtctgagatccagggagaagttctttcatttgatggaaatcgaaccgataagaactacatccggctggaagagctgctcaccaagcagctgctagccctggatgctgttgatccgcagggagaagagaagtgtaaggctgccaggaaacaagctgtgaggcttgcgcagaatattctcagctatctcgacctgaaatctgatgaatgggagtactgaaataccagagatctcacttttgatactgttttgcacttcatatgtgcttctatgtatagagagctttcagttcattgatttatacgtgcatatttcagtctcagtatttatgattgaagcaaattctattcagtatctgctgcttttgatgttgcaagacaaatatcattacagcacgttaacttttccattcggatcattatctgtatgatgtggtgtggtttgtttggtttgtccttttttttgcgtttttaatcagaaaacaaaatagaggcagcttttgtagattttaaatgggttgtgcaagcattaaaatgcaggtctttcagaatctagaactaggcataaccttacataatactaggaaaattatgagaaaggggaaatttttggttaaataagagtaaggttcaaacacaagcagtacatgttctgtttcattatgctcgatagaaggcttttttttcacttataaggcctgattggtcctacccagcttaacggggtggggtttttttgtttgttcagacagtctgttcttttgtaaacatttttagttggaaaaacagcatctgcattttccccatcctctacgttttagagaggaatcttgtttttgtgtgcaacataagaaaattatgaaaactaatagccaaaaaacctttgagattgcattaaagagaagggataaaggaccagcaataataccttgtaagttgcttttgtttgtaaaatctgagcttatagttttccttagtgagtaaattcataaggatgggaacatttaaattaagttaatgggcctttaaaaaaaaaaaaaggaaacactcatacctgtagttggaggatgaatactggagacgggttaccaatgtcaggttatactaaaactaaatcagaaagtctgaatgtagcacataatggttctcttctgttgtccaaggctgtaaaatggacagccttgtcacacctccccggtgctgttttacaacgtgagggtagacgctgtcagtaacccagagggaccaggccttcctaggttttctaggcagtcagctgttaaccactcacttagtaaatgtcataactacacctgctccaggaccaatcagtgaaacctgctcggaattaaaggcttcctctgggtgcctgctgaacaactgagctcatgtcatgggcatgtggtggtttctctgttgcctgaaagagccattaaagtcagtcgtgcgtgaagcatctctcttctaaaggatgtgtatttccataaatgctttctgaggatccggtacaaaatgatttcccaaagttctgaagtgccttgagaacatgtgggtccgagtgttataacagactcctcccccgggtcaccttttgcctggtcatcctgttagagtacatctttggaaatccagggtaatattctctttcagagatgctcattgtgtaactctgtgtagggagatagtcactttaaacagctcaaagtagctagctaaaggagtagccttaaatacctaaaagatgacagaagcatagcccttaacaaatcttcagcttgtctctcagtatttcccaatcatgaaaatcccttgctatgtctttcctactagaaatgttctagaatcgctggacggtggggtcagagggcagtcggtatttaggccgtgagcttcccatactactgcaggtccaactcctggcaaccgcgggctcaaggcaggtcattggaatccacgttttggccacagtagttgtaggattgcttttctgtatcataattttagaatgctcttaaaatcttgaggaagagtttttattttttatttatttttgagatggagtctctgttgcccaggctgcagtgcagtggtgccatctcagctcactgcaacctccacctcccaggttcaagcgattctcctgcctcagccacctgagtagctgggagtacaggcatgtggcaccatgcctggctaatttttgtatttttaatagagttgagatttcaccatgatggtcaggctggtctcgaactcctgacctcgtgatccgcccgcctcggccccccaaagtgctgggattaacgggtgtgagccacggcgcccagcccaggaagagtttttaaattagagctctgtttaattataccactgggaaatcatggttacgcttcaggcatattcttccccagagtactacttacattttaaatttcattttgtaaagttaaatgtcagcattccctttaaaagtgtccattgttctttgaaagtagacgtttcagtcattcttttcaaacaagtgtttgtgtaccttttgccaagctgtgggcatcgtgtgtgagtacagggtgctcagctcttccaccgtcattttgaattgttcacatgggtaattggtcatggaaatgatcagattgaccttgattgactgtcaggcatggctttgtttctggtttcaatctgttctcgttccttgtaccggattattctactcctgcaatgaaccctgttgacaccggatttagctcttgtcggccttcgtggggagctgtttgtgttaatatgagctactgcatgtaattcttaaactgggcttgtcacattgtattgtatttttgtgatctgtaatgaaaagaatctgtactgcaagtaaaacctactccccaaaaatgtgtggctttgggtctgcattaaacgctgtagtccatgttcatgccaaaaatggctgggaacgtttgctttatttacattcagtcagcgttgctttcagatcacactttatccacacaggaaagccagtcagcctataatgaagtagttattaaaataaatgtaatgaatatgtctacaaagtatagtttagtggtttattttgctaaaatgcacatatatttgatataatttagtttgagaagttcagctagtttttctcctttgtttgactttgtcaatttctatctggtttttaagggtctgagcttagcttgtgcatgcaaggttttgggtttttttattttttttttgagcacagcttttcaccttttaatttgttgggtatttttctcttaataagagaaatattggccatcgatttttacatataatacaagtgtgtttttccagtacattggttcctgtcccctctctgtgaactgtttgagtattggaacagtatgtcttcaataattcaatgttactttgagatacatgtgttaatatacccttagttattcttgaaataaaaccagtctcttacgcttgcagtggagaaagg

SEQ ID NO: 3408 - DNA, 2175 bp, Homo sapiens
  source 1..2175: mol_type = genomic DNA
ggcgagcgcggcggccggggtggtagtggcagtgttcgtgtgctcaggtctgaatcgccgagggaggaggcggtggaggaagaggtggcggcggtggcggtggtcgtagcggtggcggaggaggcgggtacgaatcagctgcgggcggagacatggccaacatcgcggtgcagcgaatcaagcgggagttcaaggaggtgctgaagagcgaggagacgagcaaaaatcaaattaaagtagatcttgtagatgagaattttacagaattaagaggagaaatagcaggacctccagacacaccatatgaaggaggaagataccaactagagataaaaataccagaaacatacccatttaatccccctaaggtccggtttatcactaaaatatggcatcctaatattagttccgtcacaggggctatttgtttggatatcctgaaagatcaatgggcagctgcaatgactctccgcacggtattattgtcattgcaagcactattggcagctgcagagccagatgatccacaggatgctgtagtagcaaatcagaatgcagtaatagtggccttgtcttcaaaatcatgggatgtagagactgcaacagaattgcttctgagtaactgaggcatagagagctgctgatatagtcaagcttgcctcttcttgaggagcaccaacatctgttatttttaggattctgcatagatttcttttaaactggcattcttgcctaatgatgttatctaggcaccattggagactgaaaaaaaaaaatccctgctctgtaaataaagctaattaaacgtctgtgtaaatttaaaaaggggaaatactttaattttttttcttaatagtgtaaaaattccctgagctaagctaaaaccatggaagaaacatgctactttagtgtttagcagtgtaccaagactagcaagagtttgcttcaggattttgttgaataattaagataatattttgagtgtgtcagggccattcaaattgttggtgttgcatcacagctaccttaactgtttttaacatggatcctctgtgcctgtgaatttacttgcatgcttgtacttgacttcttaggatgggtagctgaaaagaccaccattttaagcatttgagaattcttaaatatgaaatttattcagaattgaagatggtgacctattcagagcctttttgtccttgtcaacagactgggacagtgtctgattcccccttcaccccccccacccccgccttgccacacacagctaatattctaatggtaaatttctctgtatcaggtggggaaatgtgctgaaggacagtatgtatcccttgcttcatttttaggtcgtaggtttggaatgtcttgtcccagttcttcaaacactcttaaatttttcttaagtaatgtaaaaatggaactgccaattttatttctcttgcaaaaatagtaaatacttgatgttacattattcccaggtttaatgaaagaacccaacttagtttttcagtgaatttgacacctattttttagtgatgaaatttttctttgagaactggcaaggatgcagtcagctgtttgcagtttttagcctgattttggggtctatagagattgctttattggatacttcaagtcattcttgcttgcacttcccctattgacacatgaaagctgtgttggtgttttattgtacatacttcagatgcacataggaatagaagtgtgttataaatctagctttctttatgatgtttctgataatacgagaattgaaaactttaccttctcttgtacatagtcagactatttgtattaaatttacatttcattctaagttcaaaagtttgaaaattattagttttgcaagatcacacactaatgtaaccattttatgaaggttgaagtggatttatgcaggcagttctatatatagaaatacaattctttttaaatttttaggaccaatacaaaataacaaaaatgtaatggaatcagactgaattaaagtaaggctgtatattgaaagtcatattataaaaggtttgctttctttaagtgttatttatcttaaattataatcgttaaatgtttggaagataatttttgaatcataacgtcagcataacttcatttgacttctcaataatcttgatactagaagcaataaaagaa

SEQ ID NO: 3409 - DNA, 820 bp, Homo sapiens
  source 1..820: mol_type = genomic DNA
gagtccctgcttcgcagagcaccggacttggagtcagagagacctggctgcgaatcccggctccgccactttctagcgctgtgaccttggcacaacagctccagctggcagcatcacttcccgccaatttatccaacttctgccaaggctctgaaatgccaacaacgtcgaggcctgcacttgatgtcaagggtggcacctcacctgcgaaggaggatgccaaccaagagatgagctccgtggcctactccaaccttgcggtgaaagatcgcaaagcagtggccattctgcactaccctggggtagcctcaaatggaaccaaggccagtggggctcccactagttcctcgggatctccaataggctctcctacaaccacccctcccactaaacccccatccttcaacctgcaccccgcccctcacttgctggctagtatgcacctgcagaaacttaatagccagtatcaggggatggctgctgccactccaggccaacccggggaggcaggacccctgcaaaactgggactttggggcccaggcgggaggggcagaatcactctctccttctgctggtgcccagagccctgctatcatcgattcggacccagtggatgaggaagtgctgatgtcgctggtggtggaactggggttggaccgagccaatgagcttccggagctgtggctggggcagaatgagtttgacttcactgcggactttccatctagctgctaatgccaagtgtccctaaagatggaggaataaagccaccaattctgttgtaaataaaaataaagttacttacaaagagacgggcc

SEQ ID NO: 3410 - DNA, 3007 bp, Homo sapiens; identical to SEQ ID NO: 2738
  source 1..3007: mol_type = genomic DNA

SEQ ID NO: 3411 - DNA, 762 bp, Homo sapiens
  source 1..762: mol_type = genomic DNA
gcggcggcggcagcggcagcggcagcggcgctgagttttgtctcccgggccgtctgggcgcgcgcgggtgtcccagactcacttttccccttcgtctttctctccctttctgtctttctgtgtctcctccaagaatgaaatatgactgaggactctcagagaaactttcgttcagtatattatgagaaagtggggtttcgtggagttgaagaaaagaaatcattagaaattctcctaaaagatgaccgtctgggaatcttgcctccacaccacgagtcccatgccaaggtgatgatgtatcgtaaggagcagtacttggatgtccttcatgccctgaaagtcgttcgctttgttagtgatgccacacctcaggctgaagtctatctccgcatgtatcagctggagtctgggaagttacctcgaagtccctcttttccactggagccagatgatgaagtgtttcttgccatagctaaagccatggaggaaatggtggaagatagtgtcgactgttactggatcacccgacgctttgtgaaccaattaaataccaagtaccgggattccttgccccagttgccaaaagcgtttgaacaatacttgaatctggaagatggcagactgctgactcatctgaggatgtgttccgcggcgcccaaacttccttatgatctctggttcaagaggtgctttgcgggatgtttgcctgaatccagtttacagagggtttgggataaagttgtgagtggatcctgtaagatc

SEQ ID NO: 3412 - DNA, 1737 bp, Homo sapiens
  source 1..1737: mol_type = genomic DNA
acgtgatgcgccgggagcgtcatcgcctcctccctccccaagatggcgtccttgctgcagtcggaccgggttctctatctagtccagggagaaaagaaggttcgggccccgctctcgcaactctacttctgccgctattgtagcgaactgcggtcgctggaatgtgtgtctcacgaggtggactcccattattgtcccagttgtttagaaaatatgccatcggctgaagccaaactaaaaaagaatagatgtgccaattgttttgactgtcctggctgcatgcacaccctctctactcgggccacgagcatctccacacagcttccagatgacccagccaagaccaccatgaagaaagcctattacctggcatgtggattttgtcgctggacgtctagagatgtgggcatggcagacaaatctgtagctagtggcggttggcaggaacctgaaaatcctcacacacaacggatgaacaaattgattgaatattaccagcagcttgctcagaaagagaaggttgagcgagatcgcaagaaactggcacgacgtagaaactatatgcctctggctttttcgcaacatactattcatgtagtggacaaatatggtcttggaaccaggcttcagcgaccacgagctggtgcatccatcagtacccttgccggactttcccttaaagaaggagaggatcagaaagagataaagattgagccagctcaggctgtggatgaagtggaacctctacctgaagactattatacaagaccagtaaatttaacagaggtaacaacccttcagcagcgtctgttacagcctgacttccagccagtctgtgcttcacagctctatcctcgccacaaacatcttctgatcaaacggtccctgcgctgccgtaaatgtgaacataatttgagcaagccagaatttaacccaacgtcaatcaaattcaaaatccagctggtcgctgtcaattatattccagaagtgagaatcatgtcaattcccaaccttcgctacatgaaggagagccaggtcctcctgactcttacaaatccagttgagaacctcacccatgtgactctcttcgagtgtgaggagggggaccctgatgatatcaacagcactgctaaggtggtggtgcctcccaaagagctcgttttagctggcaaggatgcagcagcagagtacgatgagttggcagaacctcaagactttcaggacgatcctgacattatagccttcagaaaggccaacaaagtgggtattttcatcaaagttacaccacagcgtgaggagggtgaagtgaccgtgtgcttcaagatgaagcatgattttaaaaacctggcagcccccattcgccccattgaagaaagtgaccagggaacagaagtcatctggctcacccagcatgtggaacttagcttgggcccacttcttccttaaaaggttccactggagggcagatcccaaaggacagtatcaccgtaaacctgcgttaaaatgtggaagctgctgcttcattaggccttgtttataacgatgtacccatgcactacggaattctattgctaagaaagtgggagcataggcaaggcattgggaacacagggtagctgctgttgctcttgctctcacccctgttgacaccagtaagtctgtgtctccctcactgaaccctgcacgttgagtaacagcagcataattccatcctaggaaaggggatgggtgttcctt

SEQ ID NO: 3413 - DNA, 684 bp, Homo sapiens
  source 1..684: mol_type = genomic DNA
gtacgggagctggaggctgagcttgatgcagagcagaagaagcacgccgaggcccttaagggcgtgcgcaagcatgagcgccgtgtcaaggagctcgcataccaggccgaggaggacaggaagaacctggctcgcatgcaggacctggtggacaagctgcagagcaaggtcaagagctacaagcgccagtttgaggaggcggtgagtgcgctggggcctggacacctggaccgggcaccccagctctgccccagggtctgtggccaggagcagcaggccaacaccaacctggccaagtatcgcaaggcccagcacgagctggatgatgcggaggagcgggcagacatggcggaaacccaggccaacaagctgcgggcacggacccgggacgccctgggccccaagctatccctttctcctcagcacaaggagtgacggcctgaccccctgggctctaaagaggaatgtctgctgttgcacatctggctgaggccacctgccccgatcctgccatctctgcatcgccccctgctgccttcagccttccctgggccctgaataaacaccacagccagtttccttctcattcttttctttggggttcaggaggaaaaacacagtcctagggacaaaagccaggtccacagcagtcatttttaaaataaagttatttaatagtctcca

SEQ ID NO: 3414 - DNA, 1124 bp, Homo sapiens
  source 1..1124: mol_type = genomic DNA
acggggcggggacgagctgtcgcgctggttgctcgtgcaggagcgggacccggaacagaccgccgtgagagaggaggggcgccggccgggattcgcggcccggagctcgggaccggagtcaggaatggagagaagggtaatggtgttacctcttattgtggaaacctgttgagatcacagagaatatactgacggcataaaagggcagaaccatagcagggtgcggttgcttcattccagcctcgcagtcacctctgtgccctgctggttgtcttcccagcgctgctgtagttgccttccatggatctataggagagcaagtcctccaggagaagaagtcctcaccagtgaacggagacctctctgaactaagaataccatggccacgtcagccccactacggagcctggaagaggaggtgacctgctccatctgtcttgattacctgcgggaccctgtgaccattgactgtggccacgtcttctgccgcagctgcaccacagacgtccgccccatctcagggagccgccccgtctgcccactctgcaagaagccttttaagaaggagaacatccgacccgtgtggcaactggccagcctggtggagaacattgagcggctgaaggtggacaagggcaggcagccgggagaggtgacccgggagcagcaggatgcaaagttgtgcgagcgacaccgagagaagctgcactactactgtgaggacgacgggaagctgctgtgcgtgatgtgccgggagtcccgggagcacaggccccacacggccgtcctcatggagaaggccgcccagccccacagggaaaaaatcctgaaccacctgagtaccctaaggagagacagagacaaaattcagggcttccaggcaaagggagaagctgatatcctggccgcgctgaagaagctccaggaccagaggcagtacattgtggctgagtttgagcagggtcatcagttcctgagggagcgggaggaacacctgctggaacagctggcgaagctggagcaggagctcacggagggcagggagaagttcaagagccggggcgtcggggagcttgcccggctggccctggtcatctccgaactggagggcaaggcgcagcagc

SEQ ID NO: 3415 - DNA, 4115 bp, Homo sapiens
  source 1..4115: mol_type = genomic DNA
ccgcctgcaccgccgccgcgccccattgggccgggtgctggggcatcccgggcgctgggtgccccgagcggctacgacgagtcccaggtggggccgggctccaggcccgcgggggagcggagccgtgcgccgcaggcgggctccgtgacgccgggtggggaacgccgggccggtggcgggacttccgccacgggactcggaaggggccgcgccgccgctgctgggagttgtagtccggccgtggttgggggagccgcggctcatgcgcggtgcacagaggcttgtttcacatctgtaacaacaggaggaggcccagcctcgtgatgaggaatagcaaggagagaattcagctccagttcaaaagcctacaaaatctgagactgtcattgcttttataaggattccagctttccctcctggccagaaatgttcagcctggactcattcagaaaagatcgggcccagcacaggcagcgtcagtgcaaacttcccccaccccgccttccacccatgtgtgtcaaccctaccccaggagggaccatctctcgaggctgaacgttaacatttccaacatggcagcttctagggacctattaaaagagttcccacagcccaaaaatcttctcaacagtgtgattggaagagccctcggcatctcacatgcaaaagacaaactagtctacgtgcacacaaatggaccgaagaaaaagaaagtcacactgcacataaaatggcccaagagcgtggaggtagaaggctatggcagcaagaagatcgatgctgagcggcaggctgcagctgcagcctgccagctgttcaagggttggggtctgctaggtccccggaatgagttgtttgacgcagccaaataccgagtgctagctgatcgctttggctcccctgccgacagctggtggcgtccggaacccaccatgccccctacttcctggcggcagctgaatccagagagtattcgaccagggggacctgggggcctatcccgctctttaggccgggaagaagaggaggacgaggaggaagagctagaagaagggaccatagatgttaccgacttcttgtccatgacccagcaggattcccacgctccactcagggactcaagggggagttcctttgagatgacagatgacgacagtgccattagggctctgacccagtttccacttcccaagaaccttctggccaaggtgattcagattgcaacgtcatcctccacagctaagaacctcatgcagttccatactgtgggcaccaagaccaagctgtctacactcaccctgctctggccctgccccatgacctttgttgccaaagggcgccgcaaagcagaggctgagaataaggcggcagccttggcctgcaagaaactgaagagcctgggcctggtggacaggaacaacgaaccgcttacacacgccatgtataacctggcctctttgcgtgagctgggtgagacccagcgccgaccatgcaccatccaggtgcccgagcccatcctccgcaagatagagaccttcctgaaccattaccctgtggagagttcatggatcgccccagaactccggctgcagagtgatgacatcttgcccttgggcaaggactcagggcctctgagtgaccctatcacaggcaagccctatgtgcccctgttggaagcagaggaggtacgtctcagccagagtctgctagaactgtggcggcggcgagggccggtctggcaggaggccccccagctacctgtggacccacatcgggacaccatcctcaacgccattgagcagcacccggtggtggtcatctctggggacacgggctgtgggaagaccacgcgcatcccccagctgttgctggagcgctatgtgaccgagggccgaggtgcccgctgcaatgttatcatcacccaacctcgccgcatctctgctgtgtctgtggcacagcgggtcagccacgaactgggcccctccctgcgccggaatgtgggcttccaggtgcggttggaaagtaagcccccatcccgaggcggggccctgctcttctgcactgtgggtatcctgctgcgtaagctgcagagcaaccccagcctggagggcgtgagccacgtcatcgtggatgaggtgcatgagcgggacgtgaacacagactttctgctgatcctgctcaagggcctgcagcggctcaacccggccctgcggctggtgctcatgagtgccacaggggacaatgagcgcttctcccgatactttggtggctgccccgtcatcaaggtgcctggcttcatgtacccagtcaaggagcactacctagaggacatcctggccaagttgggcaagcaccagtacctgcaccggcaccggcaccatgagtctgaggatgaatgcgcactcgatttggaccttgtgactgatctggttctgcacatcgatgctcgcggggaaccaggtgggatcctgtgcttcctgcctgggtggcaggagatcaaaggagtgcagcagcgcctccaggaggccctgggcatgcacgagagcaagtacctcatcctgccagtgcactccaacatccccatgatggatcagaaggccatattccagcagcctccagttggggtgcgcaagattgtcttggccaccaacattgctgagacttccatcacaatcaatgacatcgtgcatgtggtggacagtgggctgcacaaggaagaacgctatgacctgaagaccaaggtgtcctgcctggagacagtgtgggtatcaagagccaatgtgatccagcgccggggccgggcgggccgctgccagtccggctttgcctaccacttgttccctcgaagccggctggagaaaatggtccctttccaagtgccagagatcctgcgcacacctcttgagaacctggtgctgcaagcgaaaatccacatgcctgagaagacggcggtggagttcctgtccaaggctgtggacagtccaaacatcaaggcagtggacgaggctgtgatcttgctccaggagatcggggtgctggaccagcgggagtacctgactaccctggggcagcgcctggctcacatctccaccgacccccggttggccaaggccattgtgttggctgccatcttccgttgcctgcacccactactggtggtcgtttcctgcctcacccgggaccccttcagcagcagcctacagaaccgggcagaggtggacaaggtgaaagcactgttgagccatgacagcggcagtgaccacctggcctttgtgcgggctgtcgccggctgggaggaggtgctgcgttggcaggaccgcagctcccgggagaattacctggaggaaaacctgctgtacgcacccagcctgcgcttcatccacggactcatcaagcagttctcagagaacatttatgaggccttcctggtggggaagccctcggactgcaccctggcctccgcccagtgcaacgagtacagtgaggaggaggagctggtgaagggcgtgctgatggccggcctctaccccaacctcatccaggtgaggcagggcaaggtcacccggcaggggaagttcaagcccaacagcgtcacatataggaccaaatcaggcaacatcctgctgcacaagtcgaccattaacagggaggccacacggttacggagccgatggctgacgtatttcatggcagtcaagtccaatggcagcgtcttcgtccgggactcctctcaggtgcacccgctagctgtgctgctgctgaccgacggggacgtgcacatccgtgatgacgggcgccgggccaccatctcactgagcgacagtgacctgctgcggctggagggtgactcgcgtaccgtgcggctgctgaaggagctgcggcgggccctgggccgcatggtggagcggagcctgcgcagcgagctggctgcacttccccccagcgtacaggaggagcacgggcagctgcttgcgctactggcagagctgctgcgaggaccctgtggcagctttgatgtgcgcaagacagctgacgactgagccctgcttctgctggggctgtgtacagagtgcaaatgtttatttaaaataaagttctatttatcccttgtgacc

SEQ ID NO: 3416 - DNA, 759 bp, Homo sapiens
  source 1..759: mol_type = genomic DNA
agtgggcgtggaagcagccagggtcatcgccaaggccttagagaagaagtcggagttgaagcgctgccactggagtgacatgttcacgggaaggctgcggaccgagatcccaccagccctgatctcactaggggaaggactcatcacagctggggctcagctggtggagctggacttaagcgacaacgcattcgggcccgacggtgtgcaaggcttcgaggccctgctcaagagctcagcctgcttcaccctgcaggaactcaagctcaacaactgtggcatgggcattggcggcggcaaggtcatcgggaccctggaggaggtccacatgccacagaatgggatcaaccaccctggcatcactgccctggcccaggctttcgctgtcaaccccctgctgcgggtcatcaacctgaatgacaacaccttcactgagaagggcgccgtggccatggccgagaccttgaagaccttgcggcaggtggaggtgattaattttggggactgcctggtgcgctccaagggtgcagttgccattgcagatgccatccgcggcggcctgcccaagctaaaggagctgaacttgtcattctgtgaaatcaagagggatgctgccctggctgttgctgaggccatggcagacaaagctgagctggagaagctggacctgaatggcaacaccctgggagaagaaggctgtgaacagcttcaggaggtgctggagggcttcaacatggccaaggtgctggcgtccctcag

SEQ ID NO: 3417 - DNA, 8807 bp, Homo sapiens
  source 1..8807: mol_type = genomic DNA
gacgtcggcggtgacaggccctgggactctgggaatacccagcttcctccccgcaacccggtgaaagccaacgcaatgttcggtgcgggggacgaggacgacaccgatttcctctcgccgagcggcggtgccagattggcctcactttttggactggatcaggcagctgctggccatggaaatgaatttttccagtacacagccccaaaacagcctaagaaaggccagggaacggcagcaacaggaaatcaggcaacaccaaaaacagcaccagccaccatgagcactcccacaatactggtcgcaacagcagtccatgcatatcgatacacaaatggtcaatatgtaaagcagggcaaatttggtgctgcagttctggggaaccacacagccagagagtataggattcttctttatatcagtcaacaacagccagttacggttgctaggattcatgtgaactttgagctaatggttcggcccaataactatagcaccttttatgatgaccagagacagaactggtccatcatgtttgagtcggaaaaggctgctgtggagttcaataagcaggtgtgcattgctaagtgcaacagtacctcttccctggatgcagtgctctcccaggacctcattgtggcagacggccctgctgtagaagttggagattctttggaagtggcctataccggctggctctttcagaatcatgtgctgggccaggttttcgactccactgctaacaaagataagttgcttcgcttgaagttaggatcaggaaaagtcatcaagggctgggaggatggaatgctgggcatgaaaaaaggaggaaagcgattgcttattgtccctccagcctgtgctgttggctcagaaggggtaataggctggactcaagcaacggactcgatcctggtgttcgaggtggaggttaggcgggtgaagtttgccagagattctggctctgatggtcacagtgttagttcccgcgattctgcagctccgtctcccatccctggtgctgacaacctctctgctgatcctgttgtgtcaccacccacatcaatacctttcaaatcaggggagccagctcttcgtaccaaatctaactccctcagtgaacaacttgcaataaatacaagtcccgatgcagtcaaagccaagttgatctctcggatggctaaaatgggccagcccatgctgcccatccttccaccacagctggattccaatgattcagaaatcgaagatgtgaacactctgcaaggaggtgggcagcctgtggtgactccgtccgtccagccctctcttcatccggcccatccagcgttaccacagatgacctcacaggcacctcagccatctgttactgggctccaggcaccttctgctgccttaatgcaagtgtcatctctcgattcccactcagctgtatctggaaatgcccaatcctttcagccctatgcaggtatgcaagcctacgcttatccccaggcatctgccgtcacctcccagctgcagcccgttcggcctttgtacccagcaccgctctctcagcctccccatttccaaggatcaggtgatatggcttcatttctcatgactgaagcccggcaacataacactgaaattcgaatggcagtcagcaaagtggctgataaaatggatcatctcatgactaaggttgaagagttacagaaacatagtgctggcaattccatgcttattcctagcatgtcagttacaatggaaacaagcatgattatgagcaacatccagcgaatcattcaggaaaatgaaagattgaagcaagagatccttgaaaagagcaatcggatagaagaacagaatgacaagattagtgaactaattgaacgaaatcagaggtatgttgagcagagtaacctgatgatggagaagaggaacaactcacttcagacagccacagaaaacacacaggcaagagtattgcatgctgaacaagagaaggccaaggtgacagaggagttagcagcggccactgcacaggtctctcatctgcagctgaaaatgactgctcaccaaaaaaaggaaacagagctgcagatgcagctgacagaaagcctgaaggagacagatcttctcaggggccagctcaccaaagtgcaggcaaagctctcagagctccaagaaacctctgagcaagcacagtccaaattcaaaagtgaaaagcagaaccggaaacaactggaactcaaggtgacatccctggaggaggaactgactgaccttcgagttgagaaggagtccttggaaaagaacctctcagaaaggaaaaagaagtcagctcaagagcgttctcaggccgaggaggagatagatgaaattcgcaagtcataccaggaggaattggacaaacttcgacagctcttgaaaaagactcgagtgtccacagaccaagcagctgcagagcagctgtctttagtacaggctgagctacagacccagtgggaagcaaaatgtgaacatttgttggcctccgccaaggatgagcacctgcagcagtaccaggaggtgtgcgcacagagagatgcctaccagcagaagctggtacaacttcaggaaaagtgtttagccctccaggcccaaatcacagctctcaccaagcaaaatgaacagcacatcaaggaactagagaagaacaagtcccagatgtctggggttgaagctgctgcatctgacccctcagagaaggtcaagaagatcatgaaccaggtgttccagtccttacggagagagtttgagctggaggaatcttacaatggcaggaccattctgggaaccatcatgaatacgatcaagatggtgactcttcagctgttaaaccaacaggagcaagagaaggaagagagcagcagtgaagaagaagaagaaaaagcagaagagcggccacgaagaccttcccaggagcagtcagcctcagccagttctgggcagcctcaagcacccctgaatagggagaggccagagtcccccatggtgccctcagagcaggtggtcgaggaagctgtcccgttgcctcctcaggccctcaccacttcccaggatggacacagaaggaaaggggactcagaagctgaggcactctcagagataaaagatggttcccttccacccgaactgtcttgcatcccatcccacagagttctagggcccccgacttcaattccacctgagcccctaggccctgtatccatggactctgagtgtgaggagtcacttgctgccagcccaatggcagctaagcccgacaacccatcaggaaaggtctgtgtcagggaagtagcaccagatggcccactacaagaaagctccacaagactgtccctgacttcagaccccgaggagggggacccactggccttagggcctgaaagcccaggagagcctcagcctccacagctcaagaaagatgatgtcactagctccaccggtccccacaaggagctgtcaagcacagaggcaggttccacagttgcaggagcagccctcagacccagccatcattcccagcgttccagtctctctggggatgaagaggatgaactgtttaaaggggcaactctgaaagctctgaggcccaaagcacagcctgaggaggaggatgaagacgaggtgagcatgaagggacgcccgcccccaacgcccctttttggagatgatgatgatgacgatgacattgactggctgggatgaagacccaggaaactggtgcaaaggtttctctgcaacccttccctaagcatgattttgcacagccaaccctgggtctaggcgaaccacagggtgaggtcaaggtgagcattctgggaacaatatttgggctcagagggtgggttggccaccttctgagccccacccccgccagacctggtgaagaggatcataaccctgtcttcaagaacactgggatttcagcagcaagttggaagaaggactggtaggttcccctccaagccagtcacctgtaagagtcctgtcctctgccagactttttaatctcttcattaactctcagactgacctgggagccctcctctacctgaatccagtgctcaactgtgccccggcaacaagacctgggctgaggtctccctggtagaactaagggagattacaccatctaaatcccagtgcagtcaacagcctggcctatagtcctgggacatgtatcttcttctttgccttaaatctgatacaagaggtcaatgactttgaaaataaaactaaaataaatgtctataatgaaacttgacccaagcccttggagaaaaattgagtttggttccaagggctgtctgtgctcttttgggaatctaagggtaggagtcttacagatctgggtcagttaatgtgcacaaaacgttgtggcatatttactccctttgatacctaaccctggaacttttaggctttcaaagaaagtcaccactgtagtcctagctcatccctggggcatgatggttctgtgaggaccagtccagtcatcctcttgctcctgcaggcttagtcctgcagtctaggaagccatgcaaagaaggtgagagggtcccttctttccattgttcatggcacctgagggattcttcactttgagagcagcttccattcccttagaactcatgggaccaggacttatgcagagaacagtagtgagaaaatacttgtggtcattttcttgattccaggatcttccaaagattatgcaatcagtctttaaaaaaacagaataattaattttaataaaaaatgtttcttgattttaaatgttttaaaagataggacccaaaattccacttcatctggcctggcatcatccttgcaggctttggatatgtctcccgtgtgcggacctgggaggcagtgagaactaattatttctttgttgcttaacaaaaggcggtgctgtttggcactttcacagactggcttatctccagcaaccactgcagaagacagtgttatcaccattttatagaggagaaaactgagacttagagaggtaaagtaatttgcccaaagttacatatctaggaagcctcagcacaagaattcaaatcctggccatctgattccagagcctgggctcttggccagcacagcctgactgtcactggttgggggaaggggcggtgatgcttttagaaacaggcttcttgagacaccaggcagctttccagttccctgcaaacatgggggaatgccctgatcagtcctaaaggtgtgacatagtctactttctagggcagttatttcttattgtaaattaactagtggctattatatttgcttctgcccgcagggagagaagatgctgagtaattgtgccaacacaggtgcttaaagtccgtgtgacagttacttttcttatagcatgtactcaattaatacttgttacatgaatgaagaatgacttgacttgcctcagttggcattctggggtgtctacctgggtgcagcatttcagggctgggtttccctgagcagagttgtctttgtagcagatggatggactctgtcctcagacaggcttataaagagtactaccagttctattagccccactcagcccctgcagttgttacaagggttcatgtgctttctgttggaattaggagaacagaacagtcatagactatttaaaaatatatatttactaaaatgtatttgtttgtttttaattcccaaagcttacaaccatcttttcatctaatctgtgaggtatttagtatacagcagtgattttctctctttccttttttataaagtgaagaggttcaactatccagagagtcccatctaactcaaaaaatgtaatggctttggttggattgcatcttcagtcagtacctgcccatggcttaatcagtattttaagtgaatgaatcatgtttccccactagatcattacgagtaagcagtaagtaataaatagagaatattaagtattgaacattattagatgcagctttttgttctgcatagaagaaagatgaggataaaggagggcattgaggccacgaagagcttcccagacacccacggccatcagatcatcttcttcctgcaggcagtgccttctggtggaaggagctcagtctatcagagaataaaccaggagcctgaaagcagtcctgtgtctctgcctttaatcagctgtcacttattctctccccaagaaagggaaataggtctcagcagtttctgccatccatcatgaatcaatgaaatcatttcattaaaaatttttttgtatgaatgtgcaaaattgccaactaggagttcaatgggaaaaataaaaaaaacttagtttgtcaacatgatccatagacgagatgatcttcatgtgttccaaaggcagaaaggtgagaaaaaggatctagcttggtctctgtccctcaaagacagaagaggtcaggaagtccaatgggcgatgctcctgtagataaggcacaaagcaggagagctgagggtgtccaggttccatgccctgcatcaccaagaacccttctccctggcttgaaatctttggaaattcctggtttgagtcacagagaagcattgtcatgggctcagtaaccctgccacccctgttatctccattctccctttggtcacagcagctgtcttaagacacaagaccatgcctgggccctacgtaggctggctgagaaggaaggttgctgcaatggcttccgaactccagggagcaagtgctggcttcagctcaaagtttccaggggctgggaataaggtggaggaatagccatcagaagaaagggcagttggaagtatagtgtctggaagagggggctccatgtccctccagcctcagtgcctgcacgttcctcaccagctaagctgtgctgagaagtgggtaagctaggtagtagcccacagcagagcccaagaccacaccaaggaaaatccaggtgttgtaggacattacggccagcatgatgaagtagccgatgaccacctggatgacatggattagagactggccaaagtgacacaaataccacctagataaaaaggagaagcaagttaatcctggtaatgagctggtaatgaggaagctgggagtagatatcagggagtagaaagctgttgagttacgtgacccgattgatttataacttgtatgcttaacccaggagtgatttctttctgcccctcccacccccgcccccagaaaaaactcgagatttatttttaaagagacatatcttcactacatttggtttcaagcttcctggcatcctaggcaaaggggaaaatgagggtatctataatctgtctttctgataaggaataagagaaaatcatcagtaaggcatatttcccccctgaatctacttcgggaggcagtatgacaatggaaagaaaaagcatggtcttaggtgacattatcagttcctagacctgccactaactaaaagtggcctagacaaatgtcttaacctctctgaacgtaagattccttatcagtaaaacaggaatgagaatacttcccttgcagtgcagttgtgaagatctgagacacccatgtagggtggctagtgatggagcgggcaggcttattaagcacaggtgaggctggggctggacagagggcagaacagggaccctaaatggttgcctgattcgagtgggaagggaggagaggagagcttgtcatcctcctcccaccaagtgggatacattgcttcaggacagctgcagatcccctcctggatatgggagcctagtgacccatggaactggtgagatttgggggagggtgggtggccacctcatttgctagataggggcctgcacctgaagatcactgttccctaaagaaagccttctgagcctctcaagtggctggctgttcacagagtgctttggcctgggcatcaggagacatgagctctagttcacttggctatgtgtagccactttggcaagtcctggtccttccctgggcctcgctgtcctctctgtgaagtggggctaatgctgtctgggccagcctgtctctcagggtgaatgtgaggcttctgcccctttcccatacccactgcctgtacctgtggtgggttctgccaacagggaatgaatctgagcctgcagagtccccgtctgtctctgcgatggtctgctggctgatggaggttggcaggttcaccagtacctggttgagcagcttggctttgccaaccttgatgccttcatacagtacagccagaagcaggagcaccaacaccgaaagggccatgcctgtcaaaggaggcagagttgtggagacctggccaggccagcactgtttcccttccagcacctccacctgttcatggaatccactccatccacctctatcctgcaccttcttccccacccttgctgagttccgaacttcttcactgtcttcaccagacttttcttagctggagtgtggctttgagatcaggaagagaagccacctgaaaaatccaggggctgagggtgaagaagccacgtaccattaccccacccactcccccagcaggctgcacaaatctgtcgtgacttcttgttaagtgatgagtactgcaaggtcctatttatatgtaagtatgcaaaaaatgtctggaaggaaagataaatagcacaagagtaatagttatctcagcaaagtaggatacaggtggtttttatgttcttgcctaactttctaaggtttcttttatatatattacttttataataggggaaaaacccaataaattattttaccaaaacta

SEQ ID NO: 3418 - DNA, 1728 bp, Homo sapiens
  source 1..1728: mol_type = genomic DNA
tgaggtttggtctctgttgtcacaacattcagtacaatctgctgcccaggacctggacattgacagataaaatgaagtgggaagaatatgaagaactgcttcattatgctatagtgactccaaatattgaaccctgtgcttcacagtcatctcatcctaagggagaattggtgccagatgtcagaatttctacaattcatgatattcttcatagtcaaggaaataactctgaagtaagagaaactgcaatagaagttggaaaaggatgtgatttccatatttcaagtcattcaaagacagatgagtcatcaccagtgttatcgccaaggaagccttctcacccagtcatggattttttcagttcacatcttttagctgactcttcctcaccagcaacaaattctagtcatacagatgcccatgaaatacttgtgagcgattttcttgtttctgatgaaaaccttcagaagatggaaaatgtgcttgatctttggagttcaggtcttaagacaaacatcatatctgaactaagtaaatggagacttaattttattgactggcaccgaatggaaatgagaaaagagaaagaaaaacatgcagcacatttaaaacaactgtgtaatcagatcaatgaattgaaggagctgcaaaaaacctttgaaatctccattgggagaaaagatgaggtgatttctagcttgtctcatgccataggcaagcaaaaggaaaagatagagttgatgagaacattcttccactggcgaatcggccatgtcagagccagacaggatgtttatgaaggtaaactagctgaccagtactaccagagaactttactgaagaaagtctggaaagtctggcgttccgtagtgcaaaagcagtggaaagatgtggtagaaagagcttgtcaagcaagagctgaagaagtttgtatccagatttccaatgattatgaagccaaagttgctatgttatctggagctttggaaaatgcaaaagctgagattcaaagaatgcaacatgaaaaagagcactttgaagattccatgaaaaaagctttcatgaggggtgtatgtgcattaaatcttgaagccatgactatatttcaaaacagaaatgatgcagggatagactccacaaataataaaaaggaagagtatggtcctggtgttcaaggaaaagaacattctgctcatttggatccttcagctcctccgatgcccttaccagttacatcaccactgctgccatccccaccagccgccgtcggaggagccagcgcgactgccgttccctcagctgcttcgatgacttctaccagggctgcttccgcatcttctgttcacgttcctgtttctgctcttggtgcaggatctgcagctactgctgcatcagaagaaatgtatgtgccaagagttgtaacctctgcacaacagaaagcaggaagaactattacagcccggatcacaggaagatgtgattttgcttcaaaaaatagaattagcagcagtttagctataatgggagtttctcctcccatgagctcagttgttgtggaaaaacatcatccagtcacagtgcaaaccattcctcaagcaactgcagcaaaatatccccggaccattcatcctgaaagtagtacctcagcttccagatcacttggaaccagatcagctcacacccagtctctcacaagtgttcattccataaaagtggttgactaaagtg

SEQ ID NO: 3419 - DNA, 402 bp, Homo sapiens
  source 1..402: mol_type = genomic DNA
atgagtcccagccagatgatcatgcccaatgtcatggagatgatcgcagccctgggccccggcccgtccccctatcccctcccgcctcccccagggggcaccaactccaacgactacagcagccaaggcaacaactaccaaggccatggcaactttgacttcccccacgggaaccctggagggacatccatgaatgacttcatgcacgggcccccccagctctcccaccccccggacatgcccaacaacatggccgccctcgagaaacccctcagccaccccatgcaggaaactctccttcccgaactcacaaatcctgacgagctcctgtcttatctggacccccccgacctgccgagcaatagtaacgatgacctcctgtctctatttgagaacaactga

SEQ ID NO: 3420 - DNA, 2587 bp, Homo sapiens
  source 1..2587: mol_type = genomic DNA
cccatctctacgaaaaatacaaaaattagccaagtatggtggccggcgcctgtaatcccagctactcgggagactgaggcagagaactgcttgaacctgggaggcagaggttgcagtgatccgagatcgcgtcactgcactccagcgtgggcgacagagcgagactccgtttcagaaaagaaaaaaaaaaaaaaaaaaaagggagtcggggtggagctctcattggctcgttgcatgtgagtgtccctacggcctagaaatacaagagaagcacatcggaacgggctggaaatccacccagttaactagagggctttgaaccttttattaacttggaggttgactctcctgtcaactcgattcccttttggctgtttggcagggtcagtgagacatcccctgggtcgctcgaccccgtaggacggttcagggagccctccaggtcttcgtttctcctcttccccgcacagtgctgttatccagctgggggatccaacgcacacttaaggctccagcaaagtggctccgctgccggatgggagtgccccagtgtgctggatgaagctggcgcatgcaccatgtcatcatgtgtctctagccagcccagcagcaaccgggccgccccccaggatgagctggggggcaggggcagcagcagcagcgaaagccagaagccctgtgaggccctgcggggcctctcatccttgagcatccacctgggcatggagtccttcattgtggtcaccgagtgtgagccgggctgtgctgtggacctcggcttggcgcgggaccggcccctggaggccgatggccaagaggtcccccttgacacctccgggtcccaggcccggccccacctctccggtcgcaagctgtctctgcaagagcggtcccagggtgggctggcagccggtggcagcctggacatgaacggacgctgcatctgcccgtccctgccctactcacccgtcagctccccgcagtcctcgcctcggctgccccggcggccgacagtggagtctcaccacgtctccatcacgggtatgcaggactgtgtgcagctgaatcagtataccctgaaggatgaaattggaaagggctcctatggtgtcgtcaagttggcctacaatgaaaatgacaatacctactatgcaatgaaggtgctgtccaaaaagaagctgatccggcaggccggctttccacgtcgccctccaccccgaggcacccggccagctcctggaggctgcatccagcccaggggccccattgagcaggtgtaccaggaaattgccatcctcaagaagctggaccaccccaatgtggtgaagctggtggaggtcctggatgaccccaatgaggaccatctgtacatggtgttcgaactggtcaaccaagggcccgtgatggaagtgcccaccctcaaaccactctctgaagaccaggcccgtttctacttccaggatctgatcaaaggcatcgagtacttacactaccagaagatcatccaccgtgacatcaaaccttccaacctcctggtcggagaagatgggcacatcaagatcgctgactttggtgtgagcaatgaattcaagggcagtgacgcgctcctctccaacaccgtgggcacgcccgccttcatggcacccgagtcgctctctgagacccgcaagatcttctctgggaaggccttggatgtttgggccatgggtgtgacactatactgctttgtctttggccagtgcccattcatggacgagcggatcatgtgtttacacagtaagatcaagagtcaggccctggaatttccagaccagcccgacatagctgaggacttgaaggacctgatcacccgtatgctggacaagaaccccgagtcgaggatcgtggtgccggaaatcaagatcctggtgaagaccatgatacgtaaacgctcctttgggaacccattcgagggcagccggcgggaggaacgctcactgtcagcgcctggaaacttgctcaccaaaaaaccaaccagggaatgtgagtccctgtctgagctcaagacctagaaaataagtccccttcctgcctgttgcaaagtaacgtaagagttccctcacccgagtggatgcagaccttcttgctgtcagccacccttccttcatacacatagccagcccaggtgaccagaacctcccaggacagatgaggctttgtgtccttatgagactgggagaacctgctgggcacccctgctgcaggtgctgtggtgggtggggaccccactgcccttcccactgagcacatcatggctacctgacttggtgggagctccaggcagtcacttctgtttcttaaacatagctttactgaggtacaattcacataccatgtaattcacccacgggaagtgtatgattcagtggtttctaatacagacttctgcagccattaccaccgtcaactttacgacattttcatcagcccaagaagacaccctacactccttagctgtccccatccaactcccccaccccagtaaccactcagaataggtatggatttgcctattctggacgtttcgtataaatggcgtcatacacta

SEQ ID NO: 3421 - DNA, 2042 bp, Homo sapiens
  source 1..2042: mol_type = genomic DNA
ggaagttgagcggcggcaagaaataatggcggcagctacgggggatcctggactctctaaactgcagtttgccccttttagtagtgccttggatgttgggttttggcatgagttgacccagaagaagctgaacgagtatcggctggatgaagctcccaaggacattaagggttattactacaatggtgactctgctgggctgccagctcgcttaacattggagttcagtgcttttgacatgagtgctcccaccccagcccgttgctgcccagctattggaacactgtataacaccaacacactcgagtctttcaagactgcagataagaagctccttttggaacaagcagcaaatgagatatgggaatccataaaatcaggcactgctcttgaaaaccctgtactcctcaacaagttcctcctcttgacatttgcaattgaagcactagagtgtgcatatgataatctttgtcaaacagaaggagtcacagctcttccttacttcttaatcaagtatgatgagaacatggtgctggtttccttgcttaaacactacagtgatttcttccaaggtcaaaggacgaagataacaattggtgtatatgatccctgtaacttagcccagtaccctggatggcctttgaggaattttttggtcctagcagcccacagatggagtagcagtttccagtctgttgaagttgtttgcttccgtgaccgtaccatgcagggggcgagagacgttgcccacagcatcatcttcgaagtgaagcttccagaaatggcatttagcccagattgtcctaaagcagttggatgggaaaagaaccagaaaggaggcatgggaccaaggatggtgaacctcagtgaatgtatggaccctaaaaggttagctgagtcatcagtggatctaaatctcaaactgatgtgttggagattggttcctactttagacttggacaaggttgtgtctgtcaaatgtctgctgcttggagccggcaccttgggttgcaatgtagctaggacgttgatgggttggggcgtgagacacatcacatttgtggacaatgccaagatctcctactccaatcctgtgaggcagcctctctatgagtttgaagattgcctagggggtggtaagcccaaggctctggcagcagcggaccggctccagaaaatattccccggtgtgaatgccagaggattcaacatgagcatacctatgcctgggcatccagtgaacttctccagtgtcactctggagcaagcccgcagagatgtggagcaactggagcagctcatcgaaagccatgatgtcgtcttcctattgatggacaccagggagagccggtggcttcctgccgtcattgctgcaagcaagagaaagctggtcatcaatgctgctttgggatttgacacatttgttgtcatgagacatggtctgaagaaaccaaagcagcaaggagctggggacttgtgtccaaaccaccctgtggcatctgctgacctcctgggctcatcgctttttgccaacatccctggttacaagcttggctgctacttctgcaatgatgtggtggccccaggagattcaaccagagaccggaccttggaccagcagtgcactgtgagtcgtccaggactggccgtgattgcaggagccctggccgtggaattgatggtatctgttttgcagcatccagaagggggctatgccattgccagcagcagtgacgatcggatgaatgagcctccaacctctcttgggcttgtgcctcaccagatccggggatttctttcacggtttgataatgtccttcccgtcagcctggcatttgacaaatgtacagcttgttcttccaaaatctgggacatgagcgatgatgagaccatctgagatggccccgctgtggggctgacttctccccggccgcctgctgaggagctctccatcgccagagcaggactgctgaccccaggcctggtgattctgggcccctcctccataccccgaggtctgggattcccccctctgctgccca

SEQ ID NO: 3422 - DNA, 965 bp, Homo sapiens
  source 1..965: mol_type = genomic DNA
cggagaaatgtggagctgattaatgaagaagctgccatgttcgatagtcttctcatggactcttatgtgagctctaccactggggagagtgtgatcacaagagagatggtggagatgctcttttctgatgattctgacctgcagttagcaaccacacagaaattccggaaactgctctccaaagagcctagtcctccaatagatgaagttatcaacactccaagagtggtggatcggttcgtggagtttctgaagaggaatgagaattgtacattacaggcagtctgggcactgggaaacatagctggagatagctctgtttgccgagattacgtcttgaactgttccatccttaatcctttgttaacactccttaccaagtccacacgactgacgatgacacggaatgcagtctgggccctgtcaaatctctgccgagggaaaaacccacccccagagtttgcaaaggtctctccttgtttgcctgtactgtctcgcctactcttcagcagcgactcggacttgctggcagatgcttgctgggccctttcttatctgtctgatggccccaatgagaagatccaggcagtcatagactccggagtctgccggagattggtagagctgctgatgcacaatgattacaaagtggcttctcctgccctgagagccgtgggtaacatcgtcactggggatgacatccagacccaggtcattcttaactgttcagccctaccttgccttctccacttgttgagcagtcccaaggagtcaatccggaaggaagcttgctggactatttcaaatattactgctggcaacagggctcaaatacaggctgttatagatgcaaatatcttccctgtgttgatcgaaatccttcagaaagcagagtttcgtacaaggaaagaggcagcctgggccatcaccaatgccacatcaggaggaacccctgagcagatcag

SEQ ID NO: 3423 - DNA, 1842 bp, Homo sapiens
  source 1..1842: mol_type = genomic DNA
ggagacgcccgcccggtgcccgccctgggcccggcgggtgccccctgcccgccgcctgacgcaatccgaggcgcccttgctgcatgccggcgctggagaaacctcccctgccgttgcatcactcctgccaggtttgccacagaggtggagctgaaccaatcagcgggcgcgctgggcccgcggcgcggttaagtgagaagcagaatccgaagttgattggccaaaaggggatttgccccaccccaatcaccgcggcagctggccgcggtgggcgtggtctcccggcaagaaggtttaaagggcgcctccatggggggcgctcagctggagctaccgagcggtgccaggccaggtgtgtgcgtccgtcggtctttccgtgcccacgccggagaccagccccggaggccgcctgggcctatccctgtgccaggcaccatgaagcaggagtctgcagccccgaacaccccgcccacctcgcagtcccctacgccgtccgctcagttcccccgaaacgacggcgaccctcaagcgctgtggattttcgggtacggctccctggtgtggaggcccgacttcgcctacagcgacagccgtgtgggcttcgtgcgcggctacagccgccgtttctggcagggagacaccttccatcggggcagcgacaagatgcctggccgtgtggtgacgctccttgaagatcatgagggctgcacttggggcgtggcataccaagtgcaaggggagcaggtaagcaaggccctgaagtacctgaatgtgcgagaggcagtgcttggtggctacgataccaaggaggtcaccttctatccccaagatgctcctgaccaaccactgaaggcattggcctatgtggccaccccacagaaccctggttacctgggccctgcgcctgaagaggccattgccacgcagatcctggcctgccggggcttctccggccacaaccttgaatacttgctgcgtctggcagacttcatgcagctctgtgggcctcaggcgcaggacgagcacctggcagccatcgtggacgctgtgggcaccatgttgccctgcttctgccccaccgagcaggctctggcgctggtgtgaggggctgagcccctgcggggagtgctcatgtggacatcagggccagacacccactccagtgcacaagacagacttgcgaccgcttgagcccactgagcagatatggtgggtggctggaggcttctctttctcagtccctgcctgtctgccagcctgcagctctcctgcttgacactgacttactacttgaaactttatttattgcaccatgttggtgtggtgggcaggtggagggcctgccctggacacaggggccctgctgagcagtggccccatcctggaacttgaccagattccccccagtgctgctgctaaccccacaccacccaggcctccacctccccagggagtctccaagagcctcgatcctctgctcactcagcccagccatccatagccctgggaattccacctgccaaggatcccagcaggctggatgagggatagtagggcatgaggagaaggagccctgtaaggactgaggccccggccagcccttctcctccaccagttccccagagcagagctggagctgatgcctggacacagctgctgagcctggcctgggcctcttacccacttggttgttttcttgtccctctgtctgtctgtctatctacttgtctgtctgggccactcctgcctgtgtgttggtctattcctgggaagctcatcactacaggccctggcaaccttcccagtctgtcccatactgttacccataaaactatctcttta

SEQ ID NO: 3424 - DNA, 1124 bp, Homo sapiens
  source 1..1124: mol_type = genomic DNA
acggggcggggacgagctgtcgcgctggttgctcgtgcaggagcgggacccggaacagaccgccgtgagagaggaggggcgccggccgggattcgcggcccggagctcgggaccggagtcaggaatggagagaagggtaatggtgttacctcttattgtggaaacctgttgagatcacagagaatatactgacggcataaaagggcagaaccatagcagggtgcggttgcttcattccagcctcgcagtcacctctgtgccctgctggttgtcttcccagcgctgctgtagttgccttccatggatctataggagagcaagtcctccaggagaagaagtcctcaccagtgaacggagacctctctgaactaaggataccatggccacgtcagccccactacggagcctggaagaggaggtgacctgctccatctgtcttgattacctgcgggaccctgtgaccattgactgtggccacgtcttctgccgcagctgcaccacagacgtccgccccatctcagggagccgccccgtctgcccactctgcaagaagccttttaagaaggagaacatccgacccgtgtggcaactggccagcctggtggagaacattgagcggctgaaggtggacaagggcaggcagccgggagaggtgacccgggagcagcaggatgcaaagttgtgcgagcgacaccgagagaagctgcactactactgtgaggacgacgggaagctgctgtgcgtgatgtgccgggagtcccgggagcacaggccccacacggccgtcctcatggagaaggccgcccagccccacagggaaaaaatcctgaaccacctgagtaccctaaggagagacagagacaaaattcagggcttccaggcaaagggagaagctgatatcctggccgcgctgaagaagctccaggaccagaggcagtacattgtggctgagtttgagcagggtcatcagttcctgagggagcgggaggaacacctgctggaacagctggcgaagctggagcaggagctcacggagggcagggagaagttcaagagccggggcgtcggggagcttgcccggctggccctggtcatctccgaactggagggcaaggcgcagcagc

SEQ ID NO: 3425 - DNA, 1070 bp, Homo sapiens
  source 1..1070: mol_type = genomic DNA
acgccttgacagcggctttcaacccccacctcagcccagcaattcgtttggagcatgtgaacaccttgagccttgatgagttccagtatgtggtatattatgcagagcattcagagcaaatactctctctccgagcgcttaatccgaacaattgctgccatccgttccttcccacatgataatgtagaggacctcatcagagggggagcagatgtgaactgcactcatggcacactgaagcccttgcactgtgcctgtatggtgtcagatgctgactgtgtggagttacttctggaaaaaggagccgaggtgaatgccctggatgggtataaccgaacagccctccactatgcagcagagaaagatgaggcttgtgtggaggtcctattggagtatggtgcaaaccccaatgccctggattacaacaatgatacaccgctcagctgggctgccatgaagggaaatcttgagagtgtcagcatccttctggattatggcgcagaggtcagagtcatcaacctaataggccagacacccatctcccgcctggtggctctgctagtcaggggacttggaacagagaaagaggactcttgctttgagctcctccacagagctgttggacactttgaattgaggaaaaatggcaccatgccacgagaggtggccagagacccgcagctatgtgaaaaactgactgttctgtgctcagctccaggaactctaaaaacactcgctcgctatgccgtgcgccgtagcctgggactccagtatctccccgatgcagtgaagggccttccactgccagcttctttgaaggaatacctgttacttttagaatagccggagaagatgtttgcaccatcgtgcaggcagctctgggtgaggttgtccctgcagtactccttgtcacagaaaacagaaaaacagttgttcctgttgtgtggtttatagatttcgaagcaacatgtcacaacaataacctccatagcacctccccttcccaaaccaaacaacccaacaaaaaaaatccctcacttttgttttctgtttattgcttacctggcttt

SEQ ID NO: 3426 - DNA, 582 bp, Homo sapiens
  source 1..582: mol_type = genomic DNA
gagcctgttcagccccactggttttactgcaaggaggtagaatacaaacaactgtggatgccttttagtgtgttcgactctttgaatcttgaagaaatctataattcagttcagccagatccggagagcgtggttcttggcacggatggagggcgctacgatgtttacctctatgaccgaataaggaaggctgcctactgggaagaggagccagccgaagtgagacgctgtacttggttttacaagggggacacagatagtcgatttattccctatactgaggagttcagtgaaaaactagaggttattgttcagttccagccctcctcagtgccagatgaatggggcaccacgcaagatggacagacaaggcccagggttgtaaagcgtggaattgatgataaccttgatgaaattcccgacggggagatgcctcaagttgaccatttggtgtttgtggtgcatggcattggacctgtgtgtgacttacgctttaggagcattattgagtgtgtggatgattttagggtggtttctctcaaattgctgcggacacatttcaagaaatctttagatgacggg

SEQ ID NO: 3427 - DNA, 1103 bp, Homo sapiens
  source 1..1103: mol_type = genomic DNA
cgcggctccagggccacgttccagggtcgggtttggtggattcctcagtccctgccgccgcggggcgccctgggatagcggcggggcctcctgaacagatctcggcccctttccaaacactcctgatgcctcatttgcctctcgcttcttttcgaccaccattttgggggctgaggcactcacggggcctccccaggtttcactccgtttctacacagtcggagccccatggatctcccatctcccggaggaaccgtgaagccaaacagaagcgcctgcgagagaagcaggctactctggaggctgagatagcaggggagagcaagtcacctgcagaatccattaaggcctggaggcctaaggagttagtattgtatgaaatccctacgaaacccggtgaaaagaaagatgtctctgggcccctgcctcctgcatacagcccccgatatgttgaggctgcctggtacccgtggtgggtacgagagggcttcttcaaaccagaatatcaggcccggctgccccaagctacaggggagaccttttccatgtgtatcccacctcccaatgtcactggctccctgcacattggccacgcactcacggtggccatacaggatgccctcgtgcgctggcaccggatgcgtggggatcaagtgctgtgggtccctggttcagatcatgcaggaattgctacacaagctgtggtggagaaacaactgtggaaggaacggggagtgaggagacatgagctgagccgggaggccttccttagggaggtgtggcagtggaaggaggcgaaaggtggagagatctgtgagcagctgcgagctctgggtgcctccctggactgggatcgagagtgttttaccatggatgttggctcctcagtggctgtgactgaagcttttgtgcggctctacaaggcggggttgctgtaccggaaccatcagcttgtcaactggtcatgtgctttaagatcagccatctcggacattgaggtggagaaccggcccctgcctggccacacacagcttcgactgcctggctgccccacccccgtgtcttttggcctcctattttctgttgccttccccgtggatgga

SEQ ID NO: 3428 - DNA, 1397 bp, Homo sapiens
  source 1..1397: mol_type = genomic DNA
agtggcgctagcggcggacccggctgggcagttccttccccagaaggagagattcctctgccatggagtcctacgatgtgatcgccaaccagcctgtcgtgatcgacaactgtgggccgacccaagcacgttcgtgtcatggcaggagcccttgaaggcgacatcttcattggccccaaagctgaggagcaccgagggctgctttcaatccgctatcccatggagcatggcatcgtcaaggattggaacgacatggaacgcatttggcaatatgtctattctaaggaccagctgcagactttctcagaggagcatcctgtgctcctgactgaggcgcctttaaacccacgaaaaaaccgggaacgagctgccgaagttttcttcgagaccttcaatgtgcccgctcttttcatctccatgcaagctgtactcagcctttacgctacaggcaggaccacaggggtggtgctggattctggggatggagtcacccatgctgtgcccatctatgagggctttgccatgccccactccatcatgcgcatcgacatcgcgggccgggacgtctctcgcttcctgcgcctctacctgcgtaaggagggctacgacttccactcatcctctgagtttgagattgtcaaggccataaaagaaagagcctgttacctatccataaacccccaaaaggatgagacgctagagacagagaaagctcagtactacctgcctgatggcagcaccattgagattggtccttcccgattccgggcccctgagttgctcttcaggccagatttgattggagaggagagtgaaggcatccacgaggtcctggtgttcgccattcagaagtcagacatggacctgcggcgcacgcttttctctaacattgtcctctcaggaggctctaccctgttcaaaggttttggtgacaggctcctgagtgaagtgaagaaactagctccaaaagatgtgaagatcaggatatctgcacctcaggagagactgtattccacgtggattgggggctccatccttgcctccctggacacctttaagaagatgtgggtctccaaaaaggaatatgaggaagacggtgcccgatccatccacagaaaaaccttctaatgtcgggacatcatcttcacctctctctgaagttaactccactttaaaactcgctttcttgagtcggagtgtttgcgaggaactgcctgtgtgtgagtgcgtgtgtggatatgagtgtgtgtgcacatgcgagtgccgtgtggccctgggaccctgggcccagaaaggacgatgaactacctgcagtggtgatggcctgaggcctggggttgaccactaactggctcctgacagggaagagcgctggcagaggctgtgctccctcctca

SEQ ID NO: 3429 - DNA, 665 bp, Homo sapiens
  source 1..665: mol_type = genomic DNA
gtgaaggtgagcgcctgggtcggcccgcgggcttcctccggccgcgctcggattgagggccgggcggaggtgccgcccttgagagcagccggttgtcgatgccgctcccctcagggacggctccgggcgggaagctctcgaggctcctcccgctgcgggtcggcgctcgccctcgctctcctcgccctccgccccggccccggccccgcgcccgccatggagaagactgagctgatccagaaggccaagctggccgagcaggccgagcgctacgacgacatggccacctgcatgaaggcagtgaccgagcagggcgccgagctgtccaacgaggagcgcaacctgctctccgtggcctacaagaacgtggtcgggggccgcaggtccgcctggagggtcatctctagcatcgagcagaagaccgacacctccgacaagaagttgcagctgattaaggactatcgggagaaagtggagtccgagctgagatccatctgcaccacggtgctggaattgttggataaatatttaatagccaatgcaactaatccagagagtaaggtcttctatctgaaaatgaagggtgattacttccggtaccttgctgaagttgcgtgtggtgatgatcgaaaacaaacgatagataattcccaaggagcttacca

SEQ ID NO: 3430 - DNA, 1323 bp, Homo sapiens
  source 1..1323: mol_type = genomic DNA
agatacttgccttcatgttttggggctagtccctagttcctacttgtcagcccgggtgtaactccacaccacccctgtggctctccaccctttcagatcaagatgctgtcagatcggaaacgggagctggagcatcgtctcagcgctactttagaggaaaatgacctgctccaagggaccgtggaggagctacaggaccgggtgctaatcctggagaggcagggccatgacaaggacctacagctgcaccaaagccagctggagcttcaggaggtgcgtctctcctgccgacagctgcaggtgaaggtggaagaactcactgaggagaggagtctgcagagctctgccgccaccagcacatccctcctgtcagagatcgagcagagcatggaggctgaggagctggagcaggagcgagagcaggtgacactgctgagtgtggagatgactgccctaaaagaggagagagaccgactcagagtcacttctgaggacaaggagccaaaggagcagcttcagaaggccatcagggaccgcgacgaggccattgcaaagaagaatgctgtggagctggaacttgccaagtgcaggatggatatgatgtctctgaacagccagttgctggatgccattcagcagaaactgaacctctcgcagcagctggaagcttggcaggatgacatgcacagggtcattgaccggcagctgatggacacgcacctgaaagaacggagccagccggctgctgccctctgcaggggccacagcgctgggcggggggatgagcccagcatcgctgaaggcaaacgactcttctcattcttcaggaaaatttaagttgggaggagtcaggccaccaaagatgggtggactggaggcagctggaaaggcggtgcaggcaaggcctcccctgcagcttgcacctcagcagctgccctgcccctcatgctagggccccatgggtccgggagggcctgctccctttcgtcggtggggatggagacctagaggtgggggcctgccttggccactgaaggcttcccttggcccaccgcctggccaagcccacgcctgggcttctccaggaccacgtgcttgagcagggttaggccacctcccagaggggccccttggtgttgggctttgcagctcacacccaacagatcgcagcccacccccaggcactgctgcctccttgattttagcaaatggggaacagaaggaatggaggcccttctctgcatgcctcaggaggcctgagccccaggggcctagacctgtgggggcagcgggccaggcctgagcctccattccttccccagc

SEQ ID NO: 3431 - DNA, 711 bp, Homo sapiens
  source 1..711: mol_type = genomic DNA
gcatatgctctccaaagtgggaatgtgggattttgacattttcttgtttgatcgcttgacaaatggaaacagcctggtaacactgttgtgccacctcttcaatacccatggactcattcaccatttcaagttagatatggtgaccttacaccgatttttagtcatggttcaagaagattaccacagccaaaacccgtatcacaatgctgttcacgcagccgacgtcacccaggccatgcactgctacctgaaagagccaaagcttgccagcttcctcacgcctctggacatcatgcttggactgctggctgcagcagcacacgatgtggaccacccaggggtgaaccagccatttttgataaaaactaaccaccatcttgcaaacctatatcaggtaagggagcccaacctggagccagccacagtatggtcaatcgccttaggcccggtgctcaagcctgaatcttgcccatggagaaagccttgttttagggtcctagaagttcaaagacgaatgaaacacaatctctgccctcaaaaatttgttcaaactcagatgctcaaaatgagcaaaatccaagcaaacttaatcccagtttgaaagaggtttgaggaattagctcatgtcgatacaattgttttttaaaatctctaaagagtaaatacttgtgctgttctttgtatccaaagaccttactagaataaagtgag

SEQ ID NO: 3432 - DNA, 1770 bp, Homo sapiens
  source 1..1770: mol_type = genomic DNA
atggccatggccccaagcccttccctggtgcaggtgtacaccagccccgcggctgtggccgtgtgggaatggcaggacgggctgggcacctggcacccctacagtgccaccgtctgcagcttcatcgagcagcagtttgtccagcagaagggccaacgttttgggcttgggagcctggcccacagcatccccttgggccaggcagacccctcgctggccccttacattattgacctccccagctggacccagttccgccaggacaccggcaccatgcgggctgtgcggagacacctgttcccccagcactcagcccctggccgaggtgtcgtctgggagtggctgagcgacgatggctcctggactgcctatgaagccagcgtctgtgactatctggagcagcaggtggccaggggcaaccagctcgtggacttggcccccctggggtacaactacactgtcaactacaccacccacacgcagaccaacaagacttccagcttctgccgcagcgtgcggcgccaagcagggccgccttacccggtgaccaccatcatcgctccgccgggccacacaggcgtcgcctgctcttgccaccagtgcctcagtggcagcagaactggccccgtgtcaggccgctaccgccactccatgaccaacctccctgcataccccgtcccccagcaccccccacacaggaccgcttctgtgtttgggacccaccaggcctttgcaccgtacaacaaaccctcactctccggggcccggtctgcgcccaggctgaacaccaccaacgcctggggcgcagctcctccttccctggggagccagcccctctaccgctccagcctctcccacctgggaccgcagcacctgcccccaggatcctccacctccggtgcagtcagtgcctccctccccagcggtccctcaagcagcccagggagcgtccctgccactgtgcccatgcagatgccaaagcccagcagagtccagcaggcgctcgcaggagcgaccccgaagccagagccagagccagagcaggtcataaaaaactacacggaagagctgaaagtgcccccagatgaggactgcatcatctgcatggagaagctgtccacagcgtctggatacagcgatgtgactgacagcaaggcaatcgggtccctagctgtgggccacctcaccaagtgcagccatgccttccacctgctgtgcctcctggccatgtactgcaacggcaataaggatggaagtctgcagtgtccctcctgcaaaaccatctatggagagaagacggggacccagccccagggaaagatggaggtattacggttccagatgtcgctccccggccacgaggactgcgggaccatcctcatagtttacagcattccccatggtatccagggccctgagcaccccaatcccggaaagccgttcactgccagagggtttccccgccagtgctaccttccagacaacgcccagggccgcaaggtcctagagctcctgaaggtggcctggaagaggcggctcatcttcacagtgggcacgtccagcaccacgggtgagacggacaccgtggtatggaacgagatccaccacaagacagagatggaccgcaacattacgggccacggctatcccgaccccaactacctgcagaacgtgctggctgagctggctgcccagggggtgaccgaggactgcctggagcagcagtgacctcgcaccccagcacgcccgcctctggtggccaccccgctg

SEQ ID NO: 3433 - DNA, 5073 bp, Homo sapiens
  source 1..5073: mol_type = genomic DNA
cgcgcacgcagggctagcctcgcccaggcctcctccctcacgccggccgcaggacgggcgcgcacgccaagtgacgctccgaggaggaagcgcagcccccttcccctccctcgctgcccctggcccagcgggagccccccctccccccagtgcgcctgtgcggaggccctcttgattatgtgtgccctctccgggcgcccgcgttagcggccgggtggaggtggggagggaagacgctgaggaggaggaggaggcggaggaggcggtggaggggaggtggggggaatcagcaaggacatggctcctgactcctgtgcggaacgtgagtgactgagcggcaaagcccgaatggtctctagcgaccggcccgtgtcactggaggacgaggtctcccatagtatgaaggagatgattggaggctgttgcgtttgctcagacgagagaggctgggccgagaacccgctggtttattgcgacgggcacggctgcagcgtcgcggtgcatcaagcttgctatggcattgttcaagtacccactggaccgtggttttgcaggaaatgtgaatctcaggagagagcagccagagtgagatgtgaactttgtccccataaggatggagctttaaaaagaacagataatgggggttgggcccatgtggtttgtgccctgtatattccagaggtacaatttgccaatgtttccacaatggaaccaattgttttacagtctgttccgcatgatcgttataataagacttgctacatttgtgatgaacaaggaagagaaagcaaagcagccactggtgcttgcatgacatgtaataaacatggatgtcgacaggctttccatgtaacatgcgctcagtttgccggactgctttgtgaagaagaaggtaatggtgccgataatgtccaatactgtggctactgtaaataccattttagtaagctgaaaaagagcaaacggggatctaataggtcatatgatcaaagtttaagtgattcttcctctcactctcaggataaacatcatgagaaagagaaaaaaaaatataaagagaaggacaaacacaaacagaaacacaagaagcagccagaaccatcacctgcattggttccatccttgactgttactacagaaaaaacttatacaagcactagcaacaactctatatctggatcattgaagcgcttggaagatactactgcacgatttacaaatgcaaatttccaggaagtctctgcacacacctctagtggaaaagatgtttcagagactagagggtcagagggcaaagggaagaaatcttcagctcacagctcaggtcaaaggggaagaaagcctggtggtggaagaaatccaggaacaactgtgtcagcagctagcccttttcctcaaggcagtttttcaggaactccaggcagtgtaaagtcatcttctggaagttcagtgcagtctccccaggatttcctgagctttacagactcagatctgcgtaatgacagttactctcactcccaacagtcatcagcaaccaaagatgtacataaaggagagtctggaagccaggaagggggggtaaatagttttagtaccttaattggcctcccttcaacctcagctgttacttcacagcctaaaagctttgaaaattcacctggagatttgggtaattccagccttcctacagcaggatataagcgggctcaaacttctggcatagaagaagaaactgtaaaggaaaagaaaaggaaaggaaataaacaaagtaagcatgggcctggcagacccaaaggaaacaaaaatcaagagaatgtttctcatctctcagtttcttctgcttcaccaacatcatctgtagcatcagctgcaggaagcataacaagctctagtctgcagaaatctcctacattgctcaggaatggaagtttacagagcctcagtgttggctcatctccagttggttcagaaatttccatgcagtatcggcatgatggagcttgcccaacaactacgttctcagagttgctgaatgcaatacacaacggtatttataacagcaatgatgtagcagtatcgtttccaaatgtagtatctggctcgggatctagtactcctgtctccagctctcacttacctcagcagtcttctgggcatttgcaacaagtaggagcgctctctccctcagctgtgtcatctgcagcccctgctgttgctacaactcaggcaaatactctatctggatcttctctcagtcaggcaccatctcatatgtatggcaatagatcaaattcatcaatggcagctcttatagctcagtctgaaaacaatcaaacagatcaagatcttggagacaatagccgcaacctagttggcagaggaagctcaccccgaggaagtctctcgccacgatcccctgtaagcagcttacagattcgctatgatcaaccaggcaacagcagtttggaaaatctgcctccagtagcagccagcatagaacagcttttggagaggcagtggagtgaaggacagcaatttttactagaacagggtactcctagtgacattttaggaatgctgaagtcattacaccaacttcaagttgaaaaccgaagattagaggaacaaattaaaaacttgactgccaaaaaggaacggcttcagttattgaatgcacagctttcagtgccttttccaacaataacagcaaatcctagtccgtctcatcaaatacacacattttcagcacagactgctcctactactgattccttgaacagcagtaagagccctcatataggaaacagctttttacctgataattctcttcctgtattaaatcaggacttaacctccagtggacaaagtaccagcagctcatcagctctttctaccccacctcctgctgggcagagtccggctcaacaaggctcaggagtgagtggagttcagcaggtcaatggcgtgacagtgggggcactagctagtggaatgcagcctgtaacttccaccattcctgccgtgtctgcagtgggtggaataattggagctttgccaggtaaccaactggcaattaatggcattgtaggagctttaaatggggttatgcagactcctgtcacaatgtcccagaaccctacccctctcacccacacaaccgtaccacctaatgcaacacatccaatgccagctacactgactaacagtgcctcaggactaggattactttctgaccagcaacgacaaatacttattcatcaacagcagtttcagcagttgttaaattctcaacagctcacaccagtacacaggcacccccacttcacacagctaccaccaacccatttctcaccatccatggagataatgcaagtcagaaagtagcaagacttagtgataaaactgggcctgtagctcaagagaaaagttgacacctgagaaacatctagaaattgcctatcctgctgttctagcacttcatctggctgcctttgcagtccttttactacagctatgaagaaacgcaacaagaaactcaatgcacaacaaaggattaattgctgcaaggacattcttgtaaggctttgattagttttcttgttgctttgttgcactgaaatggaattcccatgcccctaccccttaccccagttttttgaacatggaaagaaaatttaataactttttaaagtgacataatttacatgcaatatgtttatcaactcaagaatttaatatagttggtacacaactagttttgtttataaattggagatgcaaatagcaaaactaaatacttgctccatttacaaactacttgattttattgtacaagttgaaatatgctcttttgtttgggttacagtatgcttgctctaagtcaaattccaaggaactaatttcttctcctggagttgcattgattcagtattacaaatatatagcacatcacctgggacttggcaatctttgttaaaaaaaaatttcctttctaatgggatttggccaattttggtaatgaagttaggatggtaatgtctgcatctgctaaaggtaattttcttttgagaattgctttctttagtgttaagacctactcatattttgaagaaatcttgagttaagtgagttctgaggctgctgggggaaccagatcaattcaaagctaaatacttctttcagaaaggggccactgtggaaagtgctggtggggtttgcccttgatcaagtgcctccattgtgctgcaagggctgtagacagcagggtgggacagtcagtcctccgagcagcaggaatcatcccgtcacctgcagccttcccatgcttccgcctttattcagaactttctgtgccactgtagatagctcaggcaaaactattacctgggtatttatccactaatgagtcacaagaaaaggagtggatttggtaagaatagagatttgttttatttaaaccacttcccattactgaccattaaaagctcaccactagagttcctgaaacaggtgaaacctgtatgacagcccttccactttggggagccacgcttttgatgtgacagtaccgcagagtgattcccccactgaggatgtcatcatcaaactcttctttggtgtgtgaattattagtggaaaagacccagctgtaattagacctccactgtgtacttagctggaagaacatgttaattctgcaatatgtttcttggttaaacattgcacagttcttacctcatttctgtaaataaagttttgtgaatctgttttgtattgtgacaaattcataagataacattgatattttgatttgtaatatttctaattggtagatttaattgaaaagtaaaattaatttatttttatatgttcaggggaattttaaagtcaaatcttttgtagataatttaaaaaatcagtgtggtttattttacttatttaacccactggttgttattctgtaacagtttgtataaatggtaaattttgaatgtgttgttattttacctagatgtaaaattccacatgtattaaaatgtacaaaatgttttgttaataaaatttaataatgtt

SEQ ID NO: 3434 - DNA, 3858 bp, Homo sapiens
  source 1..3858: mol_type = genomic DNA
ggaggtttcactgcacaacaagatggcggcggcggcggcgagcggagctggcggggctgccggggccgggactgggggagccgggcccgcgggccgcctgctgcctccgcccgcgccggggtccccagccgcccccgctgccgtgtcccctgcggccggccagccgcgtcccccagccccggcctcccgcggacccatgcccgcccgtatcggctactacgagatcgaccgcaccatcggcaagggcaacttcgcggtggtcaagcgggccacgcacctcgtcaccaaggccaaggttgctatcaagatcatagataagacccagctggatgaagaaaacttgaagaagattttccgggaagttcaaattatgaagatgctttgccacccccatatcatcaggctctaccaggttatggagacagaacggatgatttatctggtgacagaatatgctagtggaggggaaatatttgaccacctggtggcccatggtagaatggcagaaaaggaggcacgtcggaagttcaaacagatcgtcacagctgtctatttttgtcactgtcggaacattgttcatcgtgatttaaaagctgaaaatttacttctggatgccaatctgaatatcaaaatagcagattttggtttcagtaacctcttcactcctgggcagctgctgaagacctggtgtggcagccctccctatgctgcacctgaactctttgaaggaaaagaatatgatgggcccaaagtggacatctggagccttggagttgtcctctacgtgcttgtgtgcggtgccctgccatttgatggaagcacactgcagaatctgcgggcccgcgtgctgagtggaaagttccgcatcccattttttatgtccacagaatgtgagcatttgatccgccatatgttggtgttagatcccaataagcgcctctccatggagcagatctgcaagcacaagtggatgaagctaggggacgccgatcccaactttgacaggttaatagctgaatgccaacaactaaaggaagaaagacaggtggaccccctgaatgaggatgtcctcttggccatggaggacatgggactggacaaagaacagacactgcaggcggagcaggcaggtactgctatgaacatcagcgttccccaggtgcagctgatcaacccagagaaccaaattgtggagccggatgggacactgaatttggacagtgatgagggtgaagagccttcccctgaagcattggtgcgctatttgtcaatgaggaggcacacagtgggtgtggctgacccacgcacggaagttatggaagatctgcagaagctcctacctggctttcctggagtcaacccccaggctccattcctgcaggtggcccctaatgtgaacttcatgcacaacctgttgcctatgcaaaacttgcaaccaaccgggcaacttgagtacaaggagcagtctctcctacagccgcccacgctacagctgttgaatggaatgggcccccttggccggagggcatcagatggaggagccaacatccaactgcatgcccagcagctgctgaagcgcccacggggaccctctccgcttgtcaccatgacaccagcagtgccagcagttacccctgtggacgaggagagctcagacggggagccagaccaggaagctgtgcagaggtacttggcaaataggtccaaaagacatacactggccatgaccaaccctacagctgagatcccaccggacctacaacggcagctaggacagcagcctttccgttcccgggtctggcctcctcacctggtacctgatcagcatcgctctacctacaaggactccaacactctgcacctccctacggagcgtttctcccctgtgcgccggttctcagatggggctgcgagcatccaggccttcaaagctcacctggaaaaaatgggcaacaacagcagcatcaaacagctgcagcaggagtgtgagcagctgcagaagatgtacggggggcagattgatgaaagaaccctggagaagacccagcagcagcatatgttataccagcaggagcagcaccatcaaattctccagcaacaaattcaagactctatctgtcctcctcagccatctccacctcttcaggctgcatgtgaaaatcagccagccctccttacccatcagctccagaggttaaggattcagccttcaagcccaccccccaaccaccccaacaaccatctcttcaggcagcccagtaatagtcctccccccatgagcagtgccatgatccagcctcacggggctgcatcttcttcccagtttcaaggcttaccttcccgcagtgcaatctttcagcagcaacctgagaactgttcctctcctcccaacgtggcactaacctgcttgggtatgcagcagcctgctcagtcacagcaggtcaccatccaagtccaagagcctgttgacatgctcagcaacatgccaggcacagctgcaggctccagtgggcgcggcatctccatcagccccagtgctggtcagatgcagatgcagcaccgtaccaacctgatggccaccctcagctatgggcaccgtcccttgtccaagcagctgagtgctgacagtgcagaggctcacagtgcacatcagcagccgccacactataccacgtcggcactacagcaggccctgctgtctcccacgccgccagactatacaagacaccagcaggtaccccacatccttcaaggactgctttctccccggcattcgctcaccggccactcggacatccggctgcccccaacagagtttgcacagctcattaaaaggcagcagcaacaacggcagcagcagcagcaacagcagcaacagcaagaataccaggaactgttcaggcacatgaaccaaggggatgcggggagtctggctcccagccttgggggacagagcatgacagagcgccaggctttatcttatcaaaatgctgactcttatcaccatcacaccagcccccagcatctgctacaaatcagggcacaagaatgtgtctcacaggcttcctcacccaccccgccccacgggtatgctcaccagccggcactgatgcattcagagagcatggaggaggactgctcgtgtgagggggccaaggatggcttccaagacagtaagagttcaagtacattgaccaaaggttgccatgacagccctctgctcttgagtaccggtggacctggggaccctgaatctttgctaggaactgtgagtcatgcccaagaattggggatacatccctatggtcatcagccaactgctgcattcagtaaaaataaggtgcccagcagagagcctgtcatagggaactgcatggatagaagttctccaggacaagcagtggagctgccggatcacaatgggctcgggtacccagcacgcccctccgtccatgagcaccacaggccccgggccctccagagacaccacacgatccagaacagcgacgatgcttatgtacagctggataacttgccaggaatgagtctcgtggctgggaaagcacttagctctgcccggatgtcggatgcagttctcagtcagtcttcgctcatgggcagccagcagtttcaggatggggaaaatgaggaatgtggggcaagcctgggaggtcatgagcacccagacctgagtgatggcagccagcatttaaactcctcttgctatccatctacgtgtattacagacattctgctcagctacaagcaccccgaagtctccttcagcatggagcaggcaggcgtgtaacaagaaacagagagttttgtgtacagcttgggaatgaaaaggttgattgt

SEQ ID NO: 3435 - DNA, 1623 bp, Homo sapiens
  source 1..1623: mol_type = genomic DNA
cgtgtgcagacccgcgtgtggcgcaggcaaggaccctcaaaataaacagcctctaccttgcgagccgtcttccccaggcctgcgtccgagtctccgccgctgcgggcccgctccgacgcggaagatctgactgcagccatgagcagcaatgagtgcttcaagtgtggacgatctggccactgggcccgggaatgtcctactggtggaggccgtggtcgtggaatgagaagccgtggcagaggtttccagtttgtttcctcgtctcttccagacatttgttatcgctgtggtgagtctggtcatcttgccaaggattgtgatcttcaggaggatgttgaagcctgctataactgcggtagaggtggccacattgccaaggactgcaaggagcccaagagagagcgagagcaatgctgctacaactgtggcaaaccaggccatctggctcgtgactgcgaccatgcagatgagcagaaatgctattcttgtggagaattcggacacattcaaaaagactgcaccaaagtgaagtgctataggtgtggtgaaactggtcatgtagccatcaactgcagcaagacaagtgaagtcaactgttaccgctgtggcgagtcagggcaccttgcacgggaatgcacaattgaggctacagcctaattattttcctttgtcgcccctcctttttctgattgatggttgtattattttctctgaatcctcttcactggccaaaggttggcagatagaggcaactcccaggccagtgagctttacttgccgtgtaaaaggaggaaaggggtggaaaaaaaccgactttctgcatttaactacaaaaaaagtttatgtttagtttggtagaggtgttatgtataatgctttgttaaagaaccccctttccgtgccactggtgaatagggattgatgaatgggaagagttgagtcagaccagtaagcccgtcctgggttccttgaacatgttcccatgtaggaggtaaaaccaattctggaagtgtctatgaacttccataaataactttaattttagtataatgatggtcttggattgtctgacctcagtagctattaaataacatcaagtaacatctgtatcaggccctacatagaacatacagttgagtgggagtaaacaaaaagataaacatgcgtgttaatggctgttcgagagaaatcggaataaaagcctaaacaggaacaacttcatcacagtgttgatgttggacacatagatggtgatggcaaaggtttagaacacattattttcaaagactaaatctaaaacccagagtaaacatcaatgctcagagttagcataatttggagctattcaggaattgcagagaaatgcattttcacagaaatcaagatgttatttttgtatactatatcacttagacaactgtgtttcatttgctgtaatcagtttttaaaagtcagatggaaagagcaactgaagtcctagaaaatagaaatgtaattttaaactattccaataaagctggaggaggaaggggagtttgactaaagttctttttgtttgtttcaaattttcattaatgtatatagtgcaaaataccatattaaagaggggaatgtggaggactg

SEQ ID NO: 3436 - DNA, 826 bp, Homo sapiens
  source 1..826: mol_type = genomic DNA
tttctctccgctcccgtgagtaacttggctccgggggctccgctcgcctgcccgcacgccgcccgccacccaggaccgcgccgccggcctccgccgctagcaaacccttccgacggccctcgctgcgcaagccgggacgcctctcccccctccgcccccgccgcggaaagttcgagaacttgtcttggacaattgcaaatcaaatgatggaaaaattgagggcttaacagctgaatttgtgaacttagagttcctcagtttaataaatgtaggcttgatctcagtttcaaatctccccaagctgcctaaattgaaaaagcttgaactcagtgaaaatagaatctttggaggtctggacatgttagctgaaaaacttccaaatctcacacatctaaacttaagtggaaataaactgaaagatatcagcaccttggaacctttgaaaaagttagaatgtctgaaaagcctggacctctttaactgtgaggttaccaacctgaatgactaccgagagagtgtcttcaagctcctgccccagcttacctacttggatggctatgaccgagaggaccaggaagcacctgactcagatgccgaggtggatggtgtggatgaagaggaggaggacgaagaaggagaagatgaggaagacgaggacgatgaggatggtgaagaagaggagtttgatgaagaagatgatgaagatgaagatgtagaaggggatgaggacgacgatgaagtcagtgaggaggaagaagaatttggacttgatgaagaagatgaagatgaggatgaggatgaagaggaggaagaaggtgggaaaggt

SEQ ID NO: 3437 - DNA, 606 bp, Homo sapiens
  source 1..606: mol_type = genomic DNA
gactctcgcgagatccctactggctataaaggcagcgccccggagagctcttgcgcgtcttgttcttgcctggtgtcggtgctgataggaagatgtcttcaggaaatgctaaaattgggcaccctgcccccaacttcaaagccacagctgttatgccagatggtcagtttaaagatatcagcctgtctgactacaaaggaaaatatgttgtgttcttcttttaccctcttgacttcacctttgtgtgccccacggagatcattgctttcagtgatagggcagaagaatttaagaaactcaactgccaagtgattggtgcttctgtggattctcacttctgtcatctagcatgggtcaatacacctaagaaacaaggaggactgggacccatgaacattcctttggtatcagacccgaagcgcaccattgctcaggattatggggtcttaaaggctgatgaaggcatctcgttcaggggcctttttatcattgatgataagggtattcttcggcagatcactgtaaatgacctccctgttggccgctctgtggatgagactttgagactagttcaggccttccagttcactgacaaacatggggaag

SEQ ID NO: 3438 - DNA, 429 bp, Homo sapiens
  source 1..429: mol_type = genomic DNA
aaggggctcttgagggctcctgcacccaccagaatgtgcagagaagaggtcccaggtgggagccgagagggggctgagggcagatccccaagagagaagtaattggtgtgagagaggatctcaatttcttcgtgtctaaaatggggaaactgcagcgccacttaccctgcctagggtggacaagtccttcacttctcgccggagtgtgtggaggagcgatgggcagaaccagcacttccctcaggcactagacctgtcacgagtgaacttagttccctcctatactccttcactctaccctaagaacacagatctatttgagatgattgagaagatgcagggaagcaggatggatgaacaacgctgctccttcccgccgcccctcaaaacagaggaggactacattccatacccgagcgtgcacgaggt

SEQ ID NO: 3439 - DNA, 728 bp, Homo sapiens
  source 1..728: mol_type = genomic DNA
aaagcgtggcagcgcaggcgcaagcgcagagagcggaggcggtggtggtggcggccgctggccagtgctggctacagcaaacatcattcaagatgtccagcaaagggagcagcacagatggcagaacagacttagctaatggaagcctgtctagcagtccagaggagatgtctggagctgaagaggggagggagacatcctcaggcattgaagtggaggcctcagacctgagtttgagcttgactggggatgatggtggccccaaccgcaccagcacagaaagtcgaggcacagacacagagagctcaggtgaagataaggactctgacagcatggaggacactggtcattactccattaatgatgaaaatcgagtccatgaccgctcagaggaagaggaagaggaggaagaagaggaggaagaagagcagcctcggcgccgtgtacagcgcaagcgggctaaccgtgaccaggactcatcagatgatgagcgggccctagaggactgggtgtcctcagaaacatcagctctaccccgacctcgctggcaagccctccctgcccttcgggagcgggagctgggttcaagtgcccgctttgtctatgaggcctgtggggcaagagtctttgtgcagcgtttccgcctgcagcatgggcttgagggccatactggttgtgtcaataccctgcactttaaccagcgcggcacctggctggccagtggcagc

SEQ ID NO: 3440 - DNA, 1146 bp, Homo sapiens
  source 1..1146: mol_type = genomic DNA
gggagtttcggaggcggtgaccgtgacgtagaaggtggagaccgcttcaccctgatcagggagtatcggctgcgggtgcgcaaggcgtccaggagtgacctggggctgtggagagcgacccgtggccttgtgtttcaggtacggaggttccggactggacgggcgtcaggaagtcacagacttgtcctctgatgtggccccgcccgccgccgcactaatctcttcggcgtcgtacccgtcggcccagctcgacccgccgcagccccggccccgaccgtggacactgggggtccccgagggcgctgcgacctcctcccgggtgaaatgaaacccgagggcagtcccccttaccgaccccattagagacgtatctgccgtgccaggggtctaggctccagaaacagggagtttaccacctaggatgacttcagtgactagatcagagatcatagatgaaaaaggaccagtgatgtctaagactcatgatcatcaattggaatcaagtctcagtcctgtggaagtgtttgctaaaacatctgcctccctggagatgaatcaaggcgtttcagaggaaagaattcaccttggctctagccctaaaaaagggggaaattgtgatctcagccaccaggaaagacttcagtcgaagtcccttcatttgtctcctcaagaacaatctgccagttatcaagacaggaggcaatcctggcggcgagcaagtatgaaagaaacgaaccggcggaagtcgctgcatcccattcaccagggcatcacagagctcagccggtctatcagtgtcgatttagcagaaagcaaacggcttggctgtctcctgctttccagtttccagttctctattcagaaacttgaacctttcctaagggacactaagggcttcagtcttgaaagttttagagccaaagcatcttctctttctgaagaattgaaacattttgcagacggactggaaactgatggaactctacaaaaatgttttgaagattcaaatggaaaagcatcagatttttctttggaagcatctgtggctgagatgaaggaatacataacaaagttttctttagaacgtcagacttgggatcagctcttgcttcactaccagcaggaggctaaagagatattgtccag

SEQ ID NO: 3441 - DNA, 3007 bp, Homo sapiens; identical to SEQ ID NO: 2738
  source 1..3007: mol_type = genomic DNA

SEQ ID NO: 3442 - DNA, 2947 bp, Homo sapiens
  source 1..2947: mol_type = genomic DNA
agactgagtgctccggggagctgtcagtgtcaggctctgggagagaggaagtgatcgctcccggaggagcgcgagccgagcggccggcgcagcgtgagacagcacatcctgcccgcgccggccccgccaccttcgggagccgcctgcaccaacgctgccgccgcccaggagccgccgccggctcggggagcccagttccgccgctgccgagcgcgtccaggaaaccaacatgtctgacaaaagtgacttaaaagctgagctagagcgcaaaaagcagcgcttagcacagataagagaagagaagaaacggaaggaagaggagaggaaaaagaaagaggctgatatgcagcagaagaaagaacccgttcaggacgactctgatctggatcgcaaacgacgagagacagaggctttgctgcaaagcattggtatctcaccggagccgcctctagtcccaacccctatgtctccctcctcgaaatcagtgagcactcccagtgaagctggaagccaagactcaggcgatctggggccattaacaaggaccctgcagtgggacacagacccctcagtgctccagctgcagtcagactcagaacttggaagaagactgcataaactgggcgtgtcaaaggtcacccaagtggatttcctgccaagggaagtagtgtcctactcaaaggagacccagactcctcttgccacgcatcagtctgaagaggatgaggaagatgaggaaatggtggaatctaaagttggccaggactcagaactggaaaatcaggacaaaaaacaggaagtgaaggaagcccctccaagagagttgacagaggaagaaaaacagcagatccttcattcagaggaatttctcatcttttttgaccggacaatacgggtaattgaaagagccctggctgaagattccgacatcttttttgactacagcggccgagagttagaggaaaaagatggggatgttcaggctggagccaatctttctttcaatcgtcagttctatgatgaacattggtccaagcatcgagtggtcacttgtatggactggtccctccagtaccctgagctgatggtggcttcttacaacaacaatgaagatgctccccatgaaccagatggagtggccttggtttggaacatgaagtttaagaaaaccacaccagaatacgtcttccactgtcagtcctctgtgatgtcggtctgcttcgcccgtttccatcctaacttggtggttggtgggacttactcgggccagattgtcctctgggacaatcgcagtcatcgaaggactccagtgcagcggacacccttatcagctgctgcacacacgcatcccgtgtactgtgtaaatgttgttgggacccagaatgctcataacctcatcactgtctccactgatggcaaaatgtgttcctggagcctggacatgctctcaactccacaggagagcatggagctggtgtacaataagtccaagcctgtcgctgttaccggaatggctttcccaacgggagacgtcaataacttcgtggttggcagtgaggaaggtacagtctacacggcttgtcgtcatggaagcaaagcaggtattggtgaggtctttgaaggtcaccaagggccagtgacaggaattaactgccacatggcagtgggcccaatcgacttttctcacctgtttgtcacatcatcatttgactggactgtcaaactgtggaccaccaagcacaacaagccgctctactcctttgaagacaatgcagactatgtgtacgatgtcatgtggtcccccgtgcatcctgcgctttttgcctgcgtggacgggatggggcgcttggacctctggaacctcaacaatgacaccgaggttccaacagcaagtgtggccattgagggggcatccgccctaaaccgtgttcgttgggcccaagctggcaaagaagttgctgttggggactcggaaggccgtatttgggtctatgacgttggagagcttgcagttccccacaatgatgaatggacccgatttgccaggacccttgtggaaattcgtgctaacagagctgatagcgaggaggaaggcactgttgagttatctgcctagtggaaatgagccacccccactgcagcccccacctttgtgtcctagagctcagcgtctgcagtcaagtctcttgtattcggtgtccattcagtatcagtattgctgtgatattttgggtgccatattgtgccagctttgctccaagtattctaaatgtgtcccatcatgctttccactgacccaaaattcaccacagcatttctatctttatatttctgtctcaaaaatgaagagaagggggttatgggttaagttgctgccttttaactactttgtagctgtatttaatagctggaaacctctggttaaatttgtgcttacatgcactcctggcatagtcctattaaatccatatgaagccagatatgattgggtgcagatgtggtgttcctcatattatggtacagggccaaagacttgagacgtggtgttttacatggtgactcacattatgaatggatttactagaagaacattgctgctccttatttattgtagtgtgctgcatggaacgtatttatttgaaagcattaaaataaatgatcctagagcatgtgcataatgagaggactgtattctctctgctgctgttgaggttatattaagttccacatagcaattacagtatgccagttccactgaagacatgaaatctttagaggtttcttgcagtgaacgaaatgaattttaatgcctattatttctgggtactttaacaatatttcaaatatcattgaccactaatacttctcactgaagctaacacagtctgacaaaagtctatggttcctaaatatgacatcagtgttgccaataaaatgtttcaaacca

SEQ ID NO: 3443 - DNA, 4031 bp, Homo sapiens
  source 1..4031: mol_type = genomic DNA
acaccctcgcggagagagcggttcttgcagcatcctgcgcagcccctgcccagtttggtgcagaggcgtggggggcgggacgcgtctttgccattctgatagcggggaaagcggtgagaatcgaagtgaggagccgccagaggagagctgaggagaggagggggaggtcgacgacctgggccctgggcctctgaaggtctgtttctttctaggttcctgtagagatctgtatgtagctgttcacttggaagttaattaagaaagaacaaaaactattcatttggattcaaggtccatctccactggtggctgtggtggctttggattgttggaagaccatcaccttcagcaggtctgcacttgggaacaatcattctcccccagcccgagcgtgcctctgccctctgtatcattgacagaggctgtatgtttggaaagagaactttgtgactgcagaactgacagttgactctaattcttgctaccaagtttttccccgacccagtgaaagagtgttaagacttcgacctaggacacattgagaaccaaggccaagactggacagggccatataactgggcttcaaccatggctgggactaagaataagacaagagcccaggccaaaactgaaaaaaaggctgctatacaagctaaagctggagcagagagggaggctactggtgttgttaggcctgtagccaagaccagggccaaagcaaaagccaagacagggtctaagacagatgcagtagcagagatgaaggcagtgtctaagaacaaggttgttgctgagacgaaggaaggagctctgtcagagcctaagactctgggcaaagccatgggagatttcactcccaaggctgggaatgagtccaccagctccacatgtaaaaatgaggctggtactgatgcctggttctgggctggggaagaggccactatcaattcctggttctggaatggagaagaggctggtaatagtttcagcactaagaatgataaacctgaaattggtgcccaggtctgtgctgaggagttggaacctgcggctggggccgattgcaaacctaggtcaggggctgaggaggaggaggaagagaatgttattgggaactggttttgggaaggagatgatactagttttgaccctaatcctaaacctgtgagcaggatagttaagcctcagcctgtgtatgaaattaatgaaaaaaataggcccaaggactggtctgaggtaactatctggcccaatgcccctgctgtaactccagctgtgttaggatttagatcccaggcaccatctgaggcaagccctccttcatatattgttctggcctccgctgaagaaaatgcctgttctttgcctgtggcaacagcttgccgcccttctaggaacactcgctcatgctcacagcctatccctgagtgtcgttttgattctgacccctgcatccagaccatagatgagattagacgtcaaatcaggatcagggaggtaaatgggattaagccatttgcttgtccttgcaaaatggaatgctatatggattctgaggaatttgaaaaacttgttagcttacttaagtcaactactgatcctcttattcataaaatagcacggattgcaatgggtgtccataatgttcacccatttgcccaagagtttattaacgaagtaggtgtagtgacacttattgaaagcttgctcagttttccttcccctgaaatgagaaaaaagactgtaattactctgaatcctccttctggggatgaaagacaacgcaaaattgaattacatgttaagcatatgtgtaaagaaaccatgtcatttcctttgaactcaccgggacagcaatctggattaaagatactaggacaactgactactgattttgtccatcactacattgttgccaattacttttcagagcttttccatttgctgtcctcaggaaattgcaaaaccagaaatcttgttttgaaactacttttaaatatgtctgaaaatccaactgcagccagagacatgatcaatatgaaggcattggcagcattaaaactcatctttaaccagaaagaggcaaaagccaatcttgttagtggtgtggccatatttattaacataaaggagcatatcagaaaaggctcaattgtagttgttgatcacttgagttataatacactcatggccattttcagggaagttaaagagattattgaaacaatgtaaaatgagccagagatagaacattttaagccatcttcaaactctagcaggctgtacattacagtgtacacattatacactgcatctttaacacagagtcacctgtgacaggctctaggtttgagctagactattttgggggtatcaaatgaatattataccttgggctgaaaatgtttgatttttatcttgtctagattggcatatttttaacattttacttaagatagcaaaccagttcgttttaagtaagctaacttgttcattagtatctgtggcttaaaatggcaaaaaagaaaatatccttgagtttgtaatctagttacagaagtaaggcatacacacacacaaagataacagtacctagagagagagtgtgtgtgagtgtgcgtgtctctgtgtgtgcacgtgcacgctcatggccaaatgtgcgcactctacataaaggaggcaggagttcctataggctatttaatgtaagagaaactatttttctcctgttccagctgtatcagatactcgttccgcaacacagaaatgactcagaatctcagacaaaatgtattatttgttcaattttaattttgctactacattcataactcttaaattgttaggctgtttcatttacatcaaagttatctcacaaaagagaaggcaggaaacgttttgtgagtgcctattctatgtcaaacactgtgttggcaccatattttacaagtttttttcctcttctcacagtgatcttgtgagttagttacttatatttttattagaactcattattctgggtaccctccaatgagaattagagaggttaaataccttttcctagattcccacagcaggaaggtggcatagctgttttgtctgacaccagaacccatctcaccacactgctttacagtcttcctgaaggacattttgaggtgggggggccttcaaagctcagagactggtttgaatggtttaattttgcaatggatcatgtccatgccaggtgttacaattcttaacttcctccaaattcgtgtgtccattagacatttggctacatctggctggaggtcaggagaaaattctgaggtaaatagatggattttatctggcagtgtcgaaaatagtaggagcctaaaactttgttcaatgagtaagatgtagatttggagtcatcagcaggggaaacttgttagatgtcctttgtatctttttctatccatttgtattttttctttcccaaagagctgaaatcattttataccctgaatttaaaaggtaattgcttttttcctccttgcgaaatcataccttaattttttttttttttttttttaccatttatgatttattctcctatgtgtcatatgaaaggccaaggggctttatcttttactagtaggcaagcctgggcatttctgcatttgtgccagctaacactacaaaatagacttaattagagaaatttagacccagaattgcagcttcaacaacacaaaacaggaaagctagaagaggttgctgtgtcaacctacaagatagtgattcttggaagttggtatggaccagaaagcattcccaggacatttaggctatggctgagttctctaagactcagggtgggaattataatccctggtctaagctgatatgaaagtttctatgtgtgaaaatatggagttatatgctttgagattttctgccagttaaactaaaacaagatcatactgtaaatgtttgtaacttgcttccccccactgtatactgtaaacatctttgcatgtcaataaatatgcctctacaac

SEQ ID NO: 3444 - DNA, 833 bp, Homo sapiens
  source 1..833: mol_type = genomic DNA
attctcatccctgtgctcagagctctcaagcacccacgatggccttctcaggccgagcgcgcccctgcattatcccagagaacgaagaaatcccccgagcagcccttaacactgtccacgaggccaatgggaccgaggacgagagggctgtttccaaactgcagcgcaggcacagtgacgtgaaagtctacaaggagttctgtgacttttatgcgaaattcaacatggccaacgccctggccagcgccacttgcgagcgctgcaagggcggctttgcgcccgctgagacgatcgtgaacagtaatggggagctgtaccatgagcagtgtttcgtgtgcgctcagtgcttccagcagttcccagaaggactcttctatgagtttgaaggaagaaagtactgtgaacatgactttcagatgctctttgccccttgctgtcatcagtgtggtgaattcatcattggccgagttatcaaagccatgaataacagctggcatccggagtgcttccgctgtgacctctgccaggaagttctggcagatatcgggtttgtcaagaatgctgggagacacctgtgtcgcccctgtcataatcgtgagaaagccagaggccttgggaaatacatctgccagaaatgccatgctatcatcgatgagcagcctctgatattcaagaacgacccctaccatccagaccatttcaactgcgccaactgcggacaggaaggatctgactgccgatgcacaggagctgaaaggggagctatactgcctgccatgccatgataaaatgggggtccccatctgtggcgcttgccgacggcccatcgaagg

SEQ ID NO: 3445 - DNA, 660 bp, Homo sapiens
  source 1..660: mol_type = genomic DNA
aggtgaggaggtgacccgcgggaatgtgtggggaaggagaatggaatctaattttaatcaagagggagtacctcgaccatcttatgtttttagtgctgacccaattgcaaggccttcagaaataaatttcgatggcattaagcttgatctgtctcatgaattttccttagttgctccaaatactgaggcaaacagtttcgaatctaaagattatctccaggtttgtcttcgaataagaccatttacacagtcagaaaaagaacttgagtctgagggctgtgtgcatattctggattcacagactgttgtgctgaaagagcctcaatgcatccttggtcggttaagtgaaaaaagctcagggcagatggcacagaaattcagtttttccaaggtttttggcccagcaactacacagaaggaattctttcagggttgcattatgcaaccagtaaaagacctcttgaaaggacagagtcgtctgatttttacttacgggctaaccaattcaggaaaaacatatacatttcaagggacagaagaaaatattggcattctgcctcgaactttgaatgtattatttgatagtcttcaagaaagactgtatacaaagatgaaccttaaaccacatagatccagagaatacttaaggttatcatcaga

SEQ ID NO: 3446 - DNA, 1375 bp, Homo sapiens
  source 1..1375: mol_type = genomic DNA
gtacaacttccggctgtaaagatggcggcttcctagtgagtcggcggctgatttagaaggaggttcaggctacggtgagccgaagccacacaggagccatggaagtggcagagcccagcagccccactgaagaggaggaggaggaagaggagcactcggcagagcctcggccccgcactcgctccaatcctgaaggggctgaggaccgggcagtaggggcacaggccagcgtgggcagccgcagcgagggtgagggtgaggccgccagtgctgatgatgggagcctcaacacttcaggagccggccctaagtcctggcaggtgcccccgccagcccctgaggtccaaattcggacaccaagggtcaactgtccagagaaagtgattatctgcctggacctgtcagaggaaatgtcactgccaaagctggagtcgttcaacggctccaaaaccaacgccctcaatgtctcccagaagatgattgagatgttcgtgcggacaaaacacaagatcgacaaaagccacgagtttgcactggtggtggtgaacgatgacacggcctggctgtctggcctgacctccgacccccgcgagctctgtagctgcctctatgatctggagacggcctcctgttccaccttcaacatcagtggggcctcacctgcccgccagcagaaaactgagcttccggtcacagagaacgtgcagacgattcccccgccatatgtggtccgcaccatccttgtctacagccgtccaccttgccagccccagttctccttgacggagcccatgaagaaaatgttccagtgcccatatttcttctttgacgttgtttacatccacaatggcactgaggagaaggaggaggagatgagttggaaggatatgtttgccttcatgggcagcctggataccaagggtaccagctacaagtatgaggtggcactggctgggccagccctggagttgcacaactgcatggcgaaactgttggcccaccccctgcagcggccttgccagagccatgcttcctacagcctgctggaggaggaggatgaagccattgaggttgaggccactgtctgaaccatccctgtacatctgcaccttcttgtgcaaggaagtccttggcctaaagccttggttctcaaactgggttccttgggacctccggggtgggggggttccaggaggcacgtagggtaccttgcagggtcctaggagggaaacccaggattccaggagggatcccaggaactgtgggcacccattttctgtgtctcccagcccatttccactcctagtttgtcatggataatttttgttcttccctgtgtgatttttgccatcaaaataaaaatttgagactcgtt

SEQ ID NO: 3447 - DNA, 3478 bp, Homo sapiens; identical to SEQ ID NO: 986
  source 1..3478: mol_type = genomic DNA

SEQ ID NO: 3448 - DNA, 6344 bp, Homo sapiens
  source 1..6344: mol_type = genomic DNA
atgtctgagagccccaaggacgagggctccgaagagtgtctgtttctgcagcgcctatgggagtggggggcagtggggggaactcagggaagctgcctacaacttgaggccttccccaggctggaggaggaggacagggaaggccgaggggagctgtcctccggctgccatcaccctgatgaggcggccctgccccgggctgtggtctccgcaggggctggcaaccttgcctttgtccagctctctccgtggccaggcctgccatctgcctgcccacactcctccccggcaaagccccttgcaaatgcttgctttggggactggcagctttcgcctctgaatcaggacctagcatcagtactctggggagggggtccaggtgccaaccctgtgagtccctccctgtcccctgacgctgagaaggccctgccaacccccaccatgtgtgaggtgatgcccacaatcaatgagggggaccgcctgggtccccctcatggcgccgatgctgacgccaacttcgagcagctgatggtgaacatgctggacgagcgggagaagttgctggagtctcttcgggagagtcaggagaccttggcggccacacagagccggctccaggatgccatacacgagcgggaccagctccagcgccaccttaactccgccctcccccaggaatttgccaccttaacccgggagctgagcatgtgtcgggagcagcttctagagcgggaggaagagatatcagaactgaaagcagaacggaataacacacggctgcttctggaacatctggagtgcctggtgtcccgccatgaacggtcactgcggatgactgtggtgaagcgccaggcccagtcaccttcgggggtctccagtgaggtggaggtgctgaaggccctcaagtcactgtttgagcaccacaaggccctggatgagaaggtgcgagagcggctccgggcagcgctggagcgagtcaccaccttggaggagcagctggcaggtgcccaccagcaggtgtctgccctgcagcagggggcaggggtgcgggatggagcggcagaagaggaggggactgtggagctggggccgaaacgcctgtggaaggaggatacgggccgggtagaggagctgcaggagctcctggagaagcagaactttgagttgagccaggcccgggagcgactggtcaccctaacaacaaccgtgactgaactcgaggaggacctgggcacggcccgccgggacctcatcaagtcggaggagctgagcagcaagcatcagcgggacctccgggaggctctggcccagaaggaggacatggaagagcggattactacactggagaagcgctacctggctgctcagcgtgaggcaacatccatccatgacctcaatgacaagctggagaatgagctggccaacaaggagtccctgcaccgccagtgtgaggagaaggcccgacacctgcaggagctgctggaggtggcagagcagaagctgcagcagacgatgcgcaaggcagagacgctgccagaggtggaggctgagctggcccagagaattgcagccctcaccaaggctgaagaacggcatggcaacattgaggagcacctgcggcagctggagggacagctggaggagaagaaccaggagctggcacggacggctgtgcaggtgcgccagcgggaaaagatgaatgaggaccacaacaagcggctgtcggacacagtggaccggctgctcagcgagtccaacgagcgtctgcagctccacctgaaggagcgcatggctgccctggaggagaagaacacgttgatccaggagttggagagctcccagcggcagattgaggagcagcaccaccacaagggccgcctgtctgaagagattgagaagctgcgccaagaggtggaccagctgaagggccgaggggggccgtttgtggatggcgtccactccaggtcgcacatgggcagtgcagcagacgtgcggttctccctgggcacaaccacacacgcacccccaggcgtgcatcgccgctactcggcattgagggaagagtctgccaagctggccctgcctttgacagtgaccctgagatctccgacgtggatgaggatgagccagggggtctgctgcaacttagagtaccacagttcagggaccctctgtgggtcatcaggcccgctgccagtgccggagatgattcaggaagagaaggagtccacggagctccgcgcggaggagattgagacgcgtgtaaccagtggcagcatggaagccctaaacctgaagcagctgcgcaagcgtggttccatccccacctctctgacggccctgtccctggccagcgcgtccccaccactcagcggccgctccacacctaagctcacctcccgcagtgctgcccaggacctggaccgaatgggggtcatgaccctgcccagtgacttaagaaagcataggaggaagctgctgtcgccagtgtctcgggaagagaaccgagaggataaagccaccataaaatgtgagacttctcctccttcctcacccaggacgctgcggctagagaagcttggccacccagccctgagccaggaagaaggcaagagtgccttggaggatcagggcagcaaccccagcagcagcaacagcagccaggactccctgcacaagggcgccaagcgcaagggcatcaagtcgtccattggccgcctgtttgggaagaaggagaagggcaggctgatccagctgagtcgggatggagccacaggccatgttctgctaacagactccgaattcagtatgcaggagcctatggtgcctgccaagctggggacccaggcagagaaggaccggcggctaaagaagaaacaccagctgcttgaagatgcccgcaggaaaggaatgccctttgcccagtgggatggtcctactgtggtctcctggttggagctctgggtggggatgcctgcctggtatgtggcagcctgccgggccaacgtcaagagtggtgccatcatgtccgctctgtcggacacagagatccagcgggagatcggcatcagcaatgccctgcaccggctcaagctccgcctggccattcaggagatggtgtcattgaccagcccctctgccccacccacctccaggacttcttctgggaatgtctgggtcacccatgaagagatggaaactctggaaacatctactaaaacagacagtgaggagggcagctgggctcagaccctggcctatggggacatgaaccatgagtggattgggaatgaatggctacccagcctggggctcccgcagtaccgcagctacttcatggagtgcctggtggacgcccgcatgctggaccacctcaccaagaaggacctgcgggtccacctgaagatggtggacagcttccatcgaaccagtcttcagtatggcatcatgtgtctgaagaggctgaattatgaccggaaggagctggagaagaggcgagaggagagccagcatgagatcaaggatgtgttagtctggaccaacgaccaggtggttcattgggtccagtctattgggctccgggactacgcaggaaacctgcatgagagtggtgtgcatggagccttgctggccctggacgagaacttcgaccacaacacactggccctgatcctccagatccccacacagaacacccaggcacgccaagtgatggaaagagagttcaataacctgttggccttgggcacagaccggaagctggatgacggggatgacaaggtgtttcgccgcgcgccctcctggaggaagcgcttccggccgcgggagcaccacggtcgcggcggcatgctcagcgcttccgcggagaccctcccggcgggcttccgtgtgtccaccctggggaccctgcagcccccaccggccccgccaaagaagatcatgcctgaagctcactcccactatctctacggacacatgctctccgccttccgggactagccatggcccccagggctggcttcctccttctgggtttcacaggctcctctggccctgacccctcttgctcgttccccttccttccgcagctcctagtctcgtccgtgactttccggttgccctggatctcagaatatattcgtccaccccctcggcaccccattaccccgagtcccaccgtgtgtccgttgtaagtccggtggatgtggctggggtttcctggtattgtggaggcacccaggttgtccatgcttgggattctgggggaaggagagaagggcagctcagggtggatgtgaagccacccttcctcttctggacccagcctggtctgcactgcaacctccaccaggaccaggatcctgggccacaggctgggatggtccttccaagaaagggtcatttcagacgcagccctgcttgggctattcaatcttagggtgtctatccacgtctggctgtgccaaatggtctggcagctggttttggcatccccagcatcaccactctcccaacccatcaccgtgactgcagttcctgcccccattctcttggggtcagggaggggctgggaagggctactgaaggccccattctcccacaggatggtgaggctgggaggaggaagactgaggtagagattccaggccctggcataagctgaatcccaaatttgagtttgggaagaaccagagagaaatggatccctgagctctgagccaagggtgaggatggggaaactctaagctcccacctaataagaagcataggcagaccagccagagggagagccaatggcctctggtagccttaagcccaaagggcagtgggaatgtcccctgccccaaccatcgggtggagctcctgctgggctatggggaagggaggttgtgcggatcttgactctagggcagaacagatctaaccatgcattgctagctctgctcccagcatcccttccccttctctcctcctctgcctcacttctttagtaatcccaaccctataaaaatgaacctaatgggtggattgaatatacattgagcccaaagtcaagtttggggaaaaggcagactaaggcctcctttctctgacctcccaggaagaaaatagcttctcctacagtgattcatgtcccaggtccaggaaatccaatgttggtgaaggcagccactctcttgcttgtccccaaatcacctaaccctcatccagggctattttggtgggcagggactgcctcctcccggaattcctaagatccgcccagctgccaccattttcattgctttccccagcagcatgatgggaacccaagctgagggatacaggtcctgatttggtaggaatattattcccaagaaatacccgctcctcacctactccctcatcctaccaaggtgcctgaaaatgttcaagacttatgttcagggtgggatgatggaaccgagggcttcatcaaagtgagaggaaaggaaaagcatctggcatgtgtttcttggataggggccagtgcagtgccatcctacaggtggctggagcagctgctttgcaacctgatcaccttgagttctgagcagggactaggcttgcaggtgagataatgggccagggcacccagtccagaaggagcaatggcacctgggcagtgccagggcttaaagcccgctgctccttttcggtagaggagaggcccatcactggtgtggtggggtgggctctcccttaggcttgggcaaggcagccacctgcccttgctctcccttagtgttccctggcctccctgccatcaggttgctgggagtggagatggagggattattgagcagaaaatgagttggatggagataaacagctcccatccctgggtaatggatggtaagatgatggagattcctaagattggtggagttgggcaatgcatagccatctgactccttcagggtgctcttgatgggctggctgtaagggagactcagtcccagcctctcccctctacaactcctgccactgttggccatgtcgtaaggcagcagctgtgccaggatagctgggtccattcagagcaccttgagaagtgttgcagggaggtgttaagaagagaactctgtgcaaacagtgatggaaggctgttgtcttggtgtatcccttgcctcatagtcaatatattttttttttggcgagtcaccagtgacccgagccctccacaccagcctcctgtatctcatcaggtcccttctcagtactgtatttgctcagtgcatcaggaatgggtgtatgggtgtgtgtgggtgggtgtgagtgtgggtgtgtacgtaccaataaacaacctggttttaagacaatgt

SEQ ID NO: 3449 - DNA, 2317 bp, Homo sapiens
  source 1..2317: mol_type = genomic DNA
gctttttgccatcctgggcgctagagggaattgcgctgcaattcattaaattgcctctcagtctcaacagatgacaaaccccttgcccttgcctctgatttaagagaaagccacagatggctccctgcagagcgaggactgggccctcaacatggagatctgcgacatcatcaacgagacggaggaaggtcccaaagatgccctccgagcagtaaagaagagaatcgtggggaataagaacttccacgaggtgatgctggctctcacagtcttagaaacctgtgtcaagaactgcgggcaccgcttccacgtgctggtggccagccaggacttcgtggagagtgtgctggtgaggaccatcctgcccaagaacaacccacccaccatcgtgcatgacaaagtgctcaacctcatccagtcctgggctgacgcgttccgcagctcgcccgatctgacaggtgtggtcaccatctatgaggacctgcggaggaaaggcctggagttccccatgactgacctggacatgctgtcacccatccacacaccccagaggaccgtgttcaactcagagacacaatcaggacaggattctgtgggcactgactccagccagcaagaggactctggccagcatgctgcccctctgcccgccccgcccatactctccggtgacacgcccatagcaccaaccccggaacagattgggaagctgcgcagtgagctggagatggtgagtgggaacgtgagggtgatgtcggagatgctgacggagctggtgcccacccaggccgagcccgcagacctggagctgctgcaggagctcaaccgcacgtgccgagccatgcagcagcgggtcctggagctcatccctcagatcgccaatgagcagctgacagaggagctgctcatcgtcaatgacaatctcaacaatgtgttcctgcgccatgaacggtttgaacggttccgaacaggccagaccaccaaggccccaagtgaggccgagccggcagctgacctgatcgacatgggccctgacccagcagccaccggcaacctctcatcccagctggcaggaatgaacctgggctccagcagtgtgagagctggcctgcagtctctggaggcctctggtcgactggaagatgagtttgacatgtttgcgctgacacggggcagctcactggctgaccaacggaaagaggtaaaatacgaagccccccaagcaacagacggcctggctggagccctggacgcccggcagcagagcactggcgcgatcccagtcacccaggcctgcctcatggaggacatcgagcagtggctgtccactgacgtgggtaatgatgcggaagagcctaagggggtcaccagcgaaggtaaatttgacaaattcctggaagaacgggccaaagccgcggaccgattgcccaacctctccagcccctcagctgaggggcccccgggtcccccatctggcccagcgccccggaagaagacccaggagaaagatgatgacatgctgtttgccttatgagtgtggggtctggcaccctgcagcccaggtccccactgctctcacacccttaggctgggacctccctccctcctctggtgttaaggctgctttgggggtggcttgttacccccttttcctcctctttgaagacggagctgccccagctgtggctgggggtgtggaggcagtgggatgaactgggggacaggtctgcgctgcagtgggatctggctgctctgcctcctttcccaccccagctgaccatgagactttgctgagaagtggaggccccaggacaggctggctggctggctggctgcttgacccagtgtgactctccttcactgagtgataccctgctccgggcccatgccccaaggagcccttcagagcccacactgccagtcgaggcctggctggaggctggccacagtggaaattctgccgagcctcttgtcccttccctgctctgctgcatggggccccatggctttggctggccactgagggtagggtgtggaggtgtggaggccccctgaggagctgcggcggcccaggtacgaagctgcaactctgcgcgcagtgggcgagatctcatcagccccaggctgcaggtgaggcttcaggggatgctggggccccactgcccctccgctgccttgccctccatccttcctctgttccttctggccgggcaccacagcactggggctcacctcttggttgatcctcttgtactgggagaggtgccttttgtatccccaattaaaggtagaaaaccaccctgctagcagcattgtc

SEQ ID NO: 3450 - DNA, 1241 bp, Homo sapiens
  source 1..1241: mol_type = genomic DNA
gggtctggtagattatcctgatgatgatgaagatgatgatgaggatgaagataaggaagatacgttaccattgtcaaagaaagcaaaatttgattcataataatggcaacggcctaggatcagtacctgttgaaaaactggttctccacccctcccccatacaaaatccacaacaaagcgcagtggtctcttgtgaatgactgacacagatcagcctcttacacttgacttctgctcatcaagtgccaattcaatggagcaggaggaggggatatcatatatttaggggaaagacttaagcctttgagctctccagcttggaccacacattgcccttttctcagggaaggaaatggaaacaaaaagccaacagggcaggggttttgtaagtggaactctggattgactggtcagttgctacaatcagaatatgctttcttggaccatgtttgagactcagaagaatgggcctttctgccataattcttcactagtcaagaatgccagcagtttctttgtataaagagacctgcctttaaaatcatacattctgaacattttagtcaagctacaacaggtttggaaaacctctgtgggggaggggcgagtataaagttttcctcttttttaactgttccctttgcccttcaaactgcagatatttttttttttaagtggggacttctccctacttgattaaagattgagtggaattctagatgtggtcatttgtgtcataatttttttgttttattttgtttttgattttttttttcctcccctgagtgtatgcttagttgttgagtatatatatttgggaccattaaaactttttttgatgtaatataacctaacgttgtgctggtacctgttttaccatgtgtaatttttgttctacatcacagttcttaatttgtttagagttttatgaaagatggtatagtttttattgacaaaagcaaagtaatcttacaactatgtgcatacaaaagcaatactattttgtgactaaatattttatattaaaatttacatcagcaactgtcttgagaattcagggaaatagaatggaatttaaaacttcaacagttttgttaaatctagaaacatgaaattagtattccaaagagattctgaaatttcttttcttggggaaatgacggtacattaaatcaaaattgaggatggatgatttaaaaacatttgacttttgaataataaaaagaaaagtgaagagtaag

SEQ ID NO: 3451 - DNA, 765 bp, Homo sapiens
  source 1..765: mol_type = genomic DNA
cggcgggggcgacccgggtgccggcccgtgcgggcgacacgcgcgtctctgcggggctgcgcggggtccggagcggctgggggctctctgccgggcgcggctgggcgcggggggcgctcccggccgggatgagctcaccgcagtcgcgccggggctgagcgccgagcggggcggcggcggggcgggcggcggctcctcggcggctccgcggcgcccgggccgcgcgccgccatgctgggcctggacgcgtgcgagctgggggcgcagctgctggagctgctccggctggcgctgtgcgcccgagtcctcctggctgacaaggagggtgggccgccggcagtggacgaggtgttggatgaggctgtgcccgagtaccgggcgccggggaggaagagcctcttggagatccggcagctggacccggacgacaggagcctggccaagtacaagcgggtgctgctggggcccctgccaccggccgtggacccaagcctgcccaatgtgcaggtgaccaggctgacactcctgtcggaacaggctccggggcccgtcgtcatggatctcacaggggacctggctgttctgaaggaccaggtgtttgtcctgaaggaaggtgttgattacagagtccacagggagattgtcagcggcctcaagtgtctgcaccacacctaccgccggggcctgcgcgtggacaagaccgtctacatggtgggcagctatggcccgagcgcccaggagtatgagtttgtgactccggtggag

SEQ ID NO: 3452 - DNA, 1604 bp, Homo sapiens
  source 1..1604: mol_type = genomic DNA
acatgggaggaaaattcagtttcagctcagctagggatttagtcttactaaagacgcgggaggaagttctccagcgagcagctttccccaacgtggaaaggaccacgcaaggacacctgagctttccaacagatgttcagcgccaggggatccacagttctgggaggtgatctctgatgaacatgccatcgactccgctggcacctaccacggggacagccacctgcagctggagcgcatcaacgtgtactacaacgaggccagcggtggcaggtacgtgccccgcgctgtgctcgtggatctggagccgggcaccatggactctgtgcgctcggggcccttcgggcaggtcttcaggccagacaacttcatcttcggtcagtgtggggccggaaacaactgggccaagggacactacaccgaaggcgcggagctgatggagtcagtgatggacgttgtcagaaaggaggctgagagctgtgactgcctgcagggtttccagctgacccactccctgggtggggggactgggtctgggatgggtacccttctgctcagtaagatccgggaggagtacccagacaggatcataaacacattcagcatcctgccctcgcccaaggtgtcggacaccgtggtggagccctacaacgccaccctctcagtccaccagctcatagaaaacgcagatgagaccttttgcatagataacgaagctctgtatgacatatgttccaagaccctaaaactgcccacacccacctatggtgacctgaaccacctggtgtctgctaccatgagtggggtcaccacgtgcctgcgcttcccgggccagctgaatgctgacctgcggaagctggccgtgaacatggtcccgtttccccggctgcatttcttcatgcccggctttgccccactgaccagccggggcagccagcagtaccgggccttgactgtggctgagcttacccagcagatgtttgatgctaagaacatgatggctgcctgtgacccccgtcacggccgctacctaacggcggctgccattttcaggggtcgcatgcccatgagggaggtggatgaacaaatgttcaacattcaagataagaacagcagttactttgctgactggctccccaacaacgtaaaaacagccgtctgtgacatcccaccccgggggctaaaaatgtcagccaccttcattgggaataatacggccatccaggaactcttcaagcgtgtctcagagcagtttacagcaatgttcaggcgcaaggccttcctccactggtacacgggcgagggcatggatgagatggaattcaccgaggccgagagcaacatgaacgacctggtgtctgaatatcagcaatatcaggatgccacggccgaggaggaggaggatgaggagtatgccgaggaggaggtggcctagaactctccttttctaggtaaaggggggaagcagtgtggattctttactgtgttctgacagccatgtgtcactatacgcttgttaatttgtgtcttcacatctcctgctgcgttttaaagcatttttatagtatgcggttttgactaataaagtattctcacagcatctg

SEQ ID NO: 3453 - DNA, 1299 bp, Homo sapiens
  source 1..1299: mol_type = genomic DNA
gttcgggtcgtggggcggagggaagagcgggcgggcgggaggcgccggcgccagacgcggagggaaggagctacgagtagccgccgagaggccgcggagccagcgacgaccgacccagccgagccgccgccgccgccgcgcccccatggcggccgccaaggacactcatgaggaccatgatacttccactgagaatacagacgagtccaaccatgaccctcagtttgagccaatagtttctcttcctgagcaagaaattaaaacactggaagaagatgaagaggaactttttaaaatgcgggcaaaactgttccgatttgcctctgagaacgatctcccagaatggaaggagcgaggcactggtgacgtcaagctcctgaagcacaagaccctgaagatctgtgccaaccactacatcacgccgatgatggagctgaagcccaacgcaggtagcgaccgtgcctgggtctggaacacccacgctgacttcgccgacgagtgccccaagccagagctgctggccatccgcttcctgaatgctgagagtgagccaagggccctggggacctgcctgacttggggctcacctgcgtggcagcgtggcgggttatgtgcaacaaatgctgttgccttttggggagagggggcagtaactgggaagtgtgtcgtgtgggctgccctgccctgctgtttgggggccatgcccagactgaagccatgagcagcgccttcccccttaaactcaaagctgtgccaagtagctggtgaacagcagtgcccgctcagccgccttgtggctggcactttggtttgctctccaagctccggttcccattagttgttgcggagcctgaggcccaacccagggcttcctcccagtgctgatcctcgtgccaggcttctggttcactggggccaggggcccctcatggttgcctgggtgccagcaggggctgggcagagagatccacaggcccaggctgatctcttccctgctcagaggtctttccagtccagatcgtccaagctgcgtccagtggctcctggaggagtcagtgggtactgtggcctggcgcctggtagctggccgtttggtgccaagtgaccttgtccttgctgtgggcgtggctgccccagcagcctttccaacacggttgggagccgagcctgtggcaaagaggcccatgccccttggttgcctgagggtccgtgctctaccgctctgcccaaatgggtgcagtcagatgaaggagacagaaggccagggccgatgtcaggtggaccagtcctttcttaggt

SEQ ID NO: 3454 - DNA, 582 bp, Homo sapiens
  source 1..582: mol_type = genomic DNA
aacagaccgccgtgagagaggaggggcgccggccgggattcgcggcccggagctcgggaccggagtcaggaatggagagaagggtaatggttttacctcttattgtggaaacctgttgagatcacagagaatatactgacggcataaaagggcagaaccatagcagggtgcgaagtcctcaccagtgaacggagacctctctgaactaaggataccatggccacgtcagccccactacggagcctggaagaggaggtgacctgctccatctgtcttgattacctgcgggaccctgtgaccattgactgtggccacgtcttctgccgcagctgcaccacagacgtccgccccatctcagggagccgccccgtctgcccactctgcaagaagccttttaagaaggagaacatccgacccgtgtggcaactggccagcctggtggagaacattgagcggctgaaggtggacaagggcaggcagccgggagaggtgacccgggagcagcaggatgcaaagttgtgcgagcgacaccgagagaagctgcactactactgtgaggacgacgggaagctgctgtgcgtg

SEQ ID NO: 3455 - DNA, 4208 bp, Homo sapiens
  source 1..4208: mol_type = genomic DNA
gtgggaaacctaacgtcaaagtctacgtaggaagtcgtagggaaggcagcgaggaagacgctggctctcgggtcacgtgatgcgccgggagcgtcatcgcctcctccctccccaagatggcgtccttgctgcagtcggaccgggttctctatctagtccagggagaaaagaaggttcgggccccgctctcgcaactctacttctgccgctattgtagcgaactgcggtcgctggaatgtgtgtctcacgaggtggactcccattattgtcccagttgtttagaaaatatgccatcggctgaagccaaactaaaaaagaatagatgtgccaattgttttgactgtcctggctgcatgcacaccctctctactcgggccacgagcatctccacacagcttccagatgacccagccaagaccaccatgaagaaagcctattacctggcatgtggattttgtcgctggacgtctagagatgtgggcatggcagacaaatctgtagctagtggcggttggcaggaacctgaaaatcctcacacacaacggatgaacaaattgattgaatattaccagcagcttgctcagaaagagaaggttgagcgagatcgcaagaaactggcacgacgtagaaactatatgcctctggctttttcggacaaatatggtcttggaaccaggcttcagcgaccacgagctggtgcatccatcagtacccttgccggactttcccttaaagaaggagaggatcagaaagagataaagattgagccagctcaggctgtggatgaagtggaacctctacctgaagactattatacaagaccagtaaatttaacagaggtaacaacccttcagcagcgtctgttacagcctgacttccagccagtctgtgcttcacagctctatcctcgccacaaacatcttctgatcaaacggtccctgcgctgccgtaaatgtgaacataatttgagcaagccagaatttaacccaacgtcaatcaaattcaaaatccagctggtcgctgtcaattatattccagaagtgagaatcatgtcaattcccaaccttcgctacatgaaggagagccaggtcctcctgactcttacaaatccagttgagaacctcacccatgtgactctcttcgagtgtgaggagggggaccctgatgatatcaacagcactgctaaggtggtggtgcctcccaaagagctcgttttagctggcaaggatgcagcagcagagtacgatgagttggcagaacctcaagactttcaggacgatcctgacattatagccttcagaaaggccaacaaagtgggtattttcatcaaagttacaccacagcgtgaggagggtgaagtgaccgtgtgcttcaagatgaagcatgattttaaaaacctggcagcccccattcgccccattgaagaaagtgaccagggaacagaagtcatctggctcacccagcatgtggaacttagcttgggcccacttcttccttaaaaggttccactggagggcagatcccaaaggacagtatcaccgtaaacctgcgttaaaatgtggaagctgctgcttcattaggccttgtttataacgatgtacccatgcactacggaattctattgctaagaaagtgggagcataggcaaggcattgggaacacagggtagctgctgttgctcttgctctcacccctgttgacaccagtaagtctgtgtctccctcactgaaccctgcacgttgagtaacagcagcataattccatcctaggaaaggggatgggtgttccttggaatggcattgtatttaccacctgagaaactctgtactgtctcttgatctgatctcactaaggatcacaatgtcacagatgaaacttaaatgataacccaaaggtagacctgctgttaatgatccagcattggtcacaatgtaccaactgctttctgcattccgttaaatatcatctaacagtctaaaacatatcccttcattgccataatggctgccattttgccatagatttccatataactgaaaaactgaattgtcactttatctttagtatcatgatgattggaaaaacctgtgaagttgttaaggcactctcatttgccctctttttctaagtgaatacaggacacgtattagttgttcttaatttttttcccagtaaaatatggatcttttaagaagaatttgagaagcaaacaattacatgtcatgtcaagggggtagcagattccattcgttttcaatattgccacaatacccagggattaatgctgccacaggggggcaatctttatttgtcttacttcctaccccttccctgttctgcctctttaactcagttaagttgttctgtttgggacctggaaaagaacccaaagaaaacctgagtggacaggttcatttctggaatgcagaaaacattttaaaggctagatttttagaatattctcaactagcattctttccattgatttgaaggggaaattaactattataatctcttgaatccaaaactggatattaagaactttcccccttactaagtttaagacttttgtcatgtggtgagtcaaataagaccattttgattgtaaaccataaaatagttcagcaagtagcccacagttctggcctaacagcagacttgctgttttcacttggtatcctggagttgggttgctaaccttaatttctatgatgttttctaaaatgaaacttgataaagtagaccaccagctgcaccgtgttttctgtaaaagtattgttagtaagtggccaagagacttgaggaaaatacagattttttgtttaccttggtcttgttttaagtcttaaaaaattaaagataacattataatgtagaatacagatgggacatagtccttgtaagcttcccttgaaaatgttttaaatatttaggaagcttttaaaagacactaaattgtactctaaaagacactaaattgtactaattgtacaaaggtcaagccaattttatgaaacagtcctacagagtaatatatgtgatgcagtgtaagaaggaaaatactcatctctaacattatggtaataacatttagcctcttaggagttggagcagggggatgggtaattacagatttgcagactatagaaagagtttcatttttttgtgaccccacagagtctcaaatttttatttcactacctgctagagcctactgtgaaatcactgctccatatttgccagtggaggaaatgggcatagagtagagaatagcttcatatgtttacacgtttgcatagactacacacatgtcatgcgtttatggcaggtagctggtatttattccccaaagtaataatgttgaagtatgggtctcatcattcccatacacagaaacacaaaacactttgatcataaacttttttcttcagaagccaaactaacttgcagaataatagagccactggtttaatgtttcctcaagataggttttagtgtaagctagtattctgtgtgttcgtagaaatgattcaatacctgcagctggtgaattaggaattgtatttgttgccttttttatattagatgaggtgcaaaaattttaatgctagtcagtatgcaccaccacaggaaagttagatcccattagcacttgaaactacagctttggaaacttaggctaagttaatttggatttgttacttgattcacctactgaccttttcttttgtttgaagtgcttatcagcataatgagctaagtgtcatgcatatttgtgaagaaacaccctttttggtcccttttgggacagagaggtactccttgatctttatgaatgacaggttactgttttgccttattgcttaacttaatgtagtgaaataaagcagacaaagcttgagcgtgtcttttgtttgctctcatgtagatactaagtagcatggctcagagccaaaagacaagcgtgaagttaagagagttggctaagagagttggtggggcatgctcccttccattccttaaatgaagtaatctaaaatctcttagcaggttagttcaccataatatataagtagatgttgctttgagcttcttatatacatattcacagaaccattatataaatgttgttagacctctaccagtttttatcctgggtcattgcttctaaagatatcctttacaatatacacagtggtctgactcca

SEQ ID NO: 3456 - DNA, 6310 bp, Homo sapiens
  source 1..6310: mol_type = genomic DNA
gccacagggacagccggtgggctcggtggggctgcagaaggtcggggctgcactgctctcggcccccacacggttggttggttggcgtggtaagtgccctgatccctggtcctgagaactcaggctggcacagggattcccagggcatctaccaccacgcagctggagcagggctgagcccaggagcatggagatggacgcccccaggccccccagtcttgctgtccctggagcagcatcgaggcccgggaggctgctggatggggggcacggcaggcagcaggttcaggccctctcttcacagctcctggaggtgatccccgactccatgaggaagcaagaggtgcggacgggcagggaggccggccagggccacggtacgggctccccagccgagcaggtgaaagccctcatggatctgctggctgggaagggcagtcaaggctcccaggccccgcaggccctggataggacaccggatgccccgctggggccctgcagcaatgactcaaggatacagaggcaccgcaaggccctgctgagcaaggtgggaggtggcccggagctgggcggaccctggcacaggctggcctccctcctgctggtggagggcctgacggacctgcagctgagggaacacgacttcacacaggtggaggccacccgcgggggcgggcaccccgccaggaccgtcgccctggaccggctcttcctgcctctctcccgggtgtctgtcccaccccgggtctccatcactatcggggtggccggcatgggcaagaccaccctggtgaggcacttcgtccgcctctgggcccatgggcaggtcggcaaggacttctcgctggtgctgcctctgaccttccgggatctcaacacccacgagaagctgtgtgccgaccgactcatctgctcggtcttcccgcacgtcggggagcccagcctggcggtggcagtcccagccagggccctcctgatcctggacggcttggatgagtgcaggacgcctctggacttctccaacaccgtggcctgcacggacccaaagaaggagatcccggtggaccacctgatcaccaacatcatccgtggcaacctctttccggaagtttccatctggatcacctcccgtcccagtgcatctggccagatcccagggggcctggtggaccggatgacggagatccggggctttaacgaggaggagatcaaggtgtgtttggagcagatgttccccgaggaccaggcccttctgggctggatgctgagccaagtgcaggctgacagggccctgtacctgatgtgcaccgtcccagccttctgcaggctcacggggatggcgctaggccacctgtggcgcagcaggacggggccccaggatgcagagctgtggcccccgaggaccctgtgcgagctctactcatggtactttaggatggccctcagcggggaggggcaggagaagggcaaggcaagccctcgcatcgagcaggtggcccatggtggccgcaagatggtggggacattgggccgtctggccttccatgggctgctcaagaagaaatacgtgttttacgagcaagacatgaaggcgtttggtgtagacctcgctctgctgcagggcgccccgtgcagctgcttcctgcagagagaggagacgttggcatcgtcagtggcctactgcttcacccacctgtccctgcaggagtttgtggcagccgcgtattactatggcgcatccaggagggccatcttcgacctcttcactgagagcggcgtatcctggcccaggctgggcttcctcacgcatttcaggagcgcagcccagcgggccatgcaggcagaggacgggaggctggacgtgttcctgcgcttcctctccggcctcttgtctccgagggtcaatgccctcctggccggctccctgctggcccaaggcgagcaccaggcctaccggacccaggtggctgagctcctgcagggctgcctgcgccccgatgccgcagtctgtgcacgggccatcaacgtgttgcactgcctgcatgagctgcagcacaccgagctggcccgcagcgtggaggaggccatggagagcggggccctggccaggctgactggtcccgcgcaccgcgctgccctggcctacctcctgcaggtgtccgacgcctgtgcccaggaggccaacctgtccctgagcctcagccagggcgtccttcagagcctgctgccccagctgctctactgccggaagctcaggctggacaccaaccagttccaggaccccgtgatggagctgctgggcagcgtgctgagtgggaaggactgtcgcattcagaagatcagcttggcggagaaccagatcagtaacaaaggggccaaagctctggccagatccctcttggtcaacagaagtctgacctctctggacctccgcggtaactccattggaccacaaggggccaaggcgctggcagacgctttgaagatcaaccgcaccctgacctccctgagcctccagggcaacaccgttagggatgatggtgccaggtccatggctgaggccttggcctccaaccggaccctctccatgctgcacctgcagaagaacagcatcgggcccatgggagcccagcggatggcagatttgaagcagaacaggagtctgaaagagctcatgttctccagtaatagtattggtgatggaggtgccaaggccctggctgaggccctgaaggtgaaccagggcctggagagcctggacctgcagagcaattccatcagtgacgcaggagtggcagcactgatgggggccctctgcaccaaccagaccctcctcagcctcagccttcgagaaaactccatcagtcccgagggagcccaggccatcgctcatgccctctgcgccaacagcaccctgaagaacctggacctgacagccaacctcctccacgaccagggtgcccgggccatcgcagtggcagtgagagaaaaccgcaccctcacctcccttcacctgcagtggaacttcatccaggccggcgctgcccaggccctgggacaagcactacagctcaacaggagcctcaccagcttagatttacaggagaacgccatcggggatgacggagcgtgtgcggtggcccgtgcactgaaggtcaacacagccctcactgctctctatctccaggtggcctcaattggtgcttcaggcgcccaggtgctaggggaagccttggctgtgaacagaaccttggagattctcgacttaagaggaaatgccattggggtggctggagccaaagccctggcaaatgctctgaaggtaaactcaagtctccggagactcaatcttcaagagaattctctggggatggacggggcgatatgcattgccacagcactgtctggaaaccacaggctccagcatatcaatctccagggaaaccacattggggactccggggccaggatgatctcagaggccatcaagacaaatgctcccacgtgcactgttgaaatgtgatcctggtggacggatcaggagaatgggcagatgctcagctggaagcttttgaacagaaaggccgacttctggggggcctgtctgggagctgggaacgctgcttgctcagcacgagagccgggctctgcagggaggaaggagaggtgctgccggaggaggtcgtgagctcctcttctgctgcaggagtggtccaggcagggggtgacgggtactctgttatggcacagagaagggaggggccacccccaagggactaggggccaaaggcctgaaagctgagcagtacaggaggctggttccagctttacaccctgaggacttcatgtgtccccaacctttaaaaatgtttattactgcccctttccactcacctggttaaaaatcatcccatgctctgagatgagctgccacctcaagcccgtgaggagcatccgtttggtaggggtaacagaggggacccttctttatcttctcaagaagaagatttcagggtatcatccttacagacatgaaaaagctatgggaaaattgtgaagataaatgaaagttttaattctaggattctggaaacagagacagtaagagttctccaaggattttgccttttttgtttgtttttgagatggagtctcgctcttgtcgcccaggctggagtgcagtggcacgatctcagctccctgcaacctccgcctcccgggttcatgtgattctcctgcctcagcctccccagtagctgggaatacaggcacccgccaccatgcccggctaatttttgtagttttagtagagacggggtttcatcatgttggccaggctggtctcgaactcctgacctcaggtgatccatcagcctgggcctcccaaagtactgggattacaggcatgagccaccacacctggccccattttttatttattacaaaatcaaagacatgggtgatgcctggcacatgttgtctggagtctggcacactggttatcaatagcacattcagtgtattcagtgatgtcattctttatttatttttgagacagaatctgtcacccaggctggagtgcagtggcatgatctcagctcactgtaggctctacctcatgggttccagtgattctcctgcctcggcctcccaagtagttgggtctacaggcacgcaccaccacacccagctaatttttgtatttttagtagagatggggtttcaccatgttgatcaggctggtctttaactcctgacctcaagtgatccacccacctcagcctcccaaagtgctgggattacaggtgtgagccactgcacctggcagtgatgtcattccttactaggcttccaaagccactgctgtggccacagcttccatggagacaggcaagctgagcctctatgtggcaccaattcctgcagctgtttgtgttggagggaaaaaaatccaaatggacatcaacagctttcatcaactaaataaccacagaaaatatttatgaagactataaagcaatgattacttttgaattggaaaggaatcactattatttgaaatgtttcttcaaaagtgagcatccggacaggaaccatcatggatgctgaggccatggatgaaggcctactcgggaagatgatatccttgcagtctcaaaacggcaccccacaaaggtgatatcctaatttacaaagggaaaaaggtaccttaatctgaaatctggcaaatgcagcctcaacagaagtgacagaattgaacatcgccaataatgggacacacagacatcacatgcccccagtctgatgcaccacggagtcgtctctgatgtattcttgtcaaaaaatgtttgcctgattctaatcatgaaagaacaattagaaaaaatccaaattgacagatattctgcagaataaatggcctgacctcatcaaaaacatcaatgtcatgaaaaacacaaaacattgcagatagcgtgaaattaaagattacagagatataatttaatgcaagatctctgactggatcctagactgcaggaaaaagtctgctataaagaacatttggatcacttgtagtagctgggaaataaaacaaaacattatttgtaaaaggggggaaatctgaacatgggtcttgcagtatttatgacagtttttgcggggcagagatttctagattgacagctgttttagtactttcaaggtgatgctctgtctgctggtttgcattgtttctgtctgagttaagagactggcagaacacagagttgcagtagccaaacactggagaaagctgggccctacagaaacctaacgctgaagaaacctcaggagccaaactggtggagaaaacaaagagtcctccctctctcccttttcaaataatgatcatacatcttcaagctgtctgaaatggttaaggagttcagtctgtcgtcaggcacacaccagagccagctagcccacacagaccccatcagagcaaaacagacaagagaatttaattcatatccacatagaaaggacttctaggtaggaggtagaccctttagctcccttccaattaaaggagtccccaattctggcacctgagagtcccctgggtctaacagctatgatatttatgtagtgtgttgcttacctaaatgaatacaatttccttccagacacgtgacactgatattaaagtgctaatgagagggatctatttcttcttgtacgctaaaagagaaacagcagttcagatttcccatcagaagtccgaggactttgttcttgataactactaccaataaaaattgagtatttg

SEQ ID NO: 3457 - DNA, 2706 bp, Homo sapiens
  source 1..2706: mol_type = genomic DNA
gatgccaggcgagctgagctggggatgctggaacgaagggcgttgctatggcaacgggaggcagggcctggttggggggaccgggcccgggctgggaccgggggggccggcggtggctgtggtggggcgatggcggagcgcggcccggccttctgcggcctgtacgacacgtcctcgctgctgcgatactgcaacgatgacaatttgtcgggcacgagcggtatggaagtggacgaccgcgtgtcggcgctggagcagcggctgcagttacaggaagacgagctggcggtcctaaaggcggcgctggcggatgctctgcgtcgcctgcgggcatgcgaagaacagggagcggcgctacgcgcgcggggcacccccaagggccgggcgcctccgcgcttaggcaccactgcctcggtgtgtcagctcttgaaaggccttcccaccaggacgccccttaatggctcgggacccccgcggcgcgtgggtggctatgccacgtccccatcctctcccaagaaggaggcgacctccgggcgcagcagtgtccgccgctacttgtcaccagagcgcctcgcctcggtgcgccgtgaggacccccgcagccggaccacatcctccagcagcaactgtagcgccaaaaaggaaggcaaaaccaaagaagttatcttcagtgtggaggatggctccgtgaaaatgttcctgaggggccgccctgtgcccatgatgatcccagacgagctggcacccacctacagcctggacacacgctcggagctgccttcttgccggctcaagctggagtgggtctatggctaccgtggccgagactgccgggccaacctttatttgctgcccaccggggagatagtgtactttgtggcctccgtagccgtgctatacagcgtggaggagcagaggcagcgacactacctgggacacaacgatgacatcaaatgcttggccatccacccagatatggtcaccatcgccacgggacaggtggcgggaaccactaaggaagggaagccgctgccgccccacgtgcgcatctgggactcagtttccctctccaccttacacgtgctgggcttgggggtgtttgacagagccgtgtgctgtgtgggcttctccaaatctaatggaggcaacctgctgtgtgcagtggatgaatccaatgatcacatgctctcggtgtgggactgggccaaggagaccaaggtggtggatgtcaagtgctccaatgaggctgtattggtggccaccttccaccccacggaccccactgtgcttatcacctgcgggaaatctcacatctacttctggaccttggaggggggcagcttgagcaagcggcaaggcctctttgagaaacatgagaaaccgaagtatgtgctgtgtgtgacctttttggaaggtggcgacgtggtcacgggggactctggggggaacctctatgtttggggcaaaggtgggaaccgtatcacacaggcggtgctgggcgcccacgacggcggcgtgtttgggctctgcgccctgcgggacgggacgctggtgtctggagggggccgcaattccatcctgcagggctccgtgcacacaggcttctcactgctggtccagggccatgtggaagagctgtggggcctggccacacaccccagtcgggcccagtttgtgacctgcgggcaggataagctggtgcatctatggagctcagattcccaccagcccctgtggagcaggatcatcgaggaccctgcccgctcagccggcttccaccccagtggctctgtcctggctgtgggtacagtgactggcagatggctgctgctggacacggagacccatgacctggtggctatccacacagacggcaatgaacagatctcagtggtcagcttctccccagacggggcgtacctggccgtgggctcccacgacaacttggtgtacgtgtacacggtggaccagggcggccgcaaggtcagccgcctgggcaagtgctcgggccattccagttttatcacccacctggattgggcccaggacagcagctgctttgtcaccaactccggggactatgagattctgtactgggacccggctacctgtaagcagatcaccagtgcggatgctgtgaggaacatggaatgggccacagctacttgtgtcctagggtttggggtgtttgggatctggtctgagggggcggacggcactgatatcaacgctgtggcccgctctcatgatgggaagttgctggcttcagctgatgactttggcaaagttcacctgtttagctacccctgctgtcagcctcgagccctcagccacaagtacggtggacacagcagccatgtgacaaatgtggccttcttgtgggatgacagcatggccctgaccacagggggcaaggacaccagtgtgctacagtggcgggtggtctgatgcggccagggaagagtcaggtgtcagggcaggaattctattttcgggagatgtctattgccgagtagagtaatatatacccagagtatgtctatagcagagggggttatgggggcgggagggtagactgacatacagaagtctctatttatccgggtgggaagagggagtcacatcgctttggggatccattggtgtttggtttggggtgttttttaagttttttcttttatatcatccagaaataaagacacgtac

SEQ ID NO: 3458 - DNA, 1916 bp, Homo sapiens
  source 1..1916: mol_type = genomic DNA
cactctgccctgttgctgtcgcgccgctgctggttgctgtccctggacccctaccatggaggagaccatcaaagatccccccacatcagctgtcttgctggatcactgtcatttctctcaggtcatctttaacagtgtggagaagttctacatccctggaggggacgtcacatgtcattataccttcacccagcatttcatccctcgtcgaaaggattggattggcatctttagagcatttaaatgtttccaagacaaattggaacaagaactactcaaatggaggagccaaggacagaaattgcaggtggggtggaagacaacccgtgagtattacaccttcatgtgggttactttgcccattgacctaaacaacaaatcagctaaacagcaggaagtccaattcaaagcttactacctgcccaaggatgatgagtattaccagttctgctatgtggatgaggatggtgtggtccggggagcaagtattcctttccaattccgtccagaaaatgaggaagacatcctggttgttaccactcagggagaggtggaagagattgagcagcacaacaaggagctttgcaaagaaaaccaggagctgaaggacagctgtatcagcctccagaagcagaactcagacatgcaggctgagctccaaaagaagcaggaggagctagaaaccctacagagcatcaataagaagttggaactgaaagtgaaagaacagaaggactattgggagacagagctgcttcaactgaaagaacaaaaccagaagatgtcctcagaaaatgagaagatgggaatcagagtggatcagcttcaggcccagctgtcaactcaagagaaagaaatggagaagcttgttcagggagatcaagataagacagagcagttagagcagctgaaaaaggaaaatgaccacctctttctcagtttaactgaacagaggaaggaccagaagaagctcgagcagacagtggagcaaatgaagcagaatgaaactactgcaatgaagaaacaacaggaattaatggatgaaaactttgacctgtcaaaaagactgagtgagaacgaaattatatgtaatgctctgcagagacagaaagagagattggaaggagaaaatgatcttttgaagagggagaacagcagattgctcagttacatgggtctggattttaattctttgccgtatcaagtacctacttcagatgaaggaggcgcaagacaaaatccaggacttgcctatggaaacccatattctggtatccaagaaagttcttcccccagcccgctctccatcaagaaatgccctatctgcaaagcagatgatatttgtgatcacaccttggagcaacagcagatgcagcccctttgtttcaattgtccaatttgtgacaagatcttcccagctacagagaagcagatctttgaagaccacgtgttctgccactctctctgagtatcccaacctcttggatgtatacagagattttatagaatagaacctatagcttctaccatgagttatatgagtcaagatcctgcctaacctgaaattattagggatttactcagccctgctgccgctaacagtggagttatgtcactgatctgaaggtcactgttaagggcttctgctgccatccttgtgggttgctacctttaagtcgcataactctagctgtatcatcctctcacctgtcattcttctgagggtctcagtacaagggccctgggatggagccaacctgggtattcacaacaggcctgacttgatactaagtgattagttttccaagttgtcccactgccattcaaagtcagcccttgagtgtatttgttctcagtcctaaccctggggccagagattggtccgaggttgagaattccttcctcctcatccttgg

SEQ ID NO: 3459 - DNA, 2200 bp, Homo sapiens
  source 1..2200: mol_type = genomic DNA
gacggccgcgcatgcgcccttggttggcgggagtttcggaggcggtgaccgtgacgtagaaggtggagaccgcttcaccctgatcagggagtatcggctgcgggtgcgcaaggcgtccaggagtgacctggggctgtggagagcgacccgtggccttgtgtttcagaaaaaggaccagtgatgtctaagactcatgatcatcaattggaatcaagtctcagtcctgtggaagtgtttgctaaaacatctgcctccctggagatgaatcaaggcgtttcagaggaaagaattcaccttggctctagccctaaaaaagggggaaattgtgatctcagccaccaggaaagacttcagtcgaagtcccttcatttgtctcctcaagaacaatctgccagttatcaagacaggaggcaatcctggcggcgagcaagtatgaaagaaacgaaccggcggaagtcgctgcatcccattcaccagggcatcacagagctcagccggtctatcagtgtcgatttagcagaaagcaaacggcttggctgtctcctgctttccagtttccagttctctattcagaaacttgaacctttcctaagggacactaagggcttcagtcttgaaagttttagagccaaagcatcttctctttctgaagaattgaaacattttgcagacggactggaaactgatggaactctacaaaaatgttttgaagattcaaatggaaaagcatcagatttttctttggaagcatctgtggctgagatgaaggaatacataacaaagttttctttagaacgtcagacttgggatcagctcttgcttcactaccagcaggaggctaaagagatattgtccagaggatcaactgaggccaaaattactgaggtcaaagtggaacctatgacatatcttgggtcttctcagaatgaagttcttaatacaaaacctgactaccagaaaatattacagaaccagagcaaagtctttgactgtatggagttggtgatggatgaactgcaaggatcagtgaaacagctgcaggcctttatggatgaaagtacccagtgcttccagaaggtgtcagtacagctcggaaagagaagcatgcaacaattagatccctcaccagctcgaaaactgttgaagcttcagctacagaacccacctgccatacatggatctggatctggatcttgtcagtgactttatgagagtttctgccacaaggtgcccaagaggagaggaatgggaagagtgccccagcacgtggtgactgcgtgatttctgctcgttgcctttgaagataactggcaggactgactgtagaacactttgacttttttcaaaaagtgatggaatttgtacatccaaatgaatattgtatagacaattttcccaggaatgtgcaaaatgcttgaaagttcaaacttcttttttgaaatgatcttcagatccagtggcccattcttttatctttatcctgtgaaggtgtttttcaggttttgaaacaatccaaaaatcatttaggaccaagtctaaggaaacattttagtggccaagttggattccgattgtaaaggaatgatactaattttctagcatggctctgaaggtgattttaggtagaagagttttgaggctgggcgcaatggctcacgcctgtaatcctagcattttgggtgactgaggcgggtggattgcttgagcccagaagttgaagaccagcctgagaaataaggtgaaaccctgtctacaaaaaatacaaaaagttagctgggtgtggtggcgtgtgcctgtagtgctagctactcagaaggctgaggtgggaggattgtttgagcccaggaggttgaggctgcagtgagttctaattgcgccactgcactccagcctgagcgacagagtgagacactgtcttaaaaaaaattaaaaattgtaaaaaaatgaaaaaaaaagttttgagcattatttgcatcattgggatacatatgtcacttcacaagatgttcaatttgaaggaaataccactcattctctatgtcctgttgtctgtagtgtgcttcagtttttcatattgagttgacctaaatcctggattcatgacaagaaaggagtaagtactactattcattgttctatttgtttataatctgtattataaaattgcacataattaaaagctttcccttgtcttcatcta

SEQ ID NO: 3460 - DNA, 1780 bp, Homo sapiens
  source 1..1780: mol_type = genomic DNA
agcggaaaaccaattggtttaaaagaagagccagtaagttcatgactcacgtggcctcccagtttgcctccagctatgtgttttattggcgggattactttgaggaccagccccttctgtatcccccaggctttgacggaagagtcgtggtgtatcccagcaaccagactttaaaggactacctcagctggcgacaagcagattgtcacatcaataatctttataatacagttttctgggcacttatacaacaatctggactaacaccagtacaagcccaagggagattacagggaactcttgcagcagacaagaatgagattttgttttctgaattcaacatcaactataataatgagctgccgatgtataggaaagggactgtgttgatatggcagaaggtggatgaagtgatgacaaaagaaattaagctgccaacagaaatggaaggaaaaaagatggcagtgacccggaccaggacaaagccagtgcccttgcactgcgatatcatcggggatgctttctggaaggaacatccagagattctagatgaagacagctgacccttttgcgcttcagttctggtgtgcttaaccatgcaagccctcccacctcccaggacactggtgcgaatgacacaactcaagttgggaggggaacagggaaggaagggatggatgggggtggtgtatcttactctgtttaagcagaacaccttgtttgcggtgttggaacatggttcctttggcagaagtgctttttttttaatcgcagtactatttttataaagcaagaactattccatgccttggagaatgaatcatttttagattgtgacataaatcttgtaaaaacctgtcagttattttcatctatgagagaagaggagcccaaactctcgcccacctgttcttaaccagaaaacccactgactttgaaaatctcacctctgccacccatctacttgcattcgtctttggcagacctcaagataaatatgggttaatgcctgcatgatgcctctgaattcaggaattgcagggaaaactcggggctttgtgccagtctctaagttggcaactttggctgaacaaatgagtagtggcttcagtgtccttgcgtacacattctgtggattgatttaatggagttgtcagcatgatcatcatcttctagccaggggcatagttgccaaggccatttacctctttctaagaagaaacagaattatgtgtatatatgagagaaagaaacaagaatgcgtgaatgaggatgaagaaacatttaccccatgtactcaagacatttcagttttaaaagtcactttcctattagacttcttgaaaaacattctcacatagcctctatgtaatcagacaaatgacatttgatttcaagagcagaggggtaaacatcctctgctaatcgacaggtagcaggtgtcagaggaggcataatattaatagcgccaccttctgttgggtcagtggagatgggtgaggaacagcacagagcagcagggatcatcacatgcagccaaacttggcctctgaagggggaaggtagtgggaataggtggtgagagaactcacatttttctcttgtcctggttttatatttcggagggaaaggattatttggccccattaagaattaagaggctgggtgcggtggctcacgtctgtaatcccagcaccttgggaggcccaggcaggcagatcacctgaggtcgggagttcgagaccagcgtgaccaacgtggagaaacccccgtctctact

SEQ ID NO: 3461 - DNA, 558 bp, Homo sapiens
  source 1..558: mol_type = genomic DNA
gaaatttgggttttaggacaggcgaaccaacccgctctccttcaagctcccggccatttcttggggcagagagctaggaggggtccgcggcagagcaaagcgggaaggcccaatgggcaggaagcctctccagccgcccccagcccggccggcccccgcacgccccagagcctcaattgacttggatttccttgagttcggtgtctagggagccaagtgttgggctgtggaaggtagatgaatgctccagggatagagacctgtatcagggtgccatggagatggagagcgcggcggcctccacacgtttccaccagcctcacatggagaggaagatgagtgcgatggcctgtgagatcttcaacgagcttagactagagggcaagctctgcgacgtggtcatcaaggtcaatggctttgagttcagtgcccataagaacatcctctgtagctgcagttcctactttagagctttgtttacaagtggctggaacaacactgaaaagaaggtatacaacatccctggcatttctcccgacatgatgaagctaatcattg

SEQ ID NO: 3462 - DNA, 2062 bp, Homo sapiens
  source 1..2062: mol_type = genomic DNA
gtgtttcaccacacggagatgtggtcacgtgacttgtcaactttcacccaggatgtctcccttctgacttccccttagcaaccaagtcgcggcgcttggttccccagcaaccgggagacgcgtctgctgcgtggaaccgccgagttcccagcgcttgagaaggaaaattctggatctgttatctgtgaggaggccactccgttgacagttgtgtaaaactctgctgctttccccagctccaacctctctggtcttcaacaacactatcatcagggaaaacgtgggggaagatgaaccagccgtgcaactcgatggagccgagggtgatggacgatgacatgctcaagctggccgtcggggaccagggcccccaggaggaggccgggcagctggccaagcaggagggcatcctcttcaaggatgtcctgtccctgcagctggactttcggaacatcctccgcatagacaacctctggcagtttgagaacttgaggaagctgcagctggacaataacatcattgagaagatcgagggcctggagaacctcgcacacctggtctggctggatctgtctttcaacaacattgagaccatcgaggggctggacacactggtgaacctggaggacctgagcttgttcaacaaccggatctccaagatcgactccctggacgccctcgtcaagctgcaggtgttgtcgctgggcaacaaccggattgacaacatgatgaacatcatctacctccggcggttcaagtgcctgcggacgctcagcctctctaggaaccctatctctgaggcagaggattacaagatgttcatctgtgcctaccttcctgacctcatgtacctggactaccggcgcattgatgaccacacaaaaaagcttgcggaggctaagcaccagtacagcatcgacgagctgaagcaccaggagaacctgatgcaggcccagctggaggacgagcaggcgcagcgggaggagctagagaagcacaagactgcgtttgtggaacacctgaatggctccttcctgtttgacagcatgtacgctgaggactcagagggcaacaatctgtcctacctgcctggtgtcggtgagctccttgagacctacaaggacaagtttgtcatcatctgcgtgaatatttttgagtatggcctgaaacagcaggagaagcggaaaacagagcttgacaccttcagtgaatgtgtccgtgaggccatccaggaaaaccaggagcagggcaaacgcaagattgccaaattcgaggagaagcacttgtcgagtttaagtgccattcgagaggagttggaactgcccaacattgagaagatgatcctagaatgcagtgctgacatcagtgagttgttcgatgcgctcatgacgctggagatgcagctggtggagcagctggaggagactataaacatgtttgaaaggaacattgttgacatggtaggactgtttatcgaaaatgtccaaagcctgatggctcagtgccgggacctggagaatcaccaccacgagaagctcctggagatctctatcagcaccctggagaagattgtcgagggcgacctggacgaggacctgcctaacgacctgcgcgcgctttttgtcgataaagatacgattgttaatgctgtcggggcatcgcacgacatccacctcctgaagattgacaatcgagaagatgagctggtgaccagaatcaactcttggtgtacacgtttaatagacaggattcacaaggatgagatcatgaggaaccgcaagcgcgtgaaggagatcaatcagtacatcgaccacatgcagagcgaactggacaacctggaatgtggcgacatcctagactagatgaatgtcagccacaggagcttcttcaaaacatagcaccagccccagccaggagaaggaagtgcacacgcctcacccgcacctctagagagttgctgggcatctctcaaccgcgatccccaacaccattcttcccccacccctggaaaaacttccaaaagtagagaaaataaaggactcatttcacatttcccctactc

SEQ ID NO: 3463 - DNA, 1332 bp, Homo sapiens
  source 1..1332: mol_type = genomic DNA
gcacaaattcgcagcaggcggctggggcggcggctggggcagcggctgcagcagcggcggacgctctgcattacccagtcttgcgtcctcggcaggcgcccgaagctgagtgcgcatcctctaccgcacccaagcttcgtctgtctcgtcaagctcttcatgctgcccaactaaaaggaaaacatgggcacaggggattttatctgcatttccatgactggaggggcgccctgggggttcagattgcaaggtggcaaggagcagaagcagcccttacaagttgcaaagattcgaaatcagagcaaagcctctgggtctgggctctgtgagggagatgaagtggtttccatcaatggcaacccttgtgcagatctcacctaccctgaagtcatcaagctcatggaaagcataacagactctctccaaatgctcatcaaaaggagagtgggcgctccctttctcttcctggaagatcagtcccaccccccatttctacatctccttgggtataccagcctacttatagttactctagtaaaccaaccgatggactagagaaagcaaacaagagaccaactccttgggaagcagcagcaaagtctcctctcggtctagtggatgatgctttccaacccagaaacatccaggaatccattgtggcaaatgtggtttcagcagctcggaggaaggtgcttccagggcctccagaggattggaatgaaagactgtcctatattcctcaaacccagaaggcctatatgggctcatgtggaaggcaagagtataatgtcacagccaataataatatgtccaccacctcccaatatggttcacagttgccatatgcatattataggcaggcttcaagaaatgattctgcaatcatgtccatggaaaccaggtctgattactgtcttccagtagctgattacaactacaacccacacccaaggggatggagacgccaaacatgaaagttagaagaacggatcatgtgccaactgtagttttttaaaaaaaacgctcctttgtagggttttaaacttttctaatagatttagattcacttttggtcttggcttgttctcataagtcatttatctaagtttgtgtttctgtgtgtgtgtgtgtgtgtgtatgtatgtgaatatacacacacacacacacacaggtgagtgtgaatacttccttgttggctgatccatagagcattacttggaagaaaatttcactatttgcattgatgtgctggcatttatatgtaattcataattttgattccattaataggtagtctatgcaacaaactctactcaattaaagtaaaactaa

SEQ ID NO: 3464 - DNA, 1445 bp, Homo sapiens
  source 1..1445: mol_type = genomic DNA
cgctcccgttgctaccggaatgcctcttcaggttagcgattacagctggcagcagacgaagactgcggtctttctgtctctgcccctcaaaggcgtgtgcgtcagagacacggacgtgttctgcacggaaaactatctgaaggtcaactttcctccatttttatttgaggcatttctttatgctcccatagacgatgagagcagcaaagcaaagattgggaatgacaccattgtcttcaccttgtataaaaaagaagcggccatgtgggagaccctttctgtgacgggtgttgacaaagagatgatgcaaagaattagagaaaaatctattttacaagcacaagagagagcaaaagaagctacagaagcaaaagctgcagcaaagcgggaagatcaaaaatacgcactaagtgtcatgatgaagattgaagaagaagagaggaaaaaaatagaagatatgaaagaaaatgaacggataaaagccactaaagcattggaagcctggaaagaatatcaaagaaaagctgaggagcaaaaaaaaattcagagagaagagaaattatgtcaaaaagaaaagcaaattaaagaagaaagaaaaaaaataaaatataagagtcttactagaaatttggcatctagaaatcttgctccaaaagggagaaattcagaaaatatatttactgagaagttaaaggaagacagtattcctgctcctcgctctgttggcagtattaaaatcaactttacccctcgagtattcccaacagctcttcgtgaatcacaagtagcagaagaggaggagtggctacacaaacaagctgaggcacgaagagcaatgaatactgacatagctgaactttgcgatttaaaagaagaagaaaagaacccagaatggttgaaggataaaggaaacaaattgtttgcaacggaaaactatttggcagctatcaatgcatataatttagccataagactaaataataagatgccactattgtatttgaaccgggctgcttgccacctaaaactaaaaaacttacacaaggctattgaagattcttctaaggaattctgttctcttgagggcattgaatgtcaggcctctgagcccaagctaagccatcatatccctagtgacctgcacgtatacatccagatggcctgaagcaagtgaagaatcacaaaagaagtgaaaatggccggttcctgccttaactgatgacattaccttgtgaaattccttctcctggctcagaacctcccccactgagcaccttgtgacccctgcccctgcccgccacagaataaccccctttgactgtaattttccattacctacccaaatcctataaaacggccccacccctatctcccttcgctgactgtcttttcggactcagcccgcctccacccaggtgattaaaaagctttattgctcacacaaa

SEQ ID NO: 3465 - DNA, 1021 bp, Homo sapiens
  source 1..1021: mol_type = genomic DNA
acatccgggtaccgactccagccgcctagacgctggcactatggtcatggcggaggggacggcagtgctgaggcggaacaggccgggcaccaaggcgcagtatattcaacagaacataagagcagattgctccaatattgacaaaattcttgaaccacctgaaggccaagatgaaggtgtgtggaagtatgaacatttaaggcagttctgccttgagctaaatggacttgctgtcaaacttcagagtgaatgccatccagatacttgcactcaaatgacagcaactgaacaatggatttttctttgtgcagctcataaaactccaaaagagtgtcctgctatagactatactagacacacacttgatggtgctgcatgtcttctgaatagcaataaatattttcccagcagggttagcataaaggaatcatctgtagcgaaactaggatcagtatgccgtaggatttacagaatattttcacatgcttattttcatcatcggcagatatttgatgaatatgaaaatgaaacatttttgtgtcatcggtttactaagtttgtgatgaaatacaatttgatgtccaaggataacctgattgtaccaattttagaagaggaagtacagaattcagtttctggggaaagtgaagcatgaagggaatcataggaaaaatgtactgatcatataattaacattatgtactgtatatatcattttagacacatcaatcatgtatccatattatagcttctttgtttagtataggtttttgtatgctgggtttgccttttaaaatgggaaatactttttaagttattcataagctgtatattcaccagtgtggcactcatggtttttaaataagattagtattatctgtttataatgcctgttaataaaagaatttacagtttggtaaaattgctgctaaacaatcattggatcacaatcctcatcagacaaacccatctgtaaaaaaaatgagggagagcttgaggtttcacacaagccatttactaa

SEQ ID NO: 3466 - DNA, 1808 bp, Homo sapiens
  source 1..1808: mol_type = genomic DNA
gtttccggttgtcggaggcgaggcttgtcggctgtcaaaggggcggcccggcccggcccggaagctacagcagcggcgcggagactgcggggcgggccatggcggcgaacctgagccggaacgggccagcgctgcaagaggcctacgtgcgggtggtcaccgagaagtccccgaccgactgggctctctttacctatgaaggcaacagcaatgacatccgcgtggctggcacaggggagggtggcctggaggagatggtggaggagctcaacagcgggaaggtgatgtacgccttctgcagagtgaaggaccccaactctggactgcccaaatttgtcctcatcaactggacaggcgagggcgtgaacgatgtgcggaagggagcctgtgccagccacgtcagcaccatggccagcttcctgaagggggcccatgtgaccatcaacgcacgggccgaggaggatgtggagcctgagtgcatcatggagaaggtggccaaggcttcaggtgccaactacagctttcacaaggagagtggccgcttccaggacgtgggaccccaggccccagtgggctctgtgtaccagaagaccaatgccgtgtctgagattaaaagggttggtaaagacagcttctgggccaaagcagagaaggaggaggagaaccgtcggctggaggaaaagcggcgggccgaggaggcacagcggcagctggagcaggagcgccgggagcgtgagctgcgtgaggctgcacgccgggagcagcgctatcaggagcagggtggcgaggccagcccccagaggacgtgggagcagcagcaagaagtggtttcaaggaaccgaaatgagcaggagtctgccgtgcacccgagggagattttcaagcagaaggagagggccatgtccaccacctccatctccagtcctcagcctggcaagctgaggagccccttcctgcagaagcagctcacccaaccagagacccactttggcagagagccagctgctgccatctcaaggcccagggcagatctccctgctgaggagccggcgcccagcactcctccatgtctggtgcaggcagaagaggaggctgtgtatgaggaacctccagagcaggagaccttctacgagcagcccccactggtgcagcagcaaggtgctggctctgagcacattgaccaccacattcagggccaggggctcagtgggcaagggctctgtgcccgtgccctgtacgactaccaggcagccgacgacacagagatctcctttgaccccgagaacctcatcacgggcatcgaggtgatcgacgaaggctggtggcgtggctatgggccggatggccattttggcatgttccctgccaactacgtggagctcattgagtgaggctgagggcacatcttgcccttcccctctcagacatggcttccttattgctggaagaggaggcctgggagttgacattcagcactcttccaggaataggacccccagtgaggatgaggcctcagggctccctccggcttggcagactcagcctgtcaccccaaatgcagcaatggcctggtgattcccacacatccttcctgcatcccccgaccctcccagacagcttggctcttgcccctgacaggatactgagccaagccctgcctgtggccaagccctgagtggccactgccaagctgcggggaagggtcctgagcaggggcatctgggaggctctggctgccttctgcatttatttgccttttttctttttctcttgcttctaaggggtggtggccaccactgtttagaatg

SEQ ID NO: 3467 - DNA, 3573 bp, Homo sapiens
  source 1..3573: mol_type = genomic DNA
agtgctcagcaacgattacgccccgagggccaatcacagggctgcggccgagagagaagccttattagagctttctcaacctgcagccctcatctccgccggcgagtagggccaggtgttgggagctcccacgtgggacaagatggtgtcttcggcgcagatgggcttcaacctgcaggctctcctggagcagctcagccaggatgagttgagcaagttcaagtatctgatcacgaccttctccctggcacacgagctccagaagatcccccacaaggaggtagacaaggctgatgggaagcaactggtagaaatcctcaccacccattgtgacagctactgggtggagatggcgagcctccaggtctttgaaaagatgcaccgaatggatctgtctgagagagcaaaggatgaagtcagagaagcagctttgaaatcctttaataaaaggaagcctctatcattagggataacacggaaagaacgaccacctctagacgtggacgaaatgctggagcgcttcaaaacagaagcacaagcgtttacagaaacgaaaggaaatgtcatctgcctgggtaaagaagtctttaaaggaaaaaagccagacaaagacaataggtgcaggtatatattgaagacgaagttccgggagatgtggaagagctggcctggagatagcaaagaggtccaggttatggctgagagatacaagatgctgatcccattcagcaaccccagggtgcttcccgggcccttctcatacacggtggtgctgtatggtcctgcaggccttgggaaaaccacgctggcccagaaactaatgctagactgggcagaggacaacctcatccacaaattcaaatatgcgttctacctcagctgcagggagctcagccgcctgggcccgtgcagttttgcagagctggtcttcagggactggcctgaattgcaggatgacattccacacatcctagcccaagcacggaaaatcttgttcgtgattgacggctttgatgagctgggagccgcacctggggcgctgatcgaggacatctgcggggactgggagaagaagaagccggtgcccgtcctcctggggagtttgctgaacagggtgatgttacccaaggccgccctgctggtcaccacgcggcccagggccctgagggacctccggatcctggcggaggagccgatctacataagggtggagggcttcctggaggaggacaggagggcctatttcctgagacactttggagacgaggaccaagccatgcgtgcctttgagctaatgaggagcaacgcggccctgttccagctgggctcggcccccgcggtgtgctggatcgtgtgcacgactctgaagctgcagatggagaagggggaggacccggtccccacctgcctcacccgcacggggctgttcctgcgtttcctctgcagccggttcccgcagggcgcacagctgcggggcgcgctgcggacgctgagcctcctggccgcgcagggcctgtgggcgcagacgtccgtgcttcaccgagaggatctggaaaggctcggggtgcaggagtccgacctccgtctgttcctggacggagacatcctccgccaggacagagtctccaaaggctgctactccttcatccacctcagcttccagcagtttctcactgccctgttctacaccctggagaaggaggaggaagaggatagggacggccacacctgggacattggggacgtacagaagctgctttccggagtagaaagactcaggaaccccgacctgatccaagcaggctactactcctttggcctcgctaacgagaagagagccaaggagttggaggccacttttggctgccggatgtcaccggacatcaaacaggaattgctgcgatgcgacataagttgtaagggtggacattcaacggtgacagacctgcaggagctcctcggctgtctgtacgagtctcaggaggaggagctggtgaaggaggtgatggctcagttcaaagaaatatccctgcacttaaatgcagtagacgttgtgccatcttcattctgcgtcaagcactgtcgaaacctgcagaaaatgtcactgcaggtaataaaggagaatctcccggagaatgtcactgcgtctgaatcagacgccgaggttgagagatcccaggatgatcagcacatgcttcctttctggacggacctttgttccatatttggatcaaataaggatctgatgggtctagcaatcaatgatagctttctcagtgcctccctagtaaggatcctgtgtgaacaaatagcctctgacacctgtcatctccagagagtggtgttcaaaaacatttccccagctgatgctcatcggaacctctgcctagctcttcgaggtcacaagactgtaacgtatctgacccttcaaggcaatgaccaggatgatatgtttcccgcattgtgtgaggtcttgagacatccagaatgtaacctgcgatatctcgggttggtgtcttgttccgctaccactcagcagtgggctgatctctccttggcccttgaagtcaaccagtccctgacgtgcgtaaacctctccgacaatgagcttctggatgagggtgctaagttgctgtacacaactttgagacaccccaagtgctttctgcagaggttgtcgttggaaaactgtcaccttacagaagccaattgcaaggaccttgctgctgtgttggttgtcagccgggagctgacacacctgtgcttggccaagaaccccattgggaatacaggggtgaagtttctgtgtgagggcttgaggtaccccgagtgtaaactgcagaccttggtgctttggaactgcgacataactagcgatggctgctgcgatctcacaaagcttctccaagaaaaatcaagcctgttgtgtttggatctggggctgaatcacataggagttaagggaatgaagttcctgtgtgaggctttgaggaaaccactgtgcaacttgagatgtctgtggttgtggggatgttccatccctccgttcagttgtgaagacctctgctctgccctcagctgcaaccagagcctcgtcactctggacctgggtcagaatcccttggggtctagtggagtgaagatgctgtttgaaaccttgacatgttccagtggcaccctccggacactcaggttgaaaatcgatgactttaatgatgaactcaataagctgctggaagaaatagaagaaaaaaacccacaactgattattgatactgagaaacatcatccctgggcagaaaggccttcttctcatgacttcatgatctgaatccccccgagtcattcattctccatgaagtcatcgattttccaggtgttggtgaactgcctgtgactcctctcctccccggcccctacccctcagggataatgagttcattgctgggctagatgttttagccatgattctgcctctgttttatacctgcacacatccttatctttgttacatatgaaatatctgtatcacgggtatattgagagaaataaaggtgagagcattcacaaatg

SEQ ID NO: 3468 - DNA, 521 bp, Homo sapiens; identical to SEQ ID NO: 1926
  source 1..521: mol_type = genomic DNA

SEQ ID NO: 3469 - DNA, 614 bp, Homo sapiens
  source 1..614: mol_type = genomic DNA
gtacaacttccggctgtaaagatggcggcttcctagtgagtcggcggctgatttagaaggaggttcaggctacggtgagccgaagccacacaggagccatggaagtggcagagcccagcagccccactgaagaggaggaggaggaagaggagcactcggcagagcctcggccccgcactcgctccaatcctgaaggggctgaggaccgggcagtaggggcacaggccagcgtgggcagccgcagcgagggtgagggtgaggccgccagtgctgatgatgggagcctcaacacttcaggagccggccctaagtcctggcaggtgcccccgccagcccctgaggtccaaattcggacaccaagggtcaactgtccagagaaagtgattatctgcctggacctgtcagaggaaatgtcactgccaaagctggagtcgttcaacggccagcagaaaactgagcttccggtcacagagaacgtgcagacgattcccccgccatatgtggtccgcaccatccttgtctacagccgtccaccttgccagccccagttctccttgacggagcccatgaaggtgggtgaggcctgggagagggaggggtgcctgcagccatga

SEQ ID NO: 3470 - DNA, 3549 bp, Homo sapiens
  source 1..3549: mol_type = genomic DNA
gagtgtgtgacccagcccttcccccgtggccaagcagagagagtggccttgaggaagccatagcagcaggaccagcatggcctctgctgcctctgtgaccagcctggcagatgaagtcaactgccccatctgtcagggtaccctgagggagccggtcactatcgactgcggccacaacttctgccgggcctgccttacccgctactgtgagataccaggcccagacctggaggagtcccctacttgcccactctgcaaagaacccttccgtcctgggagcttccggcccaactggcagctggctaacgtggtggagaacattgagcgcctccagctggtgtccacactgggtttgggagaggaggatgtctgccaagagcacggagagaagatctacttcttctgtgaggatgatgagatgcagttgtgcgtggtgtgccgggaggctggggagcacgctacccacaccatgcgcttcctggaggatgcagcggctccctatagggaacaaatccataagtgtcttaaatgtctaagaaaagagagagaggagattcaagaaatccagtcaagagaaaataaaaggatgcaagtcctcctgactcaggtgtccaccaagagacaacaggtgatttctgagttcgcacacctgaggaagtttctagaggaacagcagagcatcctcttagcacaattggagagccaggatggggacatcttgaggcaacgggatgaatttgatttgctggttgctggggagatctgccggtttagtgctcttattgaagaactggaggagaagaatgagaggccagcaagggagctcctgacggacatcagaagcactctaataagatgtgaaaccagaaagtgccggaaaccggtggctgtgtcgccagagctgggccagaggattcgggactttccccagcaggccctcccgctgcagagggagatgaagatgtttctggaaaaactatgctttgagttggactatgagccagctcacatttctctagaccctcagacttcccaccccaagctcctcttgtccgaggaccaccagcgagctcagttctcctacaaatggcagaactcaccagacaacccccagcgttttgaccgggccacctgtgttctggcccacactggcatcacaggggggagacacacgtgggtggtgagtatagacctggcccatgggggcagctgcaccgtgggcgtggtgagcgaggatgtgcagcggaagggggagcttcggctgcggccagaggagggggtgtgggctgtgaggctggcttggggcttcgtctcggctctgggctccttccccacacggctgaccctgaaggagcagccccggcaggtgagggtgtctcttgactatgaggtgggctgggtgaccttcaccaacgctgtcacccgagagcccatctacaccttcactgcctccttcactaggaaggtcattcccttctttgggctctggggccgagggtccagtttctccctgagctcctgagaaggagcagttacctactctcctctaagtacaggactcatatcaacccaagtaccatgtggacttgatccctggctgaatcacctggatgacttggaatagaaatgactgctttagaagatgggatggggccgggtggtgagggatagaagagaggactctcaatctactgatcaagtcctttccccaatgcccagtggatggccagggtacctggggactcaggctgctgccagttctgctcaccaccatccgtgcttggcacagaagtagctgcatagaaagagcactggatttgaagtcagaagacctgggttcttgaaccagcctgtcaaccagttgtatgactttaaacaaggcatctcacctcttttcatcttgttttcttccaataatgttagagttcatgtaatcacattctctagaaccatttagtttgtgttaactatgaaccaagcagtgtggtggccactggtgacttgaaaatgtagagaaaaaaaaaacctgctctatatctgaaagagctcttgggaagacagagaaacataaagaggaaattatagcacagtgtggtgggtgttacgggaagtccaaccccagcattatgggagttcaggggaaggggcatagcccagcctggaaggagaggatgagtgggggatggctttctgaaaagggtagtctaaaggatgcctatagtcaatagggaaaagaggggaagaagcatcttaagaagaggaaacagcagagaactggctggatgacctgtgactctggagcactgggttgtctccattgtccttatgggcagatgtgtgccatccccagccgacaccactcactgcctccttcctcctggtgttgccacttctgggtgagattaaggtgcagggcctgggggcaggaggacataaggtatagccataaatcataacccagggaccacactcaaccctagggaaattgtcttcctgatcagttgattaccatctgaggtcaagaaatgagatagtgggagcaaatgggtcacaaatagctcagctgtgggctcagaaactgctaggtaaaagaattccagaaggaggccagggcataagttggatgacctatgacctttagtctaaagaattgagactaccgtaattgagactactgtagtgacatctgagaaatgggatggaagagtgaccatgttttattttcttgttcttgtcactattgtattttattttgcataatcatgcccttcactgacagtctccttaacatcatctgtttactctgctcagatgtaaaatacaatgctctgtcatctccctactgggtctcctgggaggaggggagccatccagggtgcaaactcaaaggcagagggcacagcgtgcttaggcccaagcttagaattcaattgagaagttctgttgttcatccttacctcagcaggtagaaaagaggtggagatcagaagccagggattaaagattgaattgctttccctgggagtgtgcagtatctcattaaaatgttgtatattcaaaaaaatacagacacacacaagtgcctatataatgataaaacatatgcaaagcacccaaacctgtgattccagaaaggtagatcctatttttctgtttatttttattggctttagctgtgtcttttgaaaggactattatcctctaaaatgtatgtgtatgaagatcctggcttgcagctcgggagctttacacaccttgtgtcactttatcttggtaacgagccaagatcatgcaaccagttcatccatgtctgacccaagagctcttaactgctatgctgcactgcctcattcagagatagatgcctgcatgggtcctggcgattattttaatgctggctacacccccacaggtgacttggattcagaaatacaatttatatttcttctttttaaattgttttattttatttttcttttaatagttatatgtcagtgagaacaatttatatgtcttacactgagaaataaaactgctcataagtgaaaa

SEQ ID NO: 3471 - DNA, 4356 bp, Homo sapiens
  source 1..4356: mol_type = genomic DNA
aagcagataggtttcagagataaagagtgaaaccaaaaacaccgcacacctcatccaaatctgcgctcatacttgcagcaaatgtttgctgtcagttgcttcataataacagcacagaccccgaattgcaggaggaattgcctggtagaaaactgaagactttaataacaaactctccaaggtgaaaatgaacacagggcgtgattctcagtcaccagactcagcttggagatcttacaatgatggcaatcaggagacactgaacggagatgctacatattcctctcttgcagcaaaaggttttagaagcgttcgaccaaacctacaagataaaagatcaccaactcagagccagataacagtgaatggaaactcaggaggtgccgtgagtcccatgagttactatcagaggccgttttccccctcggcatattctctcccagcctcactcaactccagcattgtcatgcagcacggcacatccctcgattccacagacacatatccccagcatgcgcagtctctggatggcaccaccagcagctctatccccctgtaccgatcctcagaggaagagaagagagtgacagtcatcaaagccccgcattacccagggatcgggcccgtggatgaatccggaatccccacagcaattagaacgacagtcgaccggcccaaggactggtacaagacgatgtttaagcaaattcacatggtgcacaagccggatgatgacacagacatgtataatactccttatacatacaatgcaggtctgtacaacccaccctacagtgctcagtcacaccctgctgcaaagacccaaacctacagacctctttccaaaagccactccgacaacagccccaatgcctttaaggatgcgtcctccccagtgcctcccccacatgttccacctccagtcccgccgcttcgaccaagagatcggtcttcaacagaaaagcatgactgggatcctccagacagaaaagtggacacaagaaaatttcggtctgagccaaggagtatttttgaatatgaacctggcaagtcatcaattcttcagcatgaaagaccacctcctaaaaagcctctggactatgttcaagatcattcttctggtgttttcaatgaggcctccttgtatcagtcctctatagacagaagcctggaaagacccatgagttctgcaagcatggccagtgacttcaggaagcggaggaagagcgagcctgcagtgggtccaccacggggcttgggagatcaaagtgcgagcaggactagcccaggccgagtggacctcccaggatcaagcaccactcttacaaagtctttcactagctcttctccttcttccccatcaagagcaaaagaccgtgagtcccctagaagttactcatccactttgactgacatggggagaagtgcaccaagggaaagaagaggaactccagaaaaagagaaattgcctgcaaaagctgtttatgattttaaggctcagacatctaaggagttgtcatttaagaaaggagatactgtctacatcctcaggaaaattgatcaaaattggtatgagggagaacaccacgggagagtgggcatcttcccgatctcatacgtagagaaactcacacctcctgagaaagcacagcctgcaagaccacctccgccagcccagcccggagaaatcggagaagctatagccaaatacaacttcaacgcagacacaaatgtggagctgtcactgagaaagggagatagagttattcttcttaaaagagttgatcaaaactggtatgaaggtaaaatcccaggaaccaacagacaaggcatcttccctgtttcctatgtggaggtcgtcaagaagaacacaaaaggtgctgaggactaccctgaccctccaataccccacagctattctagtgataggattcacagcttgagctcaaataagccacagcgtcctgtgtttactcatgaaaatattcaaggtgggggggaaccgtttcaggctctgtataactatactcccaggaatgaagatgagctggagctcagagaaagtgatgtcattgatgtcatggaaaagtgtgatgacggctggtttgtggggacctcaagaagaaccaaattctttggtactttccccggaaactacgtcaagaggctgtgaattgcgctccctccttctgtagaggccgcctgccagccatgcacctgcgtcaacgcgcctgaaacaccccgcgggcctcccgttgtcatgccttacggtttccaatgcgccgtcaccatctccacctgccaccaaaccaccagcagagtagccgccgctgctgtgagcctggggacgacatggcaggctggtccccctccgtgaaagtgtggattcctacttcctgctctaagctttgacacgtcaaaatgtgggatcagaaagaaaaaaatcatgatatttaaaaatggtcaaatatttgaggcaaaaaaaaaaaaaaaaagtgtctccaggaggctgtccagcctcgtggctccatttcaacatctccccccaggcgatgttctcccccaagacgaccagaaaattgtttattggggaatgctgtggtttgcattttcatattcttcgcttggcagtgtgtattcttttcacaagtttgcctagtgtcttggtttacacaatatgacaactgtaactgtactttagctattgtttgcctgcacatacatgttgtaatatgcacagtgattacaacctttaaagcaagaggaggcgagttaatttggatgagtgtgattttgctgattgaatgtgagttttcaaataggagtctttttctgcaatttgtttgcattttttagaagtgcaaacagtaagtaaataaaagccttcggtaataatcatgacaatacaagaggctgagctaggctacaggggaaaactattgtgttgtaaagttgcatcgctattttatattaaaatgtaatgatcagcatcatgaacaatgagctcttagtgttttatttatctgaaaaaatgtaagtaaaagcagtgttagtgagaggtgcaaagaattattctaacagacacctgaaagtatctgtaagcaatactagtaggtaagatttcactgtgtgtacacatacacatttgagattgtatgagaacatataatccatatgatatgttgtacattttatggaaatgtaatagaatctcacacattattttatagaaatagagtacagaagcatcacaagtattaaagttggttttagcaaggattaggattactacaattatttttactataataattatttttcttctatggaactcagaatcctggctacatttgaggacaggaatatgttgagcctgattttcctggtgtgtgtaaaatatttcctaggaataaattaggcactttttagaagcaatgttaaatcattcaggttttattttctgccctgaagcagaaatttaaaaaatgatattgggacctggaaggtttaatatggttcacagtgcctgaattacacctgctccgaaaactagctttgtatttcttatgactttgcataagaactgttcatctttggatcttgagcaccttacagataaaactttttatggcatctctttcatggacagtgatattgatcttttcacaatgtacgtagcctctagaattttgtacatatgtttgctctttttttgtacagactagttgttgagaaaacaggggcgtttcctaatttggtctttatcctgcgacaacactttcagcagactagcctctccttatctcacagatcacaagcacccctagatagtgtgattctgtcagatagcatttatgcaaaaatctatgaagttaaaagatcgtagaagccaaatgaaatgtacatatctactgactgatgacaagggaatttcattaggaagaaggtaaagaaacatcgttgagtagcctaccttgatttctgtcaagttcataaccagcttcatattttaaaggcttcaggtttgaaattaagtcaactgcatgcagctttgctgataaatgaataattctctttgatgccatttatgagaaaagacttcaatatctgttgcctgtcatatttaagaaaaattactgtttctactctctgtatctgattttaaaagaaaaaactattcatacctggcttccaggtaattgactttgaattcttacaagcaaaggtcattgtgtttttcttgaatagacatctaataaattttgcttggaagtatacttcagtttttcttcttgacatttatctttataaaaattgtgtattttattccaacttgttaaactaagagaaaatgca

SEQ ID NO: 3472 - DNA, 1456 bp, Homo sapiens; identical to SEQ ID NO: 1946
  source 1..1456: mol_type = genomic DNA

SEQ ID NO: 3473 - DNA, 2607 bp, Homo sapiens
  source 1..2607: mol_type = genomic DNA
gcctgaactgtttgtacctctgggccatattgcagaaccctgcccttctttgttgactgaggaaagctcgctccctgcccaggtttttcattgttgatcgaaattaacaccaggtggtgaatagagcccctcctaaggttgctcaggataaatcatttattaaataggtctgcttatcaggaggggcgtgaaggctcccaaaaggaaatgctggcacctgggcccagaagccagggcctctaactcctggggttgatttcttcagtgaagttgcaccctacaaagggaatatggccaaagcggcactcaactgaaggctgatatcaggcgattagacagccatgcattctgcgtttgtctggaatggattgtagagagatggacttatatgaggactaccagtccccgtttgattttgatgcaggagtgaacaaaagctatctctacttgtctcctagtggaaattcatctccacccggatcacctactcttcagaaatttggtctgctgagaacagacccagtccctgaggaaggagaagatgttgctgccacgatcagtgccacagagaccctctcggaagaggagcaggaagagctaagaagagaacttgcaaaggtagaagaagaaatccagactctgtctcaagtgttagcagcaaaagagaagcatctagcagagatcaagcggaaacttggaatcaattctctacaggaactaaaacagaacattgccaaagggtggcaagacgtgacagcaacatctgcttacaagaagacatctgaaaccttatcccaggctggacagaaggcctcagctgctttttcgtctgttggctcagtcatcaccaaaaagctggaagatgtaaatatacgttccattcagcattcaattagcatgcctgctatgagaaactccccaacttttaaatcatttgaagaaaaggtcgaaaacttaaagtctaaagtagggggaaccaagcctgctggtggtgattttggagaagtcttgaattcggctgcaaatgctagtgccaccaccacggagcctcttccagaaaagacacaggagagcctgtgagattcctacctttgttctgctacccactgccagatgctgcaagcgaggtccaagcacatcttgtcaacatgcattgccatgaatttctaccagatgtgcttttatttagctttacatattcctttgaccaaatagtttgtgggttaaacaaaatgaaaatatcttcacctctattcttgggaaacaccctttagtgtacatttatgttcctttatttaggaaacaccattataaaaacacttatagtaaatggggacattcactataatgatctaagaagctacagattgtcatagttgttttcctgctttacaaaattgctccagatctggaatgccagtttgacctttgtcttctataatatttcctttttttcccctctttgaatctctgtatatttgattcttaactaaaattgttctcttaaatattctgaatcctggtaattaaaagtttgggtgtattttctttacctccaaggaaagaactactagctacaaaaaatattttggaataagcattgttttggtataaggtacatattttggttgaagacaccagactgaagtaaacagctgtgcatccaatttattatagttttgtaagtaacaatatgtaatcaaacttctaggtgacttgagagtggaacctcctatatcattatttagcaccgtttgtgacagtaaccatttcagtgtattgtttattataccacttatatcaacttatttttcaccaggttaaaattttaatttctacaaaataacattctgaatcaagcacactgtatgttcagtaggttgaactatgaacactgtcatcaatgttcagttcaaaagcctgaaagtttagatctagaagctggtaaaaatgacaatatcaatcacattaggggaaccattgttgtcttcacttaatccatttagcactatttaaaataagcacaccaagttatatgactaatataacttgaaaattttttatactgaggggttggtgataactcttgaggatgtaatgcattaataaaaatcaactcatcattttctacttgttttcaatgtgttggaaactgtaaaatgatactgtagaacctgtctcctactttgaaaactgaatgtcagggctgagtgaatcaaagtgtctagacatatttgcatagaggccaaggtattctattctaataactgcttactcaacactaccaccttttccttatactgtatatgattatggcctacaatgttgtatttgttatttattaaattgtgattgttttattattgtttatgccaaatgttaactgccaagcttggagtgacctaaagcattttttaaaagcatggctagatttacttcagtataaattatcttatgaaaaccaaattttaaaagccacaggtgttgattgttataaaataacatgctgccattcttgattgctagagtttttgttagtactttggatgcaattaaaactatgtgctatcacatgtgaaaagcttaataaattccatctatcagtag

SEQ ID NO: 3474 - DNA, 572 bp, Homo sapiens
  source 1..572: mol_type = genomic DNA
ttttcggaggctgccagcgtcccacaccagccgcaggtgaaaaccggcagaaagacattaagagattttcctgcagtcactgctggcagatgatagagccaggatttgaaagcaggcagcctggctccagaccctgtgctcttaactcccgttttgcatcaagaacagaatcctatgaaaggcttgcacagtgcttggtactgagtaggcactccgtcagtattttagtagctattattccaaaggacactgtattctaggatagcagcatcaaggagcattgtgtacatgcagaagtgcacagtacctggagtgaaactgcttgtgttcgatttctgataccattcataactggctgtgtgatctcaaataagaaaactgaagaaccagctgggcgcggtagctcacgcctgtaatcccagcactttgggaggctgaggcgggtggattacctgagaacctctaaaatgcagacctccagctctagatctgtgcacctgagtgaatggcagaagaattacttcgcaattacatctggcatatgtaccggaccgaaggcagatgcataccgt

SEQ ID NO: 3475 - DNA, 2792 bp, Homo sapiens
  source 1..2792: mol_type = genomic DNA
aggttggagccgctgccgtcgccatgacccgcggtaaccagcgtgagctcgcccgccagaagaatatgaaaaagcagagcgactcggttaagggaaagcgccgagatgacgggctttctgctgccgcccgcaagcagagtgctattacttcatcccggaatttcctttacccagcctatgtctactttccctcctctgtcccctccccacccagaaagtacacacaaacctattatgcagctgtgcccgcgggctggtgggggagtggaggtggaccagcaacacagcctgcagcaggtggaaggtggcggttcctgcacatactcggtacacagccccagagccactgagcactggacagtcagagaggccaaacaggaggcagcagattgctgaggcccccacatggaggaggatgtagaacaggcggctgcaagtggatgcggtgagagagggccacctagagtggcagcagctggcacaaggagcaggcccacagcagcacacctgggagtagagcagatgcaaggcagcgaggtggagacttgctgaggaaaggcatacgttaatgtatgtgtgaggttaacccaggaggttgaattccaaaatttccccttcccctttcttccttttactcaggttctgtttcaagctgattccagccatttgggattgccgcccactgacaacttagtagggctttcattataagcaggcttgagatatctgacctttctctcgacctaaacacctggggctggaaacatggcgggagagatttacagattatacctggggcaacgaaccagaacgacattagaggagaaaagaggcctgtcgtttttattggcttctgcacgtcttcctccccagcttcggccactctccccttcgcaccctctcacctgacagaagggacttttcactaggacactgctgcctccgctgtgctgctgtgccaggcccagggaggtgccggggctggggccggccttggcacccaccatccttgtcccagggattaggcttaggtccaccagatggaaggcagatgagagcagcagttgcttctgtcctcagcccattggactgccactgtgttggggctgagcacccggtcccgggcagaatggagacgtccggaagagaacactgacctccaggttgcggtaaatgcaaatgccctgtgaaggagctttgtccttagggcctcaacactgcggccactcaggctgttctctccagattagggggcagtttgtctatctggccccctgtggattagcattctttattggtttaggattagacgtcattcaggttgaacggagttccctgaggtgggtgggtgcgtgtttatgtgttgaggggactattcctagtttatgaggtggttaaggatatcggtggggtgggctggagcggtgtcgggttaggtctgagagaaggcctcgcacaaaacactgtacaaacccgaaaggaagtctgagagacgaaccgccttcctccctgaagcttctagaactggagcagaaagaaggtgtggcccagggccagccccgcctcctccccgggcggaagctgtgtcagttgccggaagtcggcgtgaggtggggcttatgcggcggcgtggtgaaatagatatggcgaccgagggggatgtggagctggagttggagactgagaccagtggaccagagcggcctccggagaagccacggaaacatgacagcggtgcggcggacttggagcgggtcaccgactatgcagaggagaaggagatccagagttccaatctggagacggccatgtctgtgattggagacagaaggtcccgggagcagaaagccaaacaggagcgggagaaagaactggcaaaagtcactatcaagaaggaagatctggagctaataatgactgagatggagatatctcgagcagcagcagaacgcagtttgcgggaacacatgggcaacgtggtagaggcgcttattgccctaaccaactgatgcgtgctttctcaaatatacctactggattaatttatggcaataaaatttttttttgtctttttcagttttatcatcttgggtcaagtagagtgtatactatatcctatgttgtggagaatttatatgttggagactaactgaatttaagtgacccattaaaatctagcacacctgtatgaaaaatcagtgtagaagaatacctcatgtgcagatgctaggtggcaggccagtctcattcatctgactagctctcaacagtattcaaggtacatctggagtctcagcagagttactgtactcaaatggcatgtgtctccaagacagcttatgaatatctaaaaggccagctacctgcctaggagccactatatatatagatagatgtaggttatgaacccagttcataggccaccttgagttagaattttggtacctacaacatgcttgattttgagtgattaaaaaaaaataatttggctgggtgctgtggctcacacctctaatcccagcactttgggaggtcgaggcaggtagatcacgaggtcaggaattcaagaccagcctggccaacatgtgaaaccccgtctccactgaaaatagaaaaattagctgggcatggtggtgggcgcctataatcccagctattctggaggctgaggcaggaatcgcttgaaattggaaagcagaggttgcagtgagctgagatcacactactgtactactgtactccagcctgggggaaagagtgaaactccatctcaaaaaaaaaaaaaaaaaaaa

SEQ ID NO: 3476 - DNA, 3198 bp, Homo sapiens
  source 1..3198: mol_type = genomic DNA
agtaacgccttctccaagtggatggcggggtggacacgcgtcccggcgccccgggctccctgggatatgtagttcgcgacaggacgagcggaaatactgccaggattttaccacctctcgcccatttatttacttctcggtcaccgctttcgggggacagataaacaccacagatgcccatcaaaggggcgcacgggtctggaggcgcagctcaggtttttgcgttggtcaccctgccctccgcacgtggagagggcaggcataaagcaccttgaaaggaaggtgctgtcaatgctatccgacgacctgtcgccgggcaccgcagcatcctcgctcgctccgatgggacgagggacgccggccccagggtaacaggaggcgcctcgccggccgcgcgctggatgctgtgatccaggtccggagccgggttccgccgcggccgcagcgacccgaccccacccgacaggccagaggcaatgcaaagaaacaagtttccaagagaaaaacttcagataaaaagggaagatatcagaaggaatgtcctcagcattctcctcttgaagatattaaacagcggaaagtattagacctcagacgatggtactgcataagccgaccacagtataagacttcttgtggcatctcttcattaatttcttgttggaatttcttatacagcacaatgggagctggaaaccttccacctattacccaagaagaagctttacatattctgggctttcaacctccatttgaagatattaggtttggtcctttcacggggaatacaacacttatgaggtggtttagacaaattaatgaccacttccatgtaaaaggatgctcttatgttctatataagcctcatgggaagaataaaacagcaggagaaactgcttcaggggccctgtcaaagttaacccgtggattgaaagatgaatcgctggcttatatctatcattgccaaaatcattatttttgtccaattggcttcgaagcaacccctgttaaagctaataaagcattcagcaggggacctctctcaccacaggaagttgaatattggatcttaattggagaatcaagtagaaaacatcctgccattcactgtaaaaaatgggcagatattgttactgatctaaacactcaaaatccagaatacctggatatccggcacttagagaggggactgcagtatagaaaaacaaagaagccaacatttttttcttctcaggttgggggaaatttgcattgcatcatagcattccagagacttaactggcaaagatttggcctttggaactttccatttggaaccattagacaagaatcacaacctccaacacatgcccagggaattgccaaatctgagagtgaagacaatatttccaagaagcagcatgggcgtctgggccggtctttcagtgctagtttccatcaggactcggcatggaaaaagatgtctagtatccatgagagaaggaacagtggttaccagggttacagtgattacgatgggaatgattgactatgcttgctactgaacagctggcattatatatgaaactgctatatacaggactgtataaagacagtagaagattttagtaagcctacattaaataggagcagatcttgtggtataaaaaataaccttgtagttctccagatactaagcttgtatatgattatggtgggtgatttcagatatataagcagataagcacagattattgtcctttcaagttaagagtatataatctggacagaaaatttcacaaaattcaataaaattacaactgttgtctaaataagtgaaacacaaattcacttaatagcatcaagatttgaaatacttaagcatgaagtgacttttataatgactcgatccctagacatttgttacagatagttttatgcctaagaccaagatgtaaagtaccatctgcccttaaaaaaaattggggctgtcaatttctagttttcactcatggttaacacgcatttaaaattatttcatgagtctagtagttctttgatttatagcaggatcttgcttgcctcatttgtttcctggttatgttcttaggattctgactaagaggcaaaagagaaaagactcaagaaactgatcctggagatcgagaccatcctggctaacatggtgaaaccccgtctctactaaacatacaaaaaattagccgggtgtagtggtgggcacctgtagtcctagctactcgagaggctgaggcaggagaatggcgtgaacccgggaggtggagcttgcagtgagcggagatcgcgccactgcactccagcctgggcgacagggcaagactctgtctcaaaaaaaaaaaaaaaaaaaaagacggatccttttttttggtgcaaatgggtgacttagtgcattgattcagatttttaaaatttcttgatgtggtttgtaataatcaaatattgacaagaaccttaggtctcgaaagacttttataagtctagatgacgtttgccttaggggtaaagtaaaagaacaattggcaccttaagtttctatacccaaggttatctgtgaaatgagatctcctgatatttgattgctttctcagtatggagtcatatgttgataacagtactgaagatgcataagaaatgcccaagtcactcagaggacaactacccatattccagactctgagctgtttcctttttaaaaatcatatagacaattagctgtttgaagtgagtattaaatatttcagaagtgtgaatttcatgtatttgagctcctctagttgctgttggtttttcttctgctgccaacctgtgactcacaaatgactaggatctcttgttctttaattttagggtcttgttccaggactcaaatcagtaacttggtgattacaaggtgctgaatgtgttggtaaccatatcgcaatacacctcaaggaaaaggttcagatttttatttttaaaatattttcatttttttcttgaattttatatccgtttgttcactcgtacatgcctagcctacagaaggggatatatattatgaaatggtcatttttctgaagagaatattttgcttgaaatgcaaaggactgaaagagatttgtaggttgttgattttgttacttcatactggaacttttaaaaagatttcatcaaataaagttttgttttctacttttaatt

SEQ ID NO: 3477 - DNA, 486 bp, Homo sapiens
  source 1..486: mol_type = genomic DNA
ggacaacgccctggcgagggcgaggtggggtgtgcgccgcgcctgagaggcgggtccctgcctcgccgcaggtgacgggctcccctccccaggtgtgtgggcgcagccggccgccgccgacctcttcggccccctgagaggtgccctctcctcccgagctccctcccccacgaagagtcgggtgcagggctgggccccgcggtgacaggcgcggtgtctacgaagaccgtgtggctggaagatcggccttgctggtatgatttaagcttggatgaaatgagagctttgacagttcagagagtgaagtttgccatggacctgcctctgttaaaacgtgcaggtcaggatctggcagagaaaacaaagaattttgtcagccgaagccttgtcataggagaagtcctctccatggcggacatggccacaggagtgaagtgcggaataatttattggctatttggtggtgctatcaggaatctcggaagc

SEQ ID NO: 3478 - DNA, 3936 bp, Homo sapiens
  source 1..3936: mol_type = genomic DNA
acaccctcgcggagagagcggttcttgcagcatcctgcgcagcccctgcccagtttggtgcagaggcgtggggggcgggacgcgtctttgccattctgatagcggggaaagcggtgagaatcgaagtgaggagccgccagaggagagctgaggagaggagggggaggtcgacgacctgggccctgggcctctgaaggtccatctccactggtggctgtggtggctttggattgttggaagaccatcaccttcagcaggtctgcacttgggaacaatcattctcccccagcccgagcgtgcctctgccctctgtatcattgacagaggctgtatgtttggaaagagaactttgtgactgcagaactgacagttgactctaattcttgctaccaagtttttccccgacccagtgaaagagtgttaagacttcgacctaggacacattgagaaccaaggccaagactggacagggccatataactgggcttcaaccatggctgggactaagaataagacaagagcccaggccaaaactgaaaaaaaggctgctatacaagctaaagctggagcagagagggaggctactggtgttgttaggcctgtagccaagaccagggccaaagcaaaagccaagacagggtctaagacagatgcagtagcagagatgaaggcagtgtctaagaacaaggttgttgctgagacgaaggaaggagctctgtcagagcctaagactctgggcaaagccatgggagatttcactcccaaggctgggaatgagtccaccagctccacatgtaaaaatgaggctggtactgatgcctggttctgggctggggaagaggccactatcaattcctggttctggaatggagaagaggctggtaatagtttcagcactaagaatgataaacctgaaattggtgcccaggtctgtgctgaggagttggaacctgcggctggggccgattgcaaacctaggtcaggggctgaggaggaggaggaagagaatgttattgggaactggttttgggaaggagatgatactagttttgaccctaatcctaaacctgtgagcaggatagttaagcctcagcctgtgtatgaaattaatgaaaaaaataggcccaaggactggtctgaggtaactatctggcccaatgcccctgctgtaactccagctgtgttaggatttagatcccaggcaccatctgaggcaagccctccttcatatattgttctggcctccgctgaagaaaatgcctgttctttgcctgtggcaacagcttgccgcccttctaggaacactcgctcatgctcacagcctatccctgagtgtcgttttgattctgacccctgcatccagaccatagatgagattagacgtcaaatcaggatcagggaggtaaatgggattaagccatttgcttgtccttgcaaaatggaatgctatatggattctgaggaatttgaaaaacttgttagcttacttaagtcaactactgatcctcttattcataaaatagcacggattgcaatgggtgtccataatgttcacccatttgcccaagagtttattaacgaagtaggtgtagtgacacttattgaaagcttgctcagttttccttcccctgaaatgagaaaaaagactgtaattactctgaatcctccttctggggatgaaagacaacgcaaaattgaattacatgttaagcatatgtgtaaagaaaccatgtcatttcctttgaactcaccgggacagcaatctggattaaagatactaggacaactgactactgattttgtccatcactacattgttgccaattacttttcagagcttttccatttgctgtcctcaggaaattgcaaaaccagaaatcttgttttgaaactacttttaaatatgtctgaaaatccaactgcagccagagacatgatcaatatgaaggcattggcagcattaaaactcatctttaaccagaaagaggcaaaagccaatcttgttagtggtgtggccatatttattaacataaaggagcatatcagaaaaggctcaattgtagttgttgatcacttgagttataatacactcatggccattttcagggaagttaaagagattattgaaacaatgtaaaatgagccagagatagaacattttaagccatcttcaaactctagcaggctgtacattacagtgtacacattatacactgcatctttaacacagagtcacctgtgacaggctctaggtttgagctagactattttgggggtatcaaatgaatattataccttgggctgaaaatgtttgatttttatcttgtctagattggcatatttttaacattttacttaagatagcaaaccagttcgttttaagtaagctaacttgttcattagtatctgtggcttaaaatggcaaaaaagaaaatatccttgagtttgtaatctagttacagaagtaaggcatacacacacacaaagataacagtacctagagagagagtgtgtgtgagtgtgcgtgtctctgtgtgtgcacgtgcacgctcatggccaaatgtgcgcactctacataaaggaggcaggagttcctataggctatttaatgtaagagaaactatttttctcctgttccagctgtatcagatactcgttccgcaacacagaaatgactcagaatctcagacaaaatgtattatttgttcaattttaattttgctactacattcataactcttaaattgttaggctgtttcatttacatcaaagttatctcacaaaagagaaggcaggaaacgttttgtgagtgcctattctatgtcaaacactgtgttggcaccatattttacaagtttttttcctcttctcacagtgatcttgtgagttagttacttatatttttattagaactcattattctgggtaccctccaatgagaattagagaggttaaataccttttcctagattcccacagcaggaaggtggcatagctgttttgtctgacaccagaacccatctcaccacactgctttacagtcttcctgaaggacattttgaggtgggggggccttcaaagctcagagactggtttgaatggtttaattttgcaatggatcatgtccatgccaggtgttacaattcttaacttcctccaaattcgtgtgtccattagacatttggctacatctggctggaggtcaggagaaaattctgaggtaaatagatggattttatctggcagtgtcgaaaatagtaggagcctaaaactttgttcaatgagtaagatgtagatttggagtcatcagcaggggaaacttgttagatgtcctttgtatctttttctatccatttgtattttttctttcccaaagagctgaaatcattttataccctgaatttaaaaggtaattgcttttttcctccttgcgaaatcataccttaattttttttttttttttttttaccatttatgatttattctcctatgtgtcatatgaaaggccaaggggctttatcttttactagtaggcaagcctgggcatttctgcatttgtgccagctaacactacaaaatagacttaattagagaaatttagacccagaattgcagcttcaacaacacaaaacaggaaagctagaagaggttgctgtgtcaacctacaagatagtgattcttggaagttggtatggaccagaaagcattcccaggacatttaggctatggctgagttctctaagactcagggtgggaattataatccctggtctaagctgatatgaaagtttctatgtgtgaaaatatggagttatatgctttgagattttctgccagttaaactaaaacaagatcatactgtaaatgtttgtaacttgcttccccccactgtatactgtaaacatctttgcatgtcaataaatatgcctctacaac

SEQ ID NO: 3479 - DNA, 489 bp, Homo sapiens
  source 1..489: mol_type = genomic DNA
atgtcctacaactgttgctctagaaacttctcctcctgctcccacgggggttacttgcactacccaggctcctcctgtggctcttcctaccccagcaacctggtctacagcactgacctctgctctcccagcacctgccagctgggttcctctctctataggggctgtcaggagacctgctggaggcccaacagctgtcagacattctgctactaccccaggactcacatgctctgcaattcttgcctgactatgcatgttgggtctcggggttttggatccaatagctgctgctccctgagctgtggatccaggagctgctcctcactgggctgtggatccaatggcttcagatatctgaattatagaatccatacctccccttcccagagttatagatccagattctgccatccaatctattttccacctagaaggtggttccattcatcttgttatcagccattctgtagatctggtttctactga

SEQ ID NO: 3480 - DNA, 508 bp, Homo sapiens
  source 1..508: mol_type = genomic DNA
tatgttttacagtctccatgttcatctccttttatgactttaaaaatatacctcaagatagtagatgtgatggtcaattatttataaatggcaggaataataaaaataattctatttccctgtattttcaaggtggccttagacatgcatctgccagcattgggggttcagaagcctataggcacatgaaatttgaaggaggtgttcacagagtacaaagagtgccaaagacagaaaagcaaggccgcgtccatactagcaccatgactgtagcaatattaccccagcctactgagattaatctggtgattaatccgaaagatttgagaattgacactaagcgagccagtggagctggggggcagcatgtaaataccacggacagtgctgtccggatagttcatcttccaacaggtgttgtttctgaatgtcaacaagagagatctcagctgaaaaataaagagctggctatgacaaagttacgtgcaaaactgtacagcatgcatct

SEQ ID NO: 3481 - DNA, 2166 bp, Homo sapiens
  source 1..2166: mol_type = genomic DNA
atggaggaagagctgaagtgtcccgtgtgcggctctctgtttcgggagcctatcatcctgccctgttcccacaatgtctgcctgccttgcgctcgcaccatcgcggtgcagaccccggacggcgggagtgcagctggcggcctcggcggcggtgcgggaggtggcggagaccacgcggacaagctcagcttgtacagcgagacagacagcggctacgggtcctacaccccgagcctcaagtcccccaacggggttcgcgtgctgcccatggtgcccgcaccacccggctcctcggctgcggcggctcggggtgccgcctgctcctcgctgtcctcgtcttcgagctccatcacgtgcccgcagtgccaccgcagcgcatccctggaccaccgcggcctgcgcggcttccagcgcaaccggctgctcgaggccatcgtgcagcggtaccagcagggccgcggggccgtgccggggacgtctgcagccgcggcggtggccatctgccagctgtgcgaccgcaccccgccagagccagcagccacgctctgcgagcagtgcgacgtcctctactgctctgcctgccagctcaagtgccatccatcccggggacccttcgccaagcatcgcctgggcgcccccagcggaggcggcggctgcaagagcccgggaggcgcgggggcgggggcgactgggggcagcacggcccgcaagttccccacgtgtcccgagcatgaaatggagaactacagcatgtactgcgtgagctgtcgaaccccggtgtgttatctgtgcctggaggagggccggcacgccaagcacgaggtgaagccgctgggggccatgtggaagcagcacaaggcacaactatctcaggccttaaatggagtttcagataaggcaaaggaagcaaaggagtttctggttcagctaaagaacatattgcagcagatccaggaaaacggactggactacgaagcctgcctcgttgctcagtgtgatgcccttgtggatgctttaactcgtcagaaagccaagctgctcaccaaggtgactaaagagagggaacacaagttgaagatggtttgggaccagatcaatcactgcacattgaagctgcgtcagtccaccggactgatggagtactgcctggaggtgatcaaggagaacgacccctccgggttcttacagatctcagatgctctgatcaagcgcgtccaggtgtctcaggagcagtgggtcaaaggcgccctggagccgaaagtgtctgcggagtttgatctgactttggacagcgagccgctgctgcaggccatccaccagctggacttcattcagatgaaatgtagggtgccacccgtccccctactgcagctggagaaatgctgcacccgtaacaacagcgtcacgctggcctggaggatgccacccttcacccacagccccgtggacggctacatcctggagctggacgacggtgccgggggacagttccgggaagtgtacgtcggtaaggagactttgtgtaccatcgacggtcttcacttcaacagcacctacaacgcccgagtcaaagctttcaactcttctggtgtcgggccttacagtaaaactgtcgtcctgcagacatccgatgtggcctggttcacatttgaccccaactctgggcatcgggacatcattttatccaatgacaaccagacagccacctgcagcagctatgacgaccgggtggtgctgggcacagctgcgttctccaagggcgtgcactactgggagctgcacgtggaccggtacgacaaccacccagaccccgccttcggggtggccagggccagcgtggtcaaggacatgatgctgggcaaggatgacaaggcctgggccatgtatgtggacaacaaccgcagctggttcatgcactgcaactcccacaccaacaggacggaaggtggcgtgtgcaagggggccaccgtgggcgtgctgctggacctgaataagcacactctcaccttcttcatcaacgggcagcagcagggccccacagccttcagccacgtggacggggtcttcatgccagccctcagcctcaaccgcaacgtgcaggtcaccctgcacacaggattggaagtgccgactaacctggggcggccaaagctgtcaggcaattag

SEQ ID NO: 3482 - DNA, 2382 bp, Homo sapiens
  source 1..2382: mol_type = genomic DNA
ttcgcggtgccaccgccccgcccacgcctcctcgccggcctccgagtgcgtcacgtgacgggtcggtggcgctggcggttgctgtcagctgattcccggggttggtggcagcggcggtagcagcaatggactttctcctggggaacccgttcagctctccagtgggacagcgcatcgagaaagccacagatggctccctgcagagcgaggactgggccctcaacatggagatctgcgacatcatcaacgagacggaggaaggtcccaaagatgccctccgagcagtaaagaagagaatcgtggggaataagaacttccacgaggtgatgctggctctcacagtcttagaaacctgtgtcaagaactgcgggcaccgcttccacgtgctggtggccagccaggacttcgtggagagtgtgctggtgaggaccatcctgcccaagaacaacccacccaccatcgtgcatgacaaagtgctcaacctcatccagtcctgggctgacgcgttccgcagctcgcccgatctgacaggtgtggtcaccatctatgaggacctgcggaggaaaggcctggagttccccatgactgacctggacatgctgtcacccatccacacaccccagaggaccgtgttcaactcagagacacaatcaggacaggattctgtgggcactgactccagccagcaagaggactctggccagcatgctgcccctctgcccgccccgcccatactctccggtgacacgcccatagcaccaaccccggaacagattgggaagctgcgcagtgagctggagatggtgagtgggaacgtgagggtgatgtcggagatgctgacggagctggtgcccacccaggccgagcccgcagacctggagctgctgcaggagctcaaccgcacgtgccgagccatgcagcagcgggtcctggagctcatccctcagatcgccaatgagcagctgacagaggagctgctcatcgtcaatgacaatctcaacaatgtgttcctgcgccatgaacggtttgaacggttccgaacaggccagaccaccaaggccccaagtgaggccgagccggcagctgacctgatcgacatgggccctgacccagcagccaccggcaacctctcatcccagctggcaggaatgaacctgggctccagcagtgtgagagctggcctgcagtctctggaggcctctggtcgactggaagatgagtttgacatgtttgcgctgacacggggcagctcactggctgaccaacggaaagaggtaaaatacgaagccccccaagcaacagacggcctggctggagccctggacgcccggcagcagagcactggcgcgatcccagtcacccaggcctgcctcatggaggacatcgagcagtggctgtccactgacgtgggtaatgatgcggaagagcctaagggggtcaccagcgaagaatttgacaaattcctggaagaacgggccaaagccgcggaccgattgcccaacctctccagcccctcagctgaggggcccccgggtcccccatctggcccagcgccccggaagaagacccaggagaaagatgatgacatgctgtttgccttatgagtgtggggtctggcaccctgcagcccaggtccccactgctctcacacccttaggctgggacctccctccctcctctggtgttaaggctgctttgggggtggcttgttacccccttttcctcctctttgaagacggagctgccccagctgtggctgggggtgtggaggcagtgggatgaactgggggacaggtctgcgctgcagtgggatctggctgctctgcctcctttcccaccccagctgaccatgagactttgctgagaagtggaggccccaggacaggctggctggctggctggctgcttgacccagtgtgactctccttcactgagtgataccctgctccgggcccatgccccaaggagcccttcagagcccacactgccagtcgaggcctggctggaggctggccacagtggaaattctgccgagcctcttgtcccttccctgctctgctgcatggggccccatggctttggctggccactgagggtagggtgtggaggtgtggaggccccctgaggagctgcggcggcccaggtacgaagctgcaactctgcgcgcagtgggcgagatctcatcagccccaggctgcaggtgaggcttcaggggatgctggggccccactgcccctccgctgccttgccctccatccttcctctgttccttctggccgggcaccacagcactggggctcacctcttggttgatcctcttgtactgggagaggtgccttttgtatccccaattaaaggtagaaaaccaccctgctagcagca

SEQ ID NO: 3483 - DNA, 1041 bp, Homo sapiens
  source 1..1041: mol_type = genomic DNA
ggccgggattcgcggcccggagctcgggaccggagtcaggaatggagagaagggtaatggttttacctcttattgtggaaacctgttgagatcacagagaatatactgacggcataaaagggcagaaccatagcagggtgcggttgcttcattccagcctcgcagtcacctctgtgccctgctggttgtcttcccagcgctgctgtagttgccttccatggatctataggagagcaagtcctccaggagaagaagtcctcaccagtgaacggagacctctctgaactaaggataccatggccacgtcagccccactacggagcctggaagaggaggtgacctgctccatctgtcttgattacctgcgggaccctgtgaccattgactgtggccacgtcttctgccgcagctgcaccacagacgtccgccccatctcagggagccgccccgtctgcccactctgcaagaagccttttaagaaggagaacatccgacccgtgtggcaactggccagcctggtggagaacattgagcggctgaaggtggacaagggcaggcagccgggagaggtgacccgggagcagcaggatgcaaagttgtgcgagcgacaccgagagaagctgcactactactgtgaggacgacgggaagctgctgtgcgtgatgtgccgggagtcccgggagcacaggccccacacggccgtcctcatggagaaggccgcccagccccacagggaaaaaatcctgaaccacctgagtaccctaaggagggacagagacaaaattcagggcttccaggcaaagggagaagctgatatcctggccgcgctgaagaagctccaggaccagaggcagtacattgtggctgagtttgagcagggtcatcagttcctgagggagcgggaggaacacctgctggaacagctggcgaagctggagcaggagctcacggagggcagggagaagttcaagagccggggcgtcggggagcttgcccggctggccctggtcatctccgaactggagggcaaggcgcagcagc

SEQ ID NO: 3484 - DNA, 567 bp, Homo sapiens
  source 1..567: mol_type = genomic DNA
aggtcgcgccaggcagggcccccttcgcggcgggcccgcgcgggtcccttccacagcaaggccacgcggtccccctagcctctcccgagtcccagctgcggcgtgggcgcgttcccatcgggactcgtggacgcgtcctgctcccagctgcctttcgtctagagaaaggcaaccagatgtttgaggagggcttggtggacaaaggtgacattcatgctccactatatgcaaaactggccaaaggagaggaaatggaaaaatatcttggctctgacaattggttcagatgcagtaaataaaaggaaaatgaacttaagaaatgcttaatggatgcctaaagcagcttgtgatcactggaagatcaattcttttatcatccatactttagaggcagcaaaatcgaagctttcttcaccagtaaaagggaatgcgaagtaaatcacaacaaaattccatttcaccttcatcacactagaatagccaaacttaaaagtctgaattgggtaaaaataagtgactaaagaagcagacctgggaatcacctaacatgtcgaggaggagatttga

SEQ ID NO: 3485 - DNA, 657 bp, Homo sapiens
  source 1..657: mol_type = genomic DNA
tttgttaaaaatcagaaaacctttgacacacttttagataaatacacctactcctttgatcctttgtgtatgtattaccacagggcttaaatatcttaagattttagttaatgtcattttcatgaaagacagtcatttggaagccaagagctctatctatgttttgttcaaatagccgagtaatctactatcttggcagtaattacttctgctgcatttctaatgtgaattgcatgtgagagcttatgaatacactcttttcaagtgtatgtgggttttcaaggttgacgatgtgtcacactgtgtaagggaatcgcatggagatgggcattccgaactgttaatggggacatgggactccagttgtctctgatcacttgtgtggattttcctggcgtagaacgacagaagccgctagtaagtcgccaagacctacagcaggaattctgcaccaaagggcataaaatcttgttattttaatttgcatctgggagaatgtctgagcaaggagacctgaatcaggcaatagcagaggaaggagggactgagcaggagacggccactccagagaacggcattgttaaatcagaaagtctggatgaagaggagaaactggaactgcagaggcggctggaggctcagaatcaagaaagaaga

SEQ ID NO: 3486 - DNA, 3546 bp, Homo sapiens; identical to SEQ ID NO: 3030
  source 1..3546: mol_type = genomic DNA

SEQ ID NO: 3487 - DNA, 469 bp, Homo sapiens; identical to SEQ ID NO: 1740
  source 1..469: mol_type = genomic DNA

SEQ ID NO: 3488 - DNA, 3354 bp, Homo sapiens
  source 1..3354: mol_type = genomic DNA
gcggcggcctgaactcacctaacaccgcagcagcaaccgggcccggccaggttcggcgttccgtgagtgaacgatttagaaatctggactggccagtgacctctgggcttgccattccagcctggtataacctctggctccatgggcagctactggctcctacagaccggatgaagcagactggagacacaagtggagaaaacctccagctggcaaatcctcagagtgtaggcctctggctgccagtcctgcccagcctgcctcatggagaggatgaattggctgagcagactggcctcccggggccctgggcaccgtatacctcaaggggccaatctccaaaccccagtcatggctgatcccgagacctgcctcatggtcttcaagaatcactggtcccaggtggtgcgaatcctggagcggcaaggccctcgggcagctcctgggggtgcagacgatctcagtgctgtgcgcaaccacacttaccagatgttgacactgctggcagaggaccgtgcagttccctcggcccccacaggccctgggcccctgctggagtttgctctgcacgaggatctgctgacccgtgtgttgacatggcagctgcaatgggatgagcttggggatggggtcgaggaacggcgggctgagcaactgaaactatttgaaatgctagtgagcgaagctcgccagccactgttgcggcatggtccagttcgtgaggctctgctcaccctgctggatgcctgtggccgccctgtgcccagtagcccagcactggatgaaggcttggtgctacttctcagccagctgtgtgtttgtgtggcccaggagccttcattgctcgagttcttcctgcagccacctcctgagcctggagccgctccccgtcttcttctcttttctcgccttgtcccttttgtgcatcgagagggcaccctgggccagcaggcccgtgatgccctacttcttctcatggctttgtcagctgggagccccactgtgggccgctacatcgcggatcactcttacttctgcccggtgctggccacagggctcagtgccctgtactcatcactgcctcgaaagattgaggttccaggggatgattggcactgtctgcgacgggaagactggctgggagtgccagcccttgcactcttcatgagttccctggagttctgcaatgcagtaattcaggtggctcaccccctggtgcagaagcagttggttgattatatccataatgggttcctggtgcctgtcatgggtcctgccttgcacaagacctctgtggaggagatgatcgccagtaccgcctatctggaacttttcctacggagtatctcagagcctgctttgctccgtaccttcctgcgattcctgttgttgcaccggcatgacacccacaccatcctcgacaccctcgttgctcgtattggcagtaactcccggctctgcatggtctctctgagtctcttcaggaccctcctgaacctcagctgtgaggatgtcctgctgcagctggttctcaggtatcttgttccatgtaaccacgttatgctgagccagaagccggctgttcgtgatgtggacctatatggacgagcagctgacaagtttctctccctaatcccacgctgttgtcggcaccacgcccccagcccacctcgtccagagcatgcctcatgggcacgaggtcctggaagcccaagtgtggactcctcttctgtgacgacagtaccccggccctccacaccatctcgtctggctctcttcctgcggcagcagagcctgggtggctctgagtctccaggcccagccccttgctcaccagggctttctgcatcccccgcctccagccctggccgacggcctacccctgcagaggagcctggagagctggaagacaattacctggagtatctgcgtgaggcacgtcgtggtgtggaccgctgtgtccgagcctgccgtacctggtctgccccctatgatggcgagcggccctctcctgagcccagtccttttggctcccggactaagaaacgcagcctactgcctgaggaggacaggaacaacgtgggggaaggggaggaggaagagctggggaggagggggcgggctgggggtgcaggggagggccctggtcacctgccccctccccagctcaatggagtgccaggatcatggcctgagggggccaagaaggttcgtctggtgccaaaggagggagctggggaactgctagagggcatctccgagggcatggcaggactagagggctttgggcaggagctccgggagctagaggtggcattgagcaatgggggaactggctcagagtcccccttagaacctccactgccccttgaggaggaggaggcctacgagagcttcacctgtccccctgagccccctggccccttcctcagcagccctttgcggactctcaaccagctgccaagccagcccttcactggccccttcatggctgtgctctttgccaaactcgagaacatgctgcagaactccgtctatgtcaacttcctgctgacggggctggtggcccagctggcctgtcacccccagcccctgctccgctctttcctgctcaacaccaacatggtcttccagcccagtgtcaagtccctgctgcaggtgctgggctctgtgaagaataagattgagaactttgcggcttcccaggaggacttcccagcactgctgtccaaagccaagaagtacctcattgcccgtggcaagttggactgggctgagggccctgcagcaggacctgccccacgccgttctgatcccctagtgaagagccggaggccatccttgggggagttactcctgcggcatgcacacagtccaaccagggcccggcaggcggcacaattggtccttcagcctgggcgagacggagcaggacttggcctaagtgggggctcccctggggcttcaactccagttctactcacccggggcggggcccctgaacgccaaggtgaggctcttcgagtcaagaatgctgtctactgtgcagtcattttccctgaatttctcaaggagttggctgccatctcccaggctcatgccgtcacctcgcctttcttgttggagacttcagaggaaggatctggccctctcatctcaggctgtgggcccctcaatccttaactttcttccatggacaatcagggccatgggtggcccgggctggggctagggcacaggctcctttttatgtttggaggcagtggcaaaaggactttttaatttatttcagatgaatgttttatggagaacttgttgcaatatgtataaaagggaaatctctattctgtgctc

SEQ ID NO: 3489 - DNA, 2179 bp, Homo sapiens
  source 1..2179: mol_type = genomic DNA
agctttccagttctgctttaggacccgccccccagcacgctcctcgacgctgcgaggtcccgccccgcgtgctggccgcggtaaaagtggtagcagcggaggcgagcggagggtttcccgcggcggatttctgacagtcagacttgtccacaagaactcaactggcaaggctgcttttctgtgctaaaactggggagctagtgggcaccatgaagatcttctgcagtcgggccaatccgaccacggggtctgtggagtggctggaggaggatgaacactatgattaccaccaggagattgcaaggtcatcttatgcagatatgctacatgacaaagacagagttttcaagcctatggctgatgctgctgtgaagattgtggagaaaaatggctttagtgataagattaaggttatcaacaagcattccaccgaggtgactgtaggtccagagggtgacatgccatgccgtgccaacatcctggtcacagagttgtttgacacagagctgatcggggagggggcgctgccctcctatgagcacgcacacaggcatctcgtggaggaaaattgtgaggccgtgccccacagagccaccgtctatgcacagctggtggagtccgggaggatgtggtcgtggaacaagctatttcccatccacgtgcagaccagcctcggagagcaggtcatcgtccctcccgttgacgtggagagctgccctggcgcaccctctgtctgtgacattcagctgaaccaggtgtcaccagccgactttacagtcctcagcgatgtgctgcccatgttcagcatagacttcagcaagcaagtcagtagctcagcagcctgccatagcaggcggtttgaacctctgacatctggccgagctcaggtggttctctcgtggtgggacattgaaatggaccctgaggggaagatcaagtgcaccatggcccccttctgggcacactcagacccagaggagatgcagtggcgggaccactggatgcagtgtgtgtacttcctgccacaagaggagcctgtggtgcagggctcagcgctctatctggtagcccaccacgatgactactgcgtatggtacagcctgcagaggaccagccctgaaaagaatgagagagtccgccagatgcgccccgtgtgtgactgccaggctcacctgctctggaaccggcctcggtttggagagatcaatgaccaggacagaactgatcgatacgtccaggctctgaggaccgtgctgaagccagacagcgtgtgcctgtgtgtcagcgatggcagcctgctctccgtgctggcccatcacctgggggtggagcaggtgtttacagtcgagagttcagcagcttctcacaaactgttgagaaaaatcttcaaggctaaccacttggaagataaaattaacatcatagagaaacggccggaattattaacaaatgaggacctacagggcagaaaggtctctctcctcctgggcgagccgttcttcactaccagcctgctgccgtggcacaacctctacttctggtacgtgcggaccgctgtggaccagcacctggggccaggtgccatggtgatgccccaggcagcctcgctgcacgctgtggttgtggagttcagggacctgtggcggatccggagcccctgtggtgactgcgaaggcttcgacgtgcacatcatggacgacatgattaagcgtgccctggacttcagggagagcagggaagctgagccccacccgctgtgggagtacccatgccgcagcctctccgagccctggcagatcctgacctttgacttccagcagccggtgcccctgcagcccctgtgtgccgagggcaccgtggagctcagaaggcccgggcagagccacgcagcggtgctatggatggagtaccacctgaccccggagtgcacgctcagcactggcctcctggagcctgcagaccccgaggggggctgctgctggaacccccactgcaagcaggccgtctacttcttcagccctgccccagatcccagagcactgctgggtggcccacggactgtcagctatgcagtggagtttcaccccgacacaggcgacatcatcatggagttcaggcatgcagataccccagactgaccactcttgagcaataaagtggcctgagggctggggttctg

SEQ ID NO: 3490 - DNA, 3049 bp, Homo sapiens
  source 1..3049: mol_type = genomic DNA
gagctgagaggaccagccattttacttatggaaaacagtgtggcatattctgctgagcttcgccctggaagaagcctcttttatacatctcttcagggaagagagaagcaatgggcatgttagtatacaatgatcacagccacgcaggcctgcaagctgccttttggacaggctgttgactgccgttccaattagctgattggagaatgtggaatgcagagtgataatgctgcatatctgctatcaggcagcagcaaaggtttttgtcttgggaaggcaagctttccctgcaatattatctcagcagctccctagctgcttaccctgaaaacgagggatccaaacggagggtgttgcactctgctaacgctggtcctgtgcgtggctgtggcatatgagcggcaggtctgaaaaagcaggtgtgtgctgggacgggcactggactggaacgcaggcggacgctctcgggtttacctgcttcctgttaacagattgtgggctcccagggcatatgtctgcacgctgaggccgaggcggagaaggggcttcctgagcgtcccagtacactgacagagacacttggattggacttaatcttaaacctctggagttcaagaccttttaaaaagggctaaataaacaatctctacatgtaaaaggccactgactcctacttcctctgtatagagcaactgttgaactcagctgcctgtaggaaaactgaagactttaataacaaactctccaaggtgaaaatgaacacagcggtgggtgtgctcgcaaacgtgccgccatgtctgttacgctaacatctgtgaagagagtgcaaagttctccaaacctattggctgcagggcgtgattctcagtcaccagactcagcttggagatcttacaatgatggcaatcaggagacactgaacggagatgctacatattcctctcttgcagcaaaaggttttagaagcgttcgaccaaacctacaagataaaagatcaccaactcagagccagataacagtgaatggaaactcaggaggtgccgtgagtcccatgagttactatcagaggccgttttccccctcggcatattctctcccagcctcactcaactccagcattgtcatgcagcacggcacatccctcgattccacagacacatatccccagcatgcgcagtctctggatggcaccaccagcagctctatccccctgtaccgatcctcagaggaagagaagagagtgacagtcatcaaagccccgcattacccagggatcgggcccgtggatgaatccggaatccccacagcaattagaacgacagtcgaccggcccaaggactggtacaagacgatgtttaagcaaattcacatggtgcacaagccgggtctgtacaacccaccctacagtgctcagtcacaccctgctgcaaagacccaaacctacagacctctttccaaaagccactccgacaacagccccaatgcctttaaggatgcgtcctccccagtgcctcccccacatgttccacctccagtcccgccgcttcgaccaagagatcggtcttcaacagaaaagcatgactgggatcctccagacagaaaagtggacacaagaaaatttcggtctgagccaaggagtatttttgaatatgaacctggcaagtcatcaattcttcagcatgaaagaccagcctccttgtatcagtcctctatagacagaagcctggaaagacccatgagttctgcaagcatggccagtgacttcaggaagcggaggaagagcgagcctgcagtgggtccaccacggggcttgggagatcaaagtgcgagcaggactagcccaggccgagtggacctcccaggatcaagcaccactcttacaaagtctttcactagctcttctccttcttccccatcaagagcaaaagaccgtgagtcccctagaagttactcatccactttgactgacatggggagaagtgcaccaagggaaagaagaggaactccagaaaaagagaaattgcctgcaaaagctgtttatgattttaaggctcagacatctaaggagttgtcatttaagaaaggagatactgtctacatcctcaggaaaattgatcaaaattggtatgagggagaacaccacgggagagtgggcatcttcccgatctcatacgtagagaaactcacacctcctgagaaagcacagcctgcaagaccacctccgccagcccagcccggagaaatcggagaagctatagccaaatacaacttcaacgcagacacaaatgtggagctgtcactgagaaagggagatagagttattcttcttaaaagagttgatcaaaactggtatgaaggtaaaatcccaggaaccaacagacaaggcatcttccctgtttcctatgtggaggtcgtcaagaagaacacaaaaggtgctgaggactaccctgaccctccaataccccacagctattctagtgataggattcacagcttgagctcaaataagccacagcgtcctgtgtttactcatgaaaatattcaaggtgggggggaaccgtttcaggctctgtataactatactcccaggaatgaagatgagctggagctcagagaaagtgatgtcattgatgtcatggaaaagtgtgatgacggctggtttgtggggacctcaagaagaaccaaattctttggtactttccccggaaactacgtcaagaggctgtgaattgcgctccctccttctgtagaggccgcctgccagccatgcacctgcgtcaacgcgcctgaaacaccccgcgggcctcccgttgtcatgccttacggtttccaatgcgccgtcaccatctccacctgccaccaaaccaccagcagagtagccgccgctgctgtgagcctggggacgacatggcaggctggtccccctccgtgaaagtgtggattcctacttcctgctctaagctttgacacgtcaaaatgtgggatcagaaagaaaaaaatcatgatatttaaaaatggtcaaatatttgaggcaaaaaaaaaaaaaaaa

SEQ ID NO: 3491 - DNA, 2372 bp, Homo sapiens
  source 1..2372: mol_type = genomic DNA
ggcaggcggcgggggcggggcctggaggagcctacaccgactctggaggaagactggagcctttgcggcggcgctgcccctcccctggtccccgcgagctcggagggcccggctggtgctgcgggggccccgggaggttgaaaactaagcatggggaagagctgcaaggtggtcgtgtgtggccaggcgtctgtgggcaaaacttcaatcctggagcagcttctgtatgggaaccatgtagtgggttcggagatgatcgagacgcaggaggacatctacgtgggctccattgagacagaccggggggtgcgagagcagatagcagagagtcttttcagcgtgtggagctgctcaagaaggagattgacaaatccaaggacaagaaggaggtcaccatcgtggtccttggcaacaagtgtgacttacaggagcagcggcgtgtagacccagatgtggctcagcactgggccaagtcagagaaggtgaagctgtgggaggtgtcagtggcggaccggcgctccctcctggagccctttgtctacttggccagcaagatgacgcaaccccagagcaagtctgccttccccctcagccggaagaacaagggcagcggctccttggatggctgaagagctgccgttcctctttcacgatcccagccccatttcagtgtctggggctctggtagatgtgttgagggcaaagtagaggacaagctgtctttcccagtcagccagggagctccccgccaggccacgccccagccactttgctccctctcacctctgggaagtgcaaatactcttggttgacatccccttcctcagccctcccagcctactccccatcccagcttttagaggatctgctccactgtctcctggggcagttgtgggtcactgtcccttccagctgccccagacaggaagcagagtcaccacgcagcagtgtcccttcttgggtctgagttcctattataggtaggggccccaccctctgggcttcccatcagcgacacacacacacttatggcaccagcctggactccagaaaaagggtgtccaggtattgtgtgtatgcatttagttgtgcacacacaaatatgctcctatactggcattaggcgtctcctcatccctcaccctgacctttctcctgtccttttcttggctggaagaagttggcctcctgggagtgtagttttctgttttaaatcccccacccctggctgggctcagtggctcacccctgtaatcccagcactttgggaggccaaggcgggtcgattacttgaggtcaggagttcacgaccagcctggccaacattgtgaaaccccatctctgccaaaaatacaaaagttagccgggcgtagtggcacatgcctgtaatcccagctacccggggaggctgaggcaggagaattgcttgaactcagaaggcggaggctgcagtgagccgagatcgtgccactgcactccagcctggtcaacagagcaagactccatctcgaagaaaaaaaaaaaaaattccccacccctaccaattgttttacttcctcttcctgctcagggagcagatgggcctcactggttgagatggaatagaataactgggctatgagtcaccagcccactttgtgacccagcaagacctttcccctctctgggcatcagtttctcatctgtaagatgaccagagttgcttagatgatctcctagatcctttccagttctcttgatttcgtaaagccaatggcttctccctctttaaggtgctatgccaaccagccctggaggctgggatctgccgctccctccagccaccagggggcaggagtgcactacctgctgtcagtcaccagagtggccgctcagtgcccagcccgccagcctcgctcttggaggctgctctttatcctgcctgtggttttcagctcagagctggacttctatttataagttacctgtatttatatttatatgcccgctctcatggtgaaggctggacaaggtgctcctctggcccctccttcttacctcagatgcctgaacagaacaaggcaaacccgtagcagcctctcaggagctgacaggtcctctttcggggctcaggagggtgggcacacacccagcggcctgcagagtaagcttattacccacaactgtgcccgctttgtgcttctaaggtgcacacctagcctaggtgagacactgcagccaggcaaccaccgacacacgccccttctcaaagccagaggtgagtggggcaggtgcccggggctgggtgagtggaattaggacacacacaggcttgggcttcaagttcatttattgatgcattggttggacacaataaaaccacaattgttatc

SEQ ID NO: 3492 - DNA, 1047 bp, Homo sapiens
  source 1..1047: mol_type = genomic DNA
gaccgtgacgtagaaggtggagaccgcttcaccctgatcagggagtatcggctgcgggtgcgcaaggcgtccaggagtgacctggggctgtggagagcgacccgtggccttgtgtttcagaaaaaggaccagtgatgtctaagactcatgatcatcaattggaatcaagtctcagtcctgtggaagtgtttgctaaaacatctgcctccctggagatgaatcaaggcgtttcagaggaaagaattcaccttggctctagccctaaaaaagggggaaattgtgatctcagccaccaggaaagacttcagtcgaagtcccttcatttgtctcctcaagaacaatctgccagttatcaagacaggaggcaatcctggcggcgagcaagtatgaaagaaacgaaccggcggaagtcgctgcatcccattcaccagggcatcacagagctcagccggtctatcagtgtcgatttagcagaaagcaaacggcttggctgtctcctgctttccagtttccagttctctattcagaaacttgaacctttcctaagggacactaagggcttcagtcttgaaagttttagagccaaagcatcttctctttctgaagaattgaaacattttgcagacggactggaaactgatggaactctacaaaaatgttttgaagattcaaatggaaaagcatcagatttttctttggaagcatctgtggctgagatgaaggaatacataacaaagttttctttagaacgtcagacttgggatcagctcttgcttcactaccagcaggaggctaaagagatattgtccagaggatcaactgaggccaaaattactgaggtcaaagtggaacctatgacatatcttgggtcttctcagaatgaagttcttaatacaaaacctgactaccagaaaatattacagaaccagagcaaagtctttgactgtatggagttggtgatggatgaactgcaaggatcagtgaaacagctgcaggcctttatggatgaaagtacccagtgcttccagaaggtgtcagtacagctcg

SEQ ID NO: 3493 - DNA, 2853 bp, Homo sapiens; identical to SEQ ID NO: 2528
  source 1..2853: mol_type = genomic DNA

SEQ ID NO: 3494 - DNA, 3050 bp, Homo sapiens
  source 1..3050: mol_type = genomic DNA
gtgcgccgtggcgccgcctgcgaccggcagctcgttcgccgcactttggaggcttcggctgcccctccgacccacgtagggcccggacccgggcctccttgtgaacagcgtgccggcttcgccccacgggttcaccggctggctgggcttcaagcgccgaggccgccgcagtgaccccgcccccgggccgaggatgtgaggcgggccgggcgtccccacaccgggcccgggcgccgggagtgggcgtctgggcagcgccaggcgatggccctgctgctggtgctcctcgcctcttggggcctggggcagtgagggggccggcgggcgtgggccgagtggccgcgggcgccatggagggggtgctgtacaagtggaccaactatctgagcggttggcagcctcgatggttccttctctgtgggggaatattgtcctattatgattctcctgaagatgcctggaaaggttgcaaagggagcatacaaatggcagtctgtgaaattcaagttcattctgtagataatacacgcatggacctgataatccctggggaacagtatttctacctgaaggccagaagtgtggctgaaagacagcggtggctggtggccctgggatcagccaaggcttgcctgactgacagtaggacccagaaggagaaagagtttgctgaaaacactgaaaacttgaaaaccaaaatgtcagaactaagactctactgtgacctccttgttcagcaagtagataaaacaaaagaagtgaccacaactggtgtgtccaattctgaggagggaattgatgtgggaactttgctgaaatcaacctgtaatacttttctgaagaccttggaagaatgcatgcagatcgcaaatgcagccttcacctctgagctgctctaccgcactccaccaggatcacctcagctggccatgctcaagtccagcaagatgaaacatcctattataccaattcataattcattggaaaggcaaatggagttgagcacttgtgaaaatggatctttaaatatggaaataaatggtgaggaagaaatcctaatgaaaaataagaattccttatatttgaaatctgcagagatagactgcagcatatcaagtgaggaaaatacagatgataatataacagtccaaggtgaaataaggaaggaagatggaatggaaaacctgaaaaatcatgacaataacttgactcagtctggatcagactcaagttgctctccggaatgcctctgggaggaaggcaaagaagttatcccaactttctttagtaccatgaacacaagctttagtgacattgaacttctggaagacagtggcattcccacagaagcattcttggcatcatgttatgctgtggttccagtattagacaaacttggccctacagtgtttgctcctgttaagatggatcttgttggaaatattaagaaagtaaatcagaagtatataaccaacaaagaagagtttaccactctccagaagatagtgctgcacgaagtggaggcggatgtagcccaggttaggaactcagcgactgaagccctcttgtggctgaagagaggtctcaaatttttgaagggatttttgacagaagtgaaaaatggggagaaggatatccagacagccctaaataatgcatatggtaaaacattgcggcaacaccatggctgggtagttcgaggggtttttgcgttagctttaagggcagctccatcctatgaagattttgtggccgcgttaaccgtaaaggaaggtgaccaccagaaagaagctttcagtattgggatgcagagggacctcagcctttacctccctgccatggagaagcagctggccatactggacactttatatgaggtccacgggctggaatctgatgaggtggtatgatggctgctgggcagcacctcctaacttcagggaataagtgctaaagtgttttgttgccctacttaatttccagcaacagcctcaaccctctccaaccccttcacctggggggatggacaggaggtggcaaaacccagtgcttttataatttttaaaatgcatatgtgttttgtttaaagatcaaggtgctatatatttcagttcagcaggcctactggaaaccaaatgataagctgctgtagacttgaacagcaagttataagagcagatttaacaaacaaatttgctgttattgtgtattgtattgtttttatattttagtctaatgggccacccaaacccaagctgaaaatcagcaaattccatattaagtaccataattcatagccagtgtttcagccaacttagactagacatttggaggtagtataagctgctttgttgaagctgtgtagagtttgctgttcctagatgttcttcagtggaccctcttcactgcaactctgtcagtgataagggcctgtgtagtaaagatgttcagggcattcacatgaccatgcaattgtgggaggcgaagaagacgtggacaggagtcccatccttgctgacaggcatgaaaccgttgctctgagaagattaatggtgtgccctagccccaagttggaggggagaatatgagagaggtgggacaggtcatttgagatgacacctcccaactgcctaccatttaccagcatgttccccatgcattatctcaattggacatcacaagtaatgatacccagagggattattactccacttcaaaagcaaggtttagaagttgagggatctgttcacagtcacatagtttttaagcagaggagccagataatttccaagtgtgacctggactgcctctgcatcaaagtcatatggagtgcttgttcaaacagcagattcccaggccttattttggcctaaagaaccagagtctaggtggtgggacataggaatctgcatttcagtaaactttacacgtgattcttctgcacacagtattgaagagcaactagattaaattctagtttacaaaattaccagttttcttcaagaactaaatgatatgtcctttttttttttttcaaagaggataaggct

SEQ ID NO: 3495 - DNA, 3546 bp, Homo sapiens
  source 1..3546: mol_type = genomic DNA
gagtgtgtgacccagcccttcccccgtggccaagcagagagagtggccttgaggaagccatagcagcaggaccagcatggcctctgctgcctctgtgaccagcctggcagatgaagtcaactgccccatctgtcagggtaccctgagggagccggtcactatcgactgcggccacaacttctgccgggcctgccttacccgctactgtgagataccaggcccagacctggaggagtcccctacttgcccactctgcaaagaacccttccgtcctgggagcttccggcccaactggcagctggctaacgtggtggagaacattgagcgcctccagctggtgtccacactgggtttgggagaggaggatgtctgccaagagcacggagagaagatctacttcttctgtgaggatgatgagatgcagttgtgcgtggtgtgccgggaggctggggagcacgctacccacaccatgcgcttcctggaggatgcagcggctccctatagggaacaaatccataagtgtcttaaatgtctaagaaaagagagagaggagattcaagaaatccagtcaagagaaaataaaaggatgcaagtcctcctgactcaggtgtccaccaagagacaacaggtgatttctgagttcgcacacctgaggaagtttctagaggaacagcagagcatcctcttagcacaattggagagccaggatggggacatcttgaggcaacgggatgaatttgatttgctggttgctggggagatctgccggtttagtgctcttattgaagaactggaggagaagaatgagaggccagcaagggagctcctgacggacatcagaagcactctaataagatgtgaaaccagaaagtgccggaaaccggtggctgtgtcgccagagctgggccagaggattcgggactttccccagcaggccctcccgctgcagagggagatgaagatgtttctggaaaaactatgctttgagttggactatgagccagctcacatttctctagaccctcagacttcccaccccaagctcctcttgtccgaggaccaccagcgagctcagttctcctacaaatggcagaactcaccagacaacccccaacgttttgaccgggccacctgtgttctggcccacactggcatcacaggggggagacacacgtgggtggtgagtatagacctggcccatgggggcagctgcaccgtgggcgtggtgagcgaggatgtgcagcggaagggggagcttcggctgcggccagaggagggggtgtgggctgtgaggctggcttggggcttcgtctcggctctgggctccttccccacacggctgaccctgaaggagcagccccggcaggtgagggtgtctcttgactatgaggtgggctgggtgaccttcaccaacgctgtcacccgagagcccatctacaccttcactgcctccttcactaggaaggtcattcccttctttgggctctggggccgagggtccagtttctccctgagctcctgagaaggagcagttacctactctcctctaagtacaggactcatatcaacccaagtaccatgtggacttgatccctggctgaatcacctggatgacttggaatagaaatgactgctttagaagatgggatggggccgggtggtaagggatagaagagaggactctcaatctactgatcaagtcctttccccaatgcccagtggatggccagggtacctggggactcaggctgctgccagttctgctcaccaccatccgtgcttggcacagaagtagctgcatagaaagggcactggatttgaagtcagaagacctgggttcttgaaccagcctgtcaaccagttgtatgactttaaacaaggcatctcacctcttttcatcttgttttcttccaataatgttagagttcatgtaatcacattctctagaaccatttagtttgtgttaactatgaaccaagcagtgtggtggccactggtgacttgaaaatatagagaaaaaaaaaacctgctctatatctgaaagagctcttgggaagacagagaaacataaagaggaaattacagcacagtgtggtgggtgttacgggaagtccaaccccagcattatgggagttcaggggaaggggcatagcccagcctggaaggagagggtgagtgggggatggctttctgaaaagggtggtctaaaggatgcctatggtcaatagggaaaagaggggaagaagcatcttaagaagaggaaacagcagagaactggctggatgacctgtgactctggagcactgggttgtctccattgtcattatgggcagatgtgtgccatccccagccgacgccactcactgcctccttcctcctggtgttgccacttctgggtgagattaaggtgcagggcctgggggcaggaggacataaggtatagccataaatcataacccagggaccacactcaaccctagggaaattgtcttcctgatcagttgattaccatctgaggtcaagaaatgagatagtgggagcaaatgggtcacaaatagctcagctgtgggctcagaaactgctaggtaaaagaattccagaaggaggccagggcataagttggatgacctatgaactttagtctaaagaattgagactaccgtaattgagactactgtagtgacatctgagaaatgggatggaagagtgaccatgttttattttcttgttcttgtcactattgtattttattttgcataatcatgcccttcactgacagtctccttaacatcatctgtttactctgctcagtgtaaactacaatgctctgtcatctccctactgggtctcctgggaggaggggagccatccagggtgcaaactcaaaggcagagggcacagcgtgcttaggcccaagcttagaattcaattgagaagttctgttgttcatccttacctcagcaggtagaaaagaggtggagatcagaagccagggattagagattgaattgctttccctgggagtgtgcagtatctcattaaaatgttgtatattcaaaaaaatacagacacacacaagtgcctatataatgataaaacatatccaaagcacccaaacctgtgattccagaaaagtagatcctatttttgtttatttttattggctttagctgtgtcttttgaaaggactattatcctctaaaatgtatgtgtatgaagatcctggcttgcagctcgggagctttacacaccttgtgtcactttatcttggtaacgagccaagatcatgcaaccagttcatccatgtctgacccaagagctcttaactgctatgctgcactgcctcattcagagatagatgcctgcatgggtcctggcgattattttaatgctggctacacccccacaggtgacttggattcagaaatacaatttatatttcttctttttaaattgttttattttatttttcttttaatagttatatgtcagtgagaacaatttatatgtcttacactgagaaataaaactgctcataagtgaaaa

SEQ ID NO: 3496 - DNA, 3271 bp, Homo sapiens
  source 1..3271: mol_type = genomic DNA
tcagtcggcctgcgctcctcagcctggcggttctacctccgagggttcgcccgcccttggttttccttacaccttagcctttggctcctttgaccactcgaagccccacagcgtgttccagcggacttcaccagcagacccagaagtggtgggtgaaacactgcctctgttcctccttgagcctgtcgggagctgctgcctgccaccaccatgtctgctgcaaatcctgagactccaaactcaaccatctccagagaggccagcacccagtcttcatcagctgcagctagccaaggctgggtgttaccagaaggcaaaatcgtgccaaacactgtttttgttggtggaattgatgctaggatggatgaaactgagattggaagctgctttggtagatacggttcagtgaaagaagtgaagataatcacgaatcgaactggtgtgtccaaaggctatggatttgtttcgtttgttaatgacgtggatgtccagaagatagtaggatcacagatacatttccatggtaaaaagctgaagctgggccctgcaatcaggaaacaaaagttatgtgctcgtcatgtgcagccacgtcctttggtagttaatcctcctcctccaccacagtttcagaacgtctggcggaatccaaacactgaaacctacctgcagccccaaatcacgccgaatcctgtaactcagcacgttcaggcttactctgcttatccacattcaccaggtcaggtcatcactggatgtcagttgcttgtatataattatcaggaatatcctacttatcccgattcagcatttcaggtcaccactggatatcagttgcctgtatataattatcagccatttcctgcttatccaagatcaccatttcaggtcactgctggatatcagttgcctgtatataattatcaggcatttcctgcttatccaaattcaccatttcaagtcgccactggatatcagttccctgtatacaattatcagccatttcctgcttatccaagttcaccatttcaggtcactgctggatatcagttgcctgtatataattatcaggcatttcctgcttatccaaattcaccatttcaagtcgccactggatatcagttccctgtatacaattatcaggcatttcctgcttatccaaattcaccagttcaggtcaccactggatatcagttgcctgtatacaattatcaggcatttcctgcttatccaaattcagcagttcaggtcaccactggatatcagttccatgtatacaattaccagatgccaccgcagtgccctgttggggagcaaaggagaaatctgtggaccgaagcatacaaatggtggtatcttgtctgtttaatccagagaagagactgataaattccgttgttactcaagatgactgcttcaagggtaaaagagtgcatcgctttagaagaagtttggcagtatttaaatctgttggatcctctcagctatctagtttcatgggaagttgctggttttgaatattaagctaaaagttttccactattacagaaattctgaattttggtaaatcacactgaaactttctgtataacttgtattattagactctctagttttatcttaacactgaaactgttcttcattagatgtttatttagaacctggttctgtgtttaatatatagtttaaagtaacaaataatcgagactgaaagaatgttaagatttatctgcaaggatttttaaaaaattgaaacttgcattttaagtgtttaaaagcaaatactgactttcaaaaaagtttttaaaacctgatttgaaagctaacaattttgatagtctgaacacaagcatttcacttctccaagaagtacctgtgaacagtacaatatttcagtattgagctttgcatttatgatttatctagaaatttacctcaaaagcagaatttttaaaactgcatttttaatcagtggaactcaatgtatagttagctttattgaagtcttatccaaacccagtaaaacagattctaagcaaacagtccaatcagtgagtcataatgtttattcaaagtattttatcttttatctagaatccacatatgtatgtccaatttgattgggatagtagttaggataactaaaattctgggcctaattttttaaagaatccaagacaaactaaactttactgggtatataaccttctcaatgagttaccattcttttttataaaaaaaattgttccttgaaatgctaaacttaatggctgtatgtgaaatttgcaaaatactggtattaaagaacgctgcagcttttttatgtcactcaaaggttaatcggagtatctgaaaggaattgtttttataaaaacattgaagtattagttacttgctataaatagatttttatttttgttttttagcctgttatatttccttctgtaaaataaaatatgtccagaagaggcatgttgtttctagattaggtagtgtcctcattttatattgtgaccacacagctagagcaccagagcccttttgctatactcacagtcttgttttcccagcctcttttactagtctttcaggaggtttgctcttagaactggtgatgtaaagaatggaagtagctgtatgagcagttcaaaggccaagccgtggaatggtagcaatgggatataatacctttctaagggaaacatttgtatcagtatcatttgatctgccatggacatgtgtttaaagtggctttctggcccttctttcaatggcttcttccctaaaacgtggagactctaagttaatgtcgttactatgggccatattactaatgcccactggggtctatgatttctcaaaattttcattcggaatccgaaggatacagtctttaaactttagaattcccaagaaggctttattacacctcagaaattgaaagcaccatgactttgtccattaaaaaattatccatagtttttttagtgcttttaacattccgacatacatcattctgtgattaaatctccagatttctgtaaatgatacctacattctaaagagttaattctaattattccgatatgaccttaaggaaaagtaaaggaataaatttttgtctttgttgaagtatttaatagagtaaggtaaagaagatattaagtccctttcaaaatggaaaattaattctaaactgagaaaaatgttcctactacctattgctgatactgtctttgcataaatgaataaaaataaactttttttcttcaaa

SEQ ID NO: 3497 - DNA, 1935 bp, Homo sapiens
  source 1..1935: mol_type = genomic DNA
ctgccagagaggaagagaaaagaaaggaagaaacattagaaagaaaaaggaaggaaaacggtataaagagagatcaattacccacccttaaatagctagattggggggggaggggggtggaaaagaaagctgtggaggtgtgccccagcacggctgctttgaaaggtttatcatctatccgtttggtttatggagaaaaagaaaatggtaactcagggtaaccaggagccgacaacaactcctgacgcaatggttcagccttttactaccatcccatttccaccacctccgcagaatggaattcccacagagtatggggtgccacacactcaagactatgccggccagaccggtgagcataacctgacactctacggaagtacgcaagcccacggggagcagagcagcaactcacccagcacacaaaatggatctcttacgacagaaggtggagcacagacagacggccagcagtcacagacacaaagtagtgaaaattcagagagtaaatctaccccgaaacggctgcatgtctctaatattcctttccgcttccgggaccctgacctccggcagatgtttgggcagtttggcaaaatcctagatgtagaaataatctttaatgaacgtggctctaagggattcgggttcgtaactttcgagaatagtgctgatgcagacagggccagggagaaattacacggcaccgtggtagagggccgtaaaatcgaggtgaataatgctacagcacgtgtaatgaccaataagaagatggtcacaccatatgcaaatggttggaaattaagcccagtagttggagctgtatatggtccggagttatatgcagcatccagctttcaagcagatgtgtccctaggcaatgatgcagcagtgcccctatcaggaagagggggtatcaacacttacattcctttaatcagtctccctttagttcctggcttcccttaccctactgcagccaccacggcagccgctttcagaggagcccatttgaggggcagagggcggacagtatatggtgcagtccgagcggtacctccaacagccatccccgcctatccaggtgtggtttaccaggacggattttacggtgctgacctctatggtggatatgcagcctacagatatgcacagcctgctactgcaaccgcagccaccgctgctgcagccgctgcagccgcttacagtgacggttatggcagggtgtacacagccgacccctaccatgcccttgcccctgccgctagctatggagttggcgctgtggcgagtttataccgaggtggctacagccgatttgccccctactgaagtgacgtgagacccctgcaaatgggacagccccccagttcatgaggcctggctattgcaatatttactagtagaggaactctatagcaagatgaagaggaaaaacaaacaaacaaacaaaaaaaaacacaaaaaaagaaagaatacttttttatacctcactatgttctttgaatatgtatttttcctttaaatttctgcctttaattcttttgttccaaagattgtgcatttttttctttttttttttaaactgtggtaaaaaaaaaaaaaataatgcatttccatgtctgtatgtccgtgcttagcttattctatcaatcacggaagaggcagtcaaggaggaaggagagacattaggagccgataaatgcatctgatcagaaatcagcagacagaattaccaaagtgtatctggtgctgaatgactgggggacaagcagaagtggaagagatctttctgcaacaggatattcttctagtcttctgagtttctggtctttgacaggcaattctggttggctgtggctggaatccacatgctgatagataggaatttgtgcttacaaagcaggagaattaaaaagacgctttcctctcctc

SEQ ID NO: 3498 - DNA, 2200 bp, Homo sapiens
  source 1..2200: mol_type = genomic DNA
gatggaccccggcgacgccgccattttggagtcttccctaaggatcctctaccggcttttcgagtcagtgctgccgccgctgcccgcggctttgcagagcaggatgaatgtgatagaccacgtgcgggacatggcggccgcggggctgcactccaacgtgcggctcctcagcagcttgttacttacaatgagtaataacaaccctgagttattctccccacctcagaagtaccagcttttggtgtatcatgcagattctctctttcatgataaggaatatcggaatgctgtgagtaagtataccatggctttacagcagaagaaagcgctaagtaaaacttcaaaagtgagaccttcaactggaaattctgcatctactccacaaagtcagtgtcttccatctgaaattgaagtgaaatacaaaatggctgaatgttatacaatgctaaaacaagataaagatgccattgctatacttgatgggatcccttcaagacaaagaactcccaaaataaacatgatgctggcaaacctgtacaagaaggctggtcaggagcgcccttcagtcaccagctataaggaggtgctgaggcagtgcccattagcccttgatgccattctaggcttgttgtccctttctgtaaaaggggcagaggtggcatccatgacaatgaatgtgatccaaaccgtgcctaacttggactggctctctgtgtggatcaaagcgtatgcttttgtgcacactggtgacaactcaagagcaatcagtaccatctgttcactagagaaaaaatccttattgcgagataacgtggacctattgggaagcttggcagatctgtacttcagagctggagacaataaaaactctgtcctcaagtttgaacaggcacagatgttggatccttatctgataaaaggaatggatgtatatggctacctactggcacgagaagggcggctagaggatgttgagaaccttggatgccgccttttcaatatctctgatcagcatgcagaaccgtgggtggtttctggctgtcacagcttctatagcaaacgctactcccgggccctctatttaggagccaaggccattcagctgaacagtaatagtgttcaagctctgctacttaagggagcagcacttaggaacatgggcagagtccaagaagcaataatccactttcgggaggccatacggctcgcaccttgtcgcttagattgttatgaaggtcttatcgaatgttacttagcctccaacagtattcgagaagcaatggtaatggctaacaacgtttacaaaactctgggagcaaatgcacagacccttacccttttagccaccgtttgtcttgaagacccagtgacacaggagaaagccaaaacattattagataaagccctgacccaaaggccagattacattaaggctgtggtgaaaaaagcagaactacttagcagagaacagaaatatgaagatggaattgctttgctgaggaacgcactggctaatcagagtgactgtgtcctgcatcggatcctaggagatttccttgtagctgtcaatgagtatcaggaggcaatggaccagtatagtatagcactaaggtaggcactagcctcccttgggggaaggccactgaggagggtagaggaggcagtgagctgtgtcacaggagttatggaaacacacacacactttgtgtccatggttgaaagcagaataataatagtaatggtagaagagttatttgtgaattcatgacttctaaaaattttttcttaaaatatattaacaacattagagaactgtttcactcataaccatcccacaccactataacatctgtgttcatttgtatagctcatcttctgtccttgcccacacacacatatttttatagggctgtacctagtatatattttatattcttctttttcaaatcaaagtattgtaagtactttcccatgtttctatctactgtagtcattaagaacttgaggtctgaagttttgaatactaccttcaccacctgtgatcttgggcaagttactaacacatttccttgtctatatctagctaccttattagatattaaatgatcgaatgagggttaaatgattatttcatgtaaagctcttagccctgtgcctggtacatagtaaatgctaaataaatagtggtattcttactgtt

SEQ ID NO: 3499 - DNA, 649 bp, Homo sapiens
  source 1..649: mol_type = genomic DNA
aagagggataattcctcccaagatcaatttagcaaaatagcggcactgtcgggatcacacattcaggtcctgaatgtgaggctgccagcagtttcattaacctaatcccaggctccttcctcccgcacctgagggttgctcaggcctccctcaaactagccaatgagaagtgcacgggtcctggtcgcctaggaaaccgcgtgacaacaagatggcggcgctgcgggacggctagcggccctgcgtggaggcgaggaatccgcatctatggagatgtccctgcatcccatgactcggagctgatggccttcatgacgaggaagttgtgggacctggagcagcaggtgaaggcccagactgatgagatactgtccaaggatcagaagatagcggccctagaggacctggtgcagaccctccggccacacccagccgaggcaaccctgcagcggcaggaggaactggagacgatgtgtgtgcagctgcagcggcaggtcagggagatggagcggttcctcagtgactatggcctgcagtgggtgggcgagcccatggaccaggaggactcagagagcaagacagtctcagagcatggcgagagggactggatgacagccaagaagttctggaagccaggtagagcagggcg

SEQ ID NO: 3500 - DNA, 553 bp, Homo sapiens
  source 1..553: mol_type = genomic DNA
agaaggagcagccccccacctggctaccgcagccctctctggttctgtgcagggtattgggatgcgttactgaggcccaaatctgccccactgggaacccccaaaaaagagccagggcaggagaatgagagggaggagccatgaaacccccgccctttaaagacagctctgtggcagctggcccaggccctgcagccctcaccacgttgggactcacttgggggtctcccatgggggtcctaatcccatctcttttcttcccagtccagaatgacagggtccagaaactggcgagccacgagggacatgtgtaggtatcggcacaactatccggatctggtggaacgagactgcaatggggacacgccaaacctgagtttctacagaaatgagatccgcttcctgcccaacggctgtttcattgaggacattcttcagaactggacggacaactatgacctccttgaggacaatcactcctacatccagtggctgtttcctctgcgagaaccaggagtgaactggcatgccaagcccctcacgctcagggagg

SEQ ID NO: 3501 - DNA, 1353 bp, Homo sapiens
  source 1..1353: mol_type = genomic DNA
ttggactgaggagcggacccggccgggcgcaggggctggactggcggagcaggtggggtccgcggccgccggagcgttccggtcggcgtctgggcatctcggcctcggcagaaagcgcgacggccctgctgcgcggggcccgcggcgatgccgttcctgcacggcttccggaggatcatcttcgagtaccagccgctggtggatgcgattctgggctccctggggatccaggaccccgagcggcaggagtctctggaccgacccagtcacctactacacggccttgcacatcgccgtcctgcggaaccagccggacatggtggagctgctggtgcatcacggggccgacgttaatcggagggaccggatccacgagagtagccccttggacctggccagcgaggagcctgagcgcctgccctgcctgcagcgcctcctggaccttggagctgatgtcaatgccgctgacaagcatggaaaaactgctctgctccatgctctggccagcagcgacggggtgcagatccacaatactgagaacattcgtctcttactggaaggaggggcagacgtcaaggccaccaccaaagatggggacacagtgttcacctgcatcatcttcctgcttggtgagaccgtgggaggggacaaagaggaggcccagatgatcaaccgcttctgcttccaagtcacacggctgctgctggcacacggggccgaccccagcgagtgcccagcccacgagtccctcacccacatctgcctgaagagctttaaactgcacttccctctcctgcgcttcctcctggagtccggagccgcctacaactgctccctgcacggtgcgtcctgctggtctggctttcacatcatctttgagaggctctgttcccacccaggctgcacggaagacgagagccatgcggacctcctgcgcaaagctgagactgtcctggatctcatggtgaccaactctcagaaactccagctgcccgaaaacttcgatatccaccctgtgggcagcctggcggaaaagatccaggccctccacttctccttgaggcagctggagagctatcccccgcccctcaagcacctgtgccgtgtggccatccggctctaccttcagccgtggcctgtggatgtgaaggtcaaagccctgcctctgcccgacaggctgaagtggtacctccttagcgagcacagtggctccgtggaagatgacatctgataggtctcaggctacaggaacgggggacacgggcagctcaggtcagcctgttggtagatgctgggacagcattagaagagggtctttttgatctgggagatgagacgggatccttcatgaga

SEQ ID NO: 3502 - DNA, 4073 bp, Homo sapiens; identical to SEQ ID NO: 2186
  source 1..4073: mol_type = genomic DNA

SEQ ID NO: 3503 - DNA, 560 bp, Homo sapiens
  source 1..560: mol_type = genomic DNA
agaccaaggtgagcagctcctacccgatgcttggctcttgattctcagggtcgcggagaactggccgcgggcgtccggggccgggaacagaaagcgggacctgggggccatgggggatccggacagagaccgcgcttggacgtgcacgggcctggcgttcgctggtgctcagcatacggcgcggtgaggagcggcgagcacccggacgtcacctggcctggtagggaacggaacccggggcgcacaacgctatgggcggccctgccaggcctctgctccgagtacgggaaaccgcgattttaatgcggctcatcgcgaaagcttcgtcgttttgtctggctctctttaacacttttgtgagaggaaaaattggcttgcaatacatctcgctggctgtttgcggctactatcagaagttgaattctaataattagctattttataaaggtaacgagaaaaaatacactatgtctgatgaagtttttagcaccactttggcatatacaaagagtccaaaagttaccaaaagaactactttccaggatgagctaataagagca

SEQ ID NO: 3504 - DNA, 2534 bp, Homo sapiens
  source 1..2534: mol_type = genomic DNA
aaactcactgaaaatcaaaccgctaccattaggagccctccacgcttaacatatccgttctttctcgtttgaaagtaaccaggctgctcctccccatttttcgccttcttctcgcggaggctgagagactaaccttacacaacatggcggcctggtgtgtctggtgtcctagagcggacgaaagcaggtgactctctagtcaacttccgacttggactccgaagatcgctacagaaagatctagaagaggtaaaggtgttgctggaaaaggctactaggaaaagagtacgtgatgcccttacagctgaaaaatccaagattgagacagaaatcaagaacaagatgcaacaaatcacagaagaaagcagaacttcttgataatgaaaaaccagctgctgtggttgctcccattacaacgggctatacggtgaaaatcagtaattatggatgggatcagtcagataagtttgtgaaaatctacattaccttaactggagttcatcaagttcccactgagaatgtgcaggtgcatttcacagagaggtcatttgatcttttggtaaagaatctaaatgggaagagttactccatgattgtgaacaatctcttgaaacccatctctgtggaaggcagttcaaaaaaagtcaagactgatacagttcttatattgtgtagaaagaaagtggaaaacacaaggtgggattacctgacccaggttgaaaaggagtgcaaagaaaaagagaagccctcctatgacactgaaacagatcctagtgagggattgatgaatgttctaaagaaaatttatgaagatggagacgatgatatgaagcgaaccattaataaagcctgggtggaatcaagagagaagcaagccaaaggagacacggaattttgagactttaaagtcgttttgggaactgtgatgtgatgtggaaatactgatgtttccagtaagggaatattggtgagctgcatatataaatttgacagatagctatttacatagccttctaagtaaaggcaatgaattctccatttcctactggaggatttatttaaataaaatatgcttattaaacactcctgcaaagatggttttattagtaccctggtcattttgttcaaggaagggttatattgcattctcacgtgaaatataaaaagcaagtcttgcccaataaaaacgctacattgtgtgtattttttgttcagctaagaattggaaaagtatttgcttgccttttaagttactgacatcagcttccaccagtgtaaaaattgagtaaaacctgaagttttgcataaaatgcaaatcggtgcctgtgcttgaaggttgctgtagagcatctgaccccttattaccaccttaagcaatgtatatgccatgcattaccatgcactaattcaatcacaggtgtttctatctagatttaaatatatttgtcaatgaatgtggaatagaaaatctaaacatgacaataatagacatatctttgtatggtaccagttagttttgccgtggatcagatggtttataaaagtaataaccataaagcaaaaaataatttgaaagcccgtctattcctatgctcaataaagttaagtttttcttcattagaacagttttatgatttatttgtctaggagtatgtcagaaaaatcaggcttttagtaggaattactcctattccccctgaagtcaggaccagtgcctgtgatctccattactttattttcctggaggtattagccaacacagttagatcagagaaagcaattgaagccaggcatgaaggctggcgcccgtaatcccagctactaaggctggaggatcacttcagcccaggagtttaaggctgcagtgagctatgatgatgccactgtactgcagcttgggtaacagattgagaacctgtctcattaaaaaaaaaaaaaaaaaaaaagccgttagacacacaggaaaaatccagaagggtaaactaaactaaagctacaattaatatgggaatttggaagaagtggtaggatttaaaatacagaaacagtttatgtataggatagctataagtaaatactgaaacacattatgcctctgtaattggggttgacacatgaacagaatagcagacacaatgcatatgaaagttacagaatatggtaaaagtggggtaaagatgggtttttaatgatactaagataactgaaaataggcatatagatatattccaagccgcctgacgatctaattgtaaaaagtaaagcatacaaatactagaagaaaatggaggaaaacgacattatatgtgacttaaaacctagaagaaataaataaaactattgatcaattttaactacataaaaatgtttataggacaagaaaaaccccaccataacccaaggcaaacaatgtattgacaggattccaataattaagaatacttcatacaaaaagaaatgtaaatgacctttaacatgtaaagatgctcaccttgttcagaagagaataaaccagtgtttttacctttcacttg

SEQ ID NO: 3505 - DNA, 682 bp, Homo sapiens
  source 1..682: mol_type = genomic DNA
ggaaacctgttgagatcacagagaatatactgacggcataaaagggcagaaccatagcagggtgcgcctcgcagtcacctctgtgccctgctggttgtcttcccagcgctgctgtagttgccttccatggatctataggagagcaagtcctccaggagaagaagtcctcaccagtgaacggagacctctctgaactaaggataccatggccacgtcagccccactacggagcctggaagaggaggtgacctgctccatctgtcttgattacctgcgggaccctgtgaccattgactgtggccacgtcttctgccgcagctgcaccacagacgtccgccccatctcagggagccgccccgtctgcccactctgcaagaagccttttaagaaggagaacatccgacccgtgtggcaactggaaaaaatcctgaaccacctgagtaccctaaggagagacagagacaaaattcagggcttccaggcaaagggagaagctgatatcctggccgcgctgaagaagctccaggaccagaggcagtacattgtggctgagtttgagcagggtcatcagttcctgagggagcgggaggaacacctgctggaacagctggcgaagctggagcaggagctcacggagggcagggagaagttcaagagccggggcgtcggggagcttgcccgg

SEQ ID NO: 3506 - DNA, 5029 bp, Homo sapiens
  source 1..5029: mol_type = genomic DNA
actttttatccatgccagtgtcagcttctctccgaaaactgggtaatacgaaatggtctttattggttgtgaacactcgagctgagaaacattttaggatctttgtgtcttttgtgatgattttgtttctgaagaggaagctgtctaaaatattcaagtgtgcaaccaaggatttagatgaagccagcaaacaaaggaatcatgtaatcaggacctgagcgaatgtgcttactcacggcgttagttacacaggtgatttccttaagaaaaaatgcagagagaacttgtttatgcaagaggagatggccctggggcccctcgccccggatctactgctcatccaccccatgcgattccaaattccccaccgtctactccagtgccccattccatgcccccctccccgtccagaattccttatgggggcacccgctccatggttgttcctggcaatgccaccatccccagggacagaatctccagcctgccagtctccagacccatctctccaagcccaagcgccattttagaaagaagagatgtcaagcctgatgaagacatgagtggcaaaaacattgcaatgtacagaaatgagggtttctatgctgatccttacctttatcacgagggacggatgagcatagcctcatcccatggtggacacccactggatgtccccgaccacatcattgcatatcaccgcaccgccatccggtcagcgagtgcttattgtaacccctcaatgcaagcggaaatgcatatggaacaatcactgtacagacagaaatcaaggaaatatccggatagccatttgcctacactgggctccaaaacaccccctgcctctcctcacagagtcagtgacctgaggatgatagacatgcacgctcactataatgcccacggcccccctcacaccatgcagccagaccgggcctctccgagccgccaggcctttaaaaaggagccaggcaccttggtgtatatagaaaagccacggagcgctgcaggattatccagccttgtagacctcggccctcctctaatggagaagcaagtttttgcctacagcacggcgacaatacccaaagacagagagaccagcgagaaaatgatgaaaaccacagccaacaggaaccacacagatagtgcaggaacgccccatgtgtctggtgggaagatgctcagtgctctggagtccacggtgcctcccagccagcctccacctgtgggcacctcagccatccacatgagcctgcttgagatgaggcggagcgtggcggaactcaggctccagctccagcagatgcggcagctccagctgcagaaccaggagttgctgagggcaatgatgaagaaggccgagctggaaatcagtggcaaagtgatggaaacaatgaagagactggaggatcccgtgcagcgacagcgcgtcctagtggagcaagagagacaaaaatatcttcatgaggaagagaagatcgtcaagaagttgtgcgagttggaagactttgttgaagacttgaagaaggactccacggcagccagccgattggttactctgaaagacgtggaagacggggctttcctcctgcgtcaagtgggagaggctgtagctaccctgaaaggagaatttccaaccttacaaaacaagatgcgagccatcctgcgcatagaagtggaggccgtgcggtttctgaaggaggagccacacaagctggacagtctcctgaagcgtgtgcgcagcatgacagacgtcctgaccatgctgcggagacatgtcactgatgggctcctgaaaggcacggacgcagcccaagccgcacagtacatggctatggaaaaggccacagccgcagaagtcctgaagagtcaggaggaggcagcccacacctccggccagcccttccacagcacaggtgcccctggcgatgcgaagtcggaagtggtgcctttgtccggcatgatggttcgccacgcgcagagctcccctgtggtcatccagccctcccagcactccgtggccctgctgaaccctgctcagaacttgcctcacgtggccagctccccagccgtcccccaggaagcaacctccactctgcagatgtcgcaggctccgcagtccccacagatacccatgaatgggtctgccatgcagagcttgttcattgaagaaatccacagtgtgagtgccaagaacagggcagtgtctatcgagaaagcagaaaagaaatgggaggaaaaaaggcaaaatctggatcactataatgggaaagagtttgagaagctcctagaagaagctcaggccaatatcatgaagtcaataccaaatctggagatgccgccagccacaggcccactgccaaggggagatgccccagtggacaaggtggaactttcagaagattctccaaattcggaacaggacttggaaaagctggggggaaagtcgccccctcctcctccgccacctcctcgtcgaagctacctgccaggatcgggactcaccaccacgaggtcaggcgatgtggtctacaccggcagaaaggagaacatcaccgctaaggcaagcagtgaagatgctggaccaagcccacagaccagagctacaaaatatccagcagaggagcctgcttcagcctggaccccatccccaccgcctgtcaccacctcctcctcaaaggatgaggaggaagaagaagaagaaggagacaaaataatggcagaactccaggcattccagaagtgttcctttatggatgtaaattcaaacagtcatgctgagccatcccgggctgacagtcacgttaaagacactaggtcgggcgccacagtgccacccaaggagaagaagaatttggaatttttccatgaagatgtacggaaatctgatgttgaatatgaaaatggcccccaaatggaattccaaaaggttaccacaggggctgtaagacctagtgaccctcctaagtgggaaagaggaatggagaatagtatttctgatgcatcaagaacatcagaatataaaactgagatcataatgaaggaaaattccatatccaatatgagtttactcagagacagtagaaactattcccaggaaactgtgcctaaggccagtttcggtttctctggcattagtccattagaagatgaaataaacaaagggtctaaaatctcaggcctgcaatactctatacctgacaccgagaaccagacgctgaattacggaaagacaaaggagatggaaaagcaaaatacggataagtgtcacgtttcctctcacactagactaacagaatcaagcgtgcatgattttaaaacagaagatcaagaggttatcacgacagattttggccaagttgttctaagacccaaggaggcaaggcatgctaacgtgaaccctaatgaggatggagaatcaagttcaagttctcccactgaagaaaatgcagccactgacaatattgccttcatgattaccgaaaccactgtccaggttctttccagtggggaggtgcatgatattgttagccaaaagggagaagacatacagacggttaatatcgatgccagaaaagagatgaccccccgacaagaagggactgacaatgaggatccagtcgtgtgcctggacaagaaaccagtgatcatcattttcgatgagcccatggacatccggtctgcctataagagactttcaactatctttgaggaatgtgatgaggaattagagagaatgatgatggaggaaaagatagaggaggaggaagaggaggaaaatggggattctgtagtccagaataataacacttcccagatgtctcataagaaggtggccccaggcaatcttagaaccggacaacaggtggaaacaaagtcacagccacactccctggccacagagaccagaaacccaggaggacaggaaatgaacagaacggagctgaacaagttcagccacgtggattctccaaattcggaatgcaagggtgaggacgcgaccgatgaccagtttgaaagccccaagaaaaagtttaaattcaaattccctaagaagcaactcgccgctctcactcaagccattcgcaccggaactaaaacagggaagaagactttgcaagtggtagtctatgaagaagaggaagaggatggcaccctgaaacagcacaaagaagccaagcgcttcgaaatcgctaggtctcaacctgaagacacccctacgtcgataccttcagcttcacgtaagggctccagcggggccccacagacgagcaggatgcctgtccccatgagtgccaagaacagacccggaaccctggacaaacccggcaagcagtccaaactgcaggatccccgccaatatcgtcaggctaatggaagtgctaagaaatctggtggggactttaagcctacttccccctccttacctgcttctaagattccagccctttctcccagctctgggaaaagcagttctctgccctcttctagtggtgacagctctaacctccctaatccacctgctactaaaccatcgattgcttctaaccctctcagcccccaaacaggaccacctgctcactctgcctccctcatcccttctgtctctaatggctctttgaagtttcagagcctcactcatacaggtaaaggtcaccatctttcattctcaccgcagagtcaaaatggccgagcaccccctcctttgtcattttcctcctcccctccttctcctgcctcctccgtctcactgaatcaaggtgccaagggcaccaggaccatccatactcccagcctcaccagctacaaggcacagaatggaagttcaagcaaagccaccccatccacagcaaaagaaacctcttaaaggtcaaatcctattaggcacaagtcggagttacatttaaaaaaaattaacagtctacaacaactgttttcacaagagaatgtaacatattgctgtatcgtttgaggcttaatgctaaatatgtgctaaatactggattaatagatttcagtaaagctc

SEQ ID NO: 3507 - DNA, 7982 bp, Homo sapiens
  source 1..7982: mol_type = genomic DNA
ggggattggcggagcgcgaggagagaatgtgacaagtgccggctcggcggccgccgggggaggccgcgcgcacctgtccctgcccgtctcgcgccgcccgcggccgctcggacgcgcgcagagccgccccccgccgctgccgccgcgtgcgcccgcgaacatgacttctgccttcaagctggatttcctcccggacatgatggtcgagggccgcctgctcgttcctgacagaattaacggcacagccaacaagatgaacggagctttggatcactcagaccaaccagacccagatgccattaagatgtttgtcggacagatcccccggtcatggtcggaaaaggagctgaaagaactttttgagccttacggagccgtctaccagatcaacgtcctccgggaccggagtcagaaccctccgcagagtaaaggttgttgtttcgtaacattttatacaagaaaagctgcacttgaggcccagaatgcactgcacaatattaaaactttacctgggatgcatcatcccattcagatgaaacctgcagatagtgaaaagtccaacgctgtggaagacagaaaattgttcataggaatggtatcgaagaaatgtaatgagaacgacatcagggtgatgttctctccatttggccagatagaagaatgccggatcctccggggacctgatgggctgagtcgaggctgtgcgtttgtcacattttctacaagggcaatggcacagaatgcaatcaaagccatgcatcagtctcagaccatggagggctgctcttcacctatcgtggtgaagtttgctgacactcagaaggacaaagagcaaaggcgcctccagcagcagctcgctcagcagatgcagcagctcaacactgccacctgggggaacctgacagggctgggcggactgaccccacagtatctggcgctcctgcagcaggccacctcctccagcaacctgggtgcgttcagcggcattcaacaaatggcaggcatgaatgctttacagttgcagaacctggcgacgctggctgctgctgcagctgcggcccagacctcagccaccagcaccaatgcaaaccctctctctaccacgagcagcgccctgggagccctcacgagtcccgtggctgcttcaacccccaactccactgctggtgcagccatgaactccttgacctctctcgggactctgcaaggactggctggagccactgttggactgaataatattaatgcactagcagttgctcaaatgctctcaggtatggcggctctgaatggaggacttggcgccacaggcttgacgaatggcacggctggcaccatggacgccctcacccaggcctactcaggaattcaacagtacgcagccgccgcgctgcccactctgtacagccagagcctgctgcagcagcagagcgctgcaggcagccagaaggaaggtccagagggggcaaacctctttatttaccaccttccacaggaatttggagaccaggacattctgcagatgttcatgccttttggaaatgttatctctgctaaagtcttcattgacaaacagaccaatctgagcaagtgctttggttttgttagctacgacaatccagtctctgcacaagctgctatccaagctatgaatggctttcagatcggcatgaaacgcttgaaggtgcagctgaagcgttccaaaaacgacagcaaaccttactgatcctaaccccagaggctccctgctctcattttagctttcttaggacatcttcatgcccgttagttcatcgtttgcctagcatgtccctgtggcgtctcaaaaaaaagtttcatcgtcccgtcattgtttctgatgtctttctgacctcacatcatatttggttctcctactgacctttgatctagtttgacctttgaaatttgcatgtgacctcatctagctatgaattctgggaagtcaatgtgaaaaacattgctgcattcatgcaagactgaaatttattattagacaaattcattatagaaaaaacctgtggcaaaaacgtttctttcttattttttttcttttcctaaaacagacttgaaagtattatacagggattggcattcttcccggtcactggtaacaatagcaatatgtgtccagggacacagaatgttggtttctaacagactacttccaaaaacagtttgagaaaaaaactgtctgattttaagtctctagaggtctgtaatagtttttacatttttcaggcagtgtaaagttttttgataaggccattttaggtggctcactttctcattaagatatatatatagaaccactttttgtagattagtataagaaaaatatttaccctgttttggggcaaatgctacctatttgtgtcaccttttgctgaactcacagttagacaatccatggtttaatgcacatgaaattacctatattttatactgtttcaatgtacaggagaaaggttactgtaaactgtgttatgttggtgcttctgtgaattaagttgtggtttcatcatgagtcttaatgttctttgttgataagacaagtttagaattggtttacttaatacaaaaaaaaaaaaaagaatttcaaaaaaaaaagttgtttgcttaaaaaaaatttcatgtgagggaaaaaaaaaaaacctattccagaataagttttgtgttggcttgtgaagcattgatgtcattttttttaattgtggactatttagatgtgtttgtgttcagcaaaatgtgatgtttttttcttttaaagaaaaaaagtgaaaatatatagtgccaaattccaaaggtacttccttcctagagcttcagtgtgtttcttgtgagaagtaatttgataacatgggtattttattatgtgttttgtataaatccctaatatttaaaaaaaaaaacaaaacaaaaaaaggttacaaagtttgttaacttgctatcctgtggtcttgttgcctgaaattgttattgtttgttatttctctctgatgttttttgtaagacattgtataagtgcccatgtcccacttttttaaccactccgcacatcagtgctgtgaaggcaacctcaccatgtattttcttcataatctatggaaacctctaaggtgagaaagttttgaacttttaaccctttctacccagagctatctggaatgttgatgactttttatactgtcatgatttgagtttgttttggggtgtttccaatttggatttttttccctgcatctatcctctaagttgtttcggtttgactactttgttctttggttaagatccaaaagaaaacagaaaacaattccacgaggccaatctaaagggaaaaaatcctacactacttttactacttttgattatttctcatttttgggaaaagaattcctaatgtgctactagaattccttcttcagttttaacgagtaattggataaaccctgagggaaaacggaggtagattcagcacctaacaatcctgtatgcttttgagatcacgtttagtgctatgtcctagtctagaatattttcatataccttgcagtaaaacgactttgtggcaggacagtctcttgaggggttttgtttctgtttcctaaatactcctaaataatatttctaatcagccattatgctggggcatctctgatcccagtaggtacctctgaatataccaggtgtctggagttagaagcccatagccctttcccagcctttttggtttttttaattgaacacatttcatctaagtaaagctcagttctttatcacaatttactgaccaaatacctagcaccagttcctgctgccactttttaaagtgccatatgactttctacgaacaggtaccttgctgtcttgacaaatcctaatgtcacgcctacagccccaacacaagctccagtcttcctcttcggcatgccctggaagcttcttggcctcagctccccttccccgctcagcaccctgttaggatcagtgtgtgtggatgggatagccctgggatggaaaggactagcctctactgatgcaaaaaaacaaaaagcaacacaaacgtttccttcttatagcacatgcacttccttacaatgacatgatttgtattatcctcacatgtgtttactactgctggggccttccttcatcctctgagggctattttgtactttctgcagcaatcagcttaataacaacacttattgcacctgtctctctctgagaacacggtgtgtctcgacacgtaccacgtacgtggaaacacaagagcccaccacttgaatttctaagaccatttcattctgaaacttcttatcaattacctaaatctcaacgaaaaacaatttactgaagccgactcccctccccatctccctctcaacctcaacccacctgcatgcatctcccccagaggaaacactgagggtaggggacaggaggctcaggacgcgccctctgaatcgagtgtttcttcttcacaagtcaccaagagaggacatgagggggaaagtcctttttgcccttctccaaaaaataaccttccacagagacaaactgtccttctatccacttttatcttttaataaatatcaaaaggaaaaagctgcaagggtgcaaagggcctgtgccagaagaaaacacacacagggaaaccgctttttttaatcaattgtagagaatagtcatttttaatctaaattagagaattgtgatacaatggcagtcctcaaaggcgtaacgagttcatctttctttcaccataggggttatagttggcttgtgctactctggaatcattttactgtttgtttttattatcttaagtgctaattaaaaaaaaaataaaattttaaaaaaacctgtagtttcattacctttttgaataatgtcatacaaaaaatgtatttgtttttttgtgctgtgagaattgatgtttgtagattaataatcattttgtttagaattacaaaatagtttttaaatattgtctgagaaaagccaaagttaatgcaacctagtggaaactgtaagaccatttgagtattgtttgttttattgatgcatttggattttgttgtttgatggaatttgagccaaaaaaaaaatacgcaggctttcctatttctacaactgattgtacttatgcattttgtaccagtggaactttttatactggagattaaaaaaaaaatggaaatttttgtggcttgctctggtgggcccctgacaatgactgatttcaagtttgatttcgggttgattgattgattgattgatagaaagaaagttgcttttcttttgagaattaaaaactttggcttgatttcttttttccctttgcttatatctagcattagaattttgtcttaaaataacagcggtaagtttcactttttattctgtattgtgcagttacacaataaggtaattagatttagaagtactcagtcactttaagtggataaatgtattagttaaaactttagggtttgcttttttgctgtttagatcaaagttttttctgattcttctgtcctcattgtgaacataaccgtgtagttgaaacagtcaaacttatttttgtaatgtatgttattgtgtgatgcagttttttgcttctgtctccaatattaaaccattttcctaatacttgtttctctctctgcgtgttgtattgttggtagtcattatatgttggtgatacatctgcacacctcactgtttcacgtatctgtttttttctctatgttgtgtaaaaagatacagtcgattccacttaagtgaatatctgatttggggaagaggaaactgcacagcagccacctttgatttatgtacaaccgcccacttgaactcctgcttccaagatttatacacttttttcctacagttcacctcagtaactgcctttggggttggatttgccaaggtgttttacggtcttttgaccacacaggttaatttccccttctctcccctccctcatgagtctatccacgcagttcttaacatacattccaaactgctgcggggtttcctctccacacccacgaggccaaacccgcatcattacagtccaactcttcttagacactaatcactttctaaaagaagtgagttctccagggaagaaaaatcaacttagccagtgaaaagggttaaacttaagtctattatttgttgccctcaatcaaaagatatgtatagaaaagtcatttaaattatttatttctacaagctaattgaatccaggagcagctttaattattaacactaacggaagagaaaagaagtatttccaagggctcaaatggaagctgtactcagtccggtggaggcagggggaggtaaagtttctcacactcaagtcgtcttcatagtttactgtccttttccaaacaaaagctaataacgccatacgcatccacacactccctcctggatgaacctaagtctcgtccccactgtcaccccaaggccagttatcaaaaactgttccttctctgccctcaaagactgaagccgcaggccctgttctgcctctgctcaggaatctgattgctcttaaagtgctcttacaagattccgtcgatgtttgctccctctgtcttatctctccttccagtattttcagacgcacaagctctgactcaggccacccagcacctggcagccttcctctgcgtgccagtgaaatctctcccagtaggtgctcaggctcttcaccctctcgttgcagcagcccctctggcccgagattgtattttctagtctgctcaagaacagaggggcctggcgaggtggaggaagggaggctccctccccggggctggccgcctcagtgatggtgatgccaccagctccagcctgcacggatggagctcacttcctaccatcacttctgctttcagtctcctcatagccttcggcagtctcctctgaaaacacactgcctacgttagtgggaaaggatggctaagggtgtgatttctttttattagggaggtgggagggggatgttgggaggcatggggggtgattaaattatcatttccaaggtgcaagtgtttatttttcaaatctataagtacatagttccaccattttggcacaagacaaaatactcatgctaagcaaaggaagagaaagacaaagccagtttttgttgcttttctaaagcaacaaataattctccaaagaaggggatgaaaatgctagttcctttaagcacttactgactgtaaagttggtccctgcttaaattcatacccatagttttgagtcggtatgacaccactgcagtgtgagcaaggtgaatccgtgtgccatgcatggaccaccttgggataccgcagcaccatcaacatccgccttgctgatggaagccacacacgctgcccagcccacagcagtcgcacgcagccgatgggctcggactcttagctggcaggctaggacacacagtgaacattaatgtactgtgaatcgttcctgataagtgaataaaacattgtgaccaaacaatcagcttattcacttatcaggaatcgactgttctgctaatttgctgttgttgtttttcatctctgttgtagttcactatttttgctgtgttctgttttctcctctcatgcttgggcaaatcactgggaatattatcttcatgtgaccatgaaacgtttctattgagtgaaaatgatatcttaacaaaatctatgcacttgctatcaggaacacaatactggatgtgtcttatatatattgaactatatagtactcgatttcttaaataaagcttaagaaaggactctgttgtgtgtaaagttaatgtgattatttttcaaagcagtgtttctaaggggtatttttgttcttttaagtcttgagtgatacaggatatttttcattaaaattatatcactggctttatgacttaatattcaataaattgactttgg

SEQ ID NO: 3508 - DNA, 611 bp, Homo sapiens
  source 1..611: mol_type = genomic DNA
agagttggcctggagagtgagcggtggagggagtggaacaaggcttcgtcaagagtccccaggagtccaggggcgcccccgagacgggttgacgatgtgtcacactgtgtaagggaatcgcatggagatgggcattccgaactgttaatggggacatgggactccagttgtctctgatcacttgtgtggattttcctggcgtagaacgacagaagccgctagtaagtcgccaagacctacagcaggaattctgcaccaaagggcataaaatcttgttattttaatttgcatctgggagaatgtctgagcaaggagacctgaatcaggcaatagcagaggaaggagggactgagcaggagacggccactccagagaacggcattgttaaatcagaaagtctggatgaagaggagaaactggaactgcagaggcggctggaggctcagaatcaagaaagaagaaaatccaagtcaggagcaggaaaaggtaaactgactcgcagccttgctgtctgtgaggaatcttctgccagaccaggaggtgaaagtcttcaggatcaggaatcaattcatttacagctttccagtttttccagcctgcaagaggaggat

SEQ ID NO: 3509 - DNA, 2571 bp, Homo sapiens
  source 1..2571: mol_type = genomic DNA
agtagcgggccgtcggttgggcgcagacaggccgcagaagatggagagatggagccaccccaagagacaaataggcctttcagcacacttgataaccgcagcgggcaggtccaagtcctgtccgccaccccgctattgcagaggaatccctacagcagcccggatatcatgcacattaaagggtcggaggcttcttcggtcccttacgccctgaaccagggcacgacggccctgcctaagaacaagaaccaggagggcaccgggcaccggctgctgaacatgctgagaaaaactcttaaagagtctgatagtgaagaactggaaataacacaggagacgccaaatttggtgccatttggggatgtggttggctgcctgggcattcatataaagaactgcagacattttatgcctaagatcagtttacaacattatgctaatttattcattcgcatctctataaacaaagctgtgaaatgtacaaaaatgtgtagcttgctatccaaaaacgatgagaagaacactgtaattaagttcgatgaagtgaagtatttttctgtacaggttcccagacgttatgatgataagcggaataatattttattggaactcatacaatatgacaatagagaaaaacgtgctttcttgttagggagtgttcagatacatctttatgaggtaattcagaaagggtgcttcattgaagaggtccaagtgttgcatggaaacatatttgtctgcaggctggaggtggaatttatgttctcctatggaaactttggttatggattttcacatcagttaaaacctcttcagaaaattactgagccatccatgtttatgaatcttgcaccacctccagaaagaacagatcccgtgacaaaagttattacaccacagacagtagaatatccagcattcttatccccagacctgaatgttactgttgggactccagctgtgcaatcctccaaccagccatctgtagtgcgacttgaaaaacttcagcaacaaccccgggaaaggctggaaaagatgaaaaaagaatatagaaatctgaatacatggatagataaagctaactatttagaaagcattctaatgccaaaattggaacataaggattctgaggaaactaatatagatgaggcatctgaaaacacgaaaagtaatcatcctgaagaggagcttgaaaatattgtaggagtagatatccctcttgtaaatgaggaagctgaaactactgcaaatgagttactggataatgattctgagaaaggcctgactataccaactttgaaccaatcggaccaagataattcaactgctgatgcttctaaaaatgatgaatcaacaccttcacccacagaagtgcactcattgtgcactatttctaaccaggaaacaataaaagcaggcagaataccacctttaggtgaacgtcaatcagaaagcatgccagacagaaaaatgaaaaatgtattttttccattagaagtaaaattaaaagataactatccaagcattttaaaagcagactcatctctatcagaggtaaatttgaggagtatctgtataaatccaaagagcaggaacttagattcatctccaacagaaattagctggcaaaacaacaatctaaacttagctgaaagggagaacacaggcttagtttccaccagattaaaaattaaaaggtagctttcaaagccaagacccaaaagaaggccttgagctcaaggtgtctgcccttatattagaagtataagactagggagacaaaataatctattttaaaaaattaaatacaaataaatcgaaaatgcattcaaatgtctccaagtggaaatgtgtctaagtatattaaatattcctgctttacttatatcaatcaagaaatgaggataaaaaactttcaagaaaagcaaagtgatttgagatgccagtaatacaaattaatctcttgggttagtaattcagctgaaagtgtaacgacaataacaaaatgtaaattcaaaggaaatttaaaagcctgaggagttatttcagtggaaattcttaataaaactattatattataggaaataacatgttctccttattacaaataattttatagtttaaaatgagaataagagtgtgaatttaaaggtacaccaaataatagactttctcaaaatgacagccattctacttatatctttatatcttattggaataactattacaggtagttcatcaaatggtataaaaagatatataggtcagaagataaagaatttgagttctaagtgagattctgcttctaaatactagcttgggcatctaagtctctagacctatttttctcattatttgaatggtagatcagactaggtcatttctaaattctctcccaaatttcaaaagacataattttaactgggaattactctcagttacctatgtcaaataacattcttgttttttctgaatgtgaaagtaatgcacagtcacagaaaatttagaaaatggagagaaatgtaaaagaaaaaataaaagcagttataattctactgctagatttaacaa

SEQ ID NO: 3510 - DNA, 587 bp, Homo sapiens
  source 1..587: mol_type = genomic DNA
gggaatttccttgtgcctccattcccgggaggggggagcggcgttggaggccaccgtttccagatgaggaaactgaggccttggactagaacagaggtctcctgactcagtccaggactctttctattacatcatgcggcctgatatttgtctttatggaactcagcaacatcacatacaggggttatatcctgtgttgtgacctcatggtttaagtgggaataaagatgagtataagcagtgatgaggtcaacttcttggtatatagatacttgcaagagtcaggattttctcattcagcatttacctttggtatagaaagccatatcagtcagtccaatataaatggtgccctcgtcccacccgctgcattgatttctatcatccagaaaggtctacagtatgtagaagcagaagttagtattaatgaggatggtaccttgtttgatggtcgaccaatagagtctctgtccctgatagatgccgtaatgcctgatgtagtacaaacaagacaacaagcttatagagataagcttgcacagcaacaggcagcagctgctgcagctgccgcagctgcagccagccaa

SEQ ID NO: 3511 - DNA, 567 bp, Homo sapiens
  source 1..567: mol_type = genomic DNA
gtaaaaggccactgactcctacttcctctgtatagagcaactgttgaactcagctgcctgtagagcgagaataggacagactcgtataccattctgatctgggtgcatttcttcagaaggtacgctgtcctcacgggaaaccgcccgccactgcctgggtttggggctgatgaggccaggaagaaacttaatgcgtgcactctaacaaaaagatttcccaggcgtgattctcagtcaccagactcagcaaaaggttttagaagcgttcgaccaaacctacaagataaaagatcaccaactcagagccagataacagtgaatggaaactcaggaggtgccgtgagtcccatgagttactatcagaggccgttttccccctcggcatattctctcccagcctcactcaactccagcattgtcatgcagcacggcacatccctcgattccacagacacatatccccagcatgcgcagtctctggatggcaccaccagcagctctatccccctgtaccgatcctcagaggaagagaagagagtgacagtcatcaaagccccgcattaccca

SEQ ID NO: 3512 - DNA, 958 bp, Homo sapiens
  source 1..958: mol_type = genomic DNA
gcggcggcggcagcggcagcggcagcggcgctgagttttgtctcccgggccgtctgggcgcgcgcgggtgtcccaggtaccccgccgcctccctccttcccgcaggactcgtccctcctggccctgggccccaacggtgcccgcctgcccggcggtcggtcagcgcacagggcacggcttcctctgcttctcccggaccacttagtctcaacccgggtgtgtttgcactactagagaatgaaatatgactgaggactctcagagaaactttcgttcagtatattatgagaaagtggggtttcgtggagttgaagaaaagaaatcattagaaattctcctaaaagatgaccgtctgggaatcttgcctccacaccacgagtcccatgccaaggtgatgatgtatcgtaaggagcagtacttggatgtccttcatgccctgaaagtcgttcgctttgttagtgatgccacacctcaggctgaagtctatctccgcatgtatcagctggagtctgggaagttacctcgaagtccctcttttccactggagccagatgatgaagtgtttcttgccatagctaaagccatggaggaaatggtggaagatagtgtcgactgttactggatcacccgacgctttgtgaaccaattaaataccaagtaccgggattccttgccccagttgccaaaagcgtttgaacaatacttgaatctggaagatggcagactgctgactcatctgaggatgtgttccgcggcgcccaaacttccttatgatctctggttcaagaggtgctttgcgggatgtttgcctgaatccagtttacagagggtttgggataaagttgtgagtggatcctgtaagatcctagtttttgtagctgtcgaaattttattaacctttaaaataaaagttatggcactgaacagtgcagagaagataacaaagtttctggaaaat

SEQ ID NO: 3513 - DNA, 3250 bp, Homo sapiens
  source 1..3250: mol_type = genomic DNA
gagtcaggaatggagagaagggtaatggtgttacctcttattgtggaaacctgttgagatcacagagaatatactgacggcataaaagggcagaaccatagcagggtgcgcgctgctgtagttgccttccatggatctataggagagcaagtcctccaggagaagaagtcctcaccagtgaacggagacctctctgaactaaggataccatggccacgtcagccccactacggagcctggaagaggaggtgacctgctccatctgtcttgattacctgcgggaccctgtgaccattgactgtggccacgtcttctgccgcagctgcaccacagacgtccgccccatctcagggagccgccccgtctgcccactctgcaagaagccttttaagaaggagaacatccgacccgtgtggcaactggccagcctggtggagaacattgagcggctgaaggtggacaagggcaggcagccgggagaggtgacccgggagcagcaggatgcaaagttgtgcgagcgacaccgagagaagctgcactactactgtgaggacgacgggaagctgctgtgcgtgatgtgccgggagtcccgggagcacaggccccacacggccgtcctcatggagaaggccgcccagccccacagggaaaaaatcctgaaccacctgagtaccctaaggagagacagagacaaaattcagggcttccaggcaaagggagaagctgatatcctggccgcgctgaagaagctccaggaccagaggcagtacattgtggctgagtttgagcagggtcatcagttcctgagggagcgggaggaacacctgctggaacagctggcgaagctggagcaggagctcacggagggcagggagaagttcaagagccggggcgtcggggagcttgcccggctggccctggtcatctccgaactggagggcaaggcgcagcagccagctgcagagctcatgcaggacacgagagacttcctaaacaggtatccacggaagaagttctgggttgggaaacccattgctcgagtggttaaaaaaaagaccggagaattctcagataaactcctctctctgcaacgaggcctgagggaattccaggggaagctgctgagagacttggaatataagacagtgagcgtcaccctggacccacagtcggccagtgggtacctgcagctgtcagaggactggaagtgcgtgacctacaccagcctgtacaagagtgcctacctgcacccccagcagtttgactgtgagcctggggtgctgggcagcaagggcttcacctggggcaaggtctactgggaagtggaagtggagagggagggctggtctgaggatgaagaagagggggatgaggaggaagagggagaagaggaggaggaggaagaggaggccggctatggggatggatatgacgactgggaaacggacgaagatgaggaatcgttgggcgatgaagaggaagaagaggaggaggaagaggaggaagttctggaaagctgcatggtgggggtggctagagactctgtgaagaggaagggagacctctccctgcggccagaggatggcgtgtgggcgctgcgcctctcctcctccggcatctgggccaacaccagccccgaggctgagcttttcccagcactgcggccccggagagtgggcatcgccctggattatgaagggggcaccgtgactttcaccaacgcagagtcacaggaactcatctacaccttcactgccaccttcacccggcgcctggtccccttcctgtggctcaagtggccaggaacacgcctcctgctaagaccctgagccctgacatctgcccccagccccaaccctcagatgcttcacttctttggaattccaggactctcaatggggggacgggatgcctggcctaagcacctggagcaggggaccccatatccactggtagccacctccccattgctgtggccccctgaaatctcactcagtgctgttgctccatctactgccctaatggggctcttttcccacctcctgctggtttcccgagggaacttctgaccctggagtccatgagggctcctttcctttttgaccacgaccttggccccagctctgcactctctggaataagggcccgatgcagcattttcttgcccagtgtggcaagacctcagaaaaaccagtcaattacgcctaagatcattttgctgtccttaaaccccccaggttccttcttgcacaaatccactctgctgcccaccttctctggcattttaaacagacctaccccaccccaactcagagttaagcatacatggcaatgctgaaaataaacaaaatccactgaggcttcccaggccatttaaagcctggagtaccagcgcatatcatctcatggggtccagagtggagtccaggcttctctgaaaccagggctgagcatatttccatagccaaggaggtgggactccctggagctatctgtggtcttagggaaggatccagacatacacggctttggggtacaagctgtgatcactgatcaataaattatctctagattggtccttgtgaggggagttttaagaatccagaacatcttgctcttgatcagcacatccaaaaacaccaagacaaacatccagtggagcagaacctctcctgcctcgggagttctgaccgggttccccagcagggtgttaagcctctgtctctggccctaccagcatccaggttccactttcctaggagagagtggagatgggaagacagggaaaggaaggcagcaggaggccacaagcccaccaggtcttcatgtcaagagagggagtaacatgtcttctcattgcccacggacccaacctctgtccaggtgcccctcatcatcacagtttaacacaagctcccctgctccagccaaattgatctcccagtcttgtccttacccattccaagtgctctgccagcccctgttcatccaagttttaagtcctccaccctgttctaagagactgttccaacggctctgggcctcagtggtcacttgaccaccattgtctcagagctgcccactttgtgtgtgtcacatgctgcctgagtcacatgtacatcttatttctgcctctagttttgtaagctcctggagggcggataacatcttatactactcttgtattctcatggcacctagtgcagtgctgggcacagagtaggtgctcaataaagacttgttgaatgaa

SEQ ID NO: 3514 - DNA, 822 bp, Homo sapiens
  source 1..822: mol_type = genomic DNA
cctctctccatttctctgaaaatgaactacacagtttgggggtgagttggcaggggctgcttcctgagcaatactgaacactgcgcagcttgcagaggtctcctggcagccctcattaggaattctgtctggccccgatcagaatactggagacgagaccacgagattgatgagtttgccttgggagtcggtaagaaggtgaagccaggggcgaacatgggtcagaaggtcactggagggatcaagactgtggacatgagggaccccacgtacaggcccctgaagcaggagctccagggtctggattactgcaagcccacccggctggatctgctactggacatgccccctgtgtcctatgatgtccagctgctgcattcatggaacaacaacgaccgatcgctcaatgtctttgtgaaggaggacgacaagctcatctttcaccggcatccggtggcccagagcacggacgctatcaggggcaaagtcgggtatacccgtgggctgcacgtgtggcagatcacgtgggccatgagacagcggggcacacacgccgtggtgggggtggcgacggcagacgcccccctgcactctgtcgggtacacaaccctcgtggggaataaccacgagtcctggggctgggacttggggcgcaaccggctctaccacgatggcaagaaccagccaagcaaaacatacccagcctttctggaaccagatgagacattcattgtccctgactccttcctggtagccctggacatggacgacgggactctgagcttcattgtggatggacagtacatgggagtggcttttcgg

SEQ ID NO: 3515 - DNA, 427 bp, Homo sapiens
  source 1..427: mol_type = genomic DNA
aatttgcccatctgcatggcaaagacccacctttctctatctcaccaacctgacaaaaaaggtgtgccaagggacttcatcttacctatcagtgacgtccgggccagcataggcgctgggttcatttaccctttggtcggaacgggaggcagagaagctcccctctggctctagttggagaatcccaacccaagcaagtccatccttaaacaataaacatctccagcattgctggctttggaagaccccatggtgagatgctggagcttttttccgctccagatttcgcttctaaatatttacttttactttccatgttcacttataggccagggtttttttttcctaccattgaattatttcgtcatgttctatttaattattgctttaattggcattggtgaccacaaataataataaatactat

SEQ ID NO: 3516 - DNA, 578 bp, Homo sapiens
  source 1..578: mol_type = genomic DNA
agaaagaaaaggtatcagtacagaaaagaagagtcagaaaataccgtgcaaaggcacattcagaacgtaaccaggatagctggagccaggattcaaggagagagggtgtcttttatgaataatcaaaagcagcaaaagccaacgctatcaggccagcgttttaaaactagaaaaagagatgaaaaagagaggtttgaccctactcagtttcaagactgtattattcaaggcttaactgaaaccggtactgatttggaagcagtagctaagtttcttgatgcttctggagcaaaacttgattaccgtcgatatgcagaaacactctttgacattctggtggctggtggaatgctggccccaggtggtacactggcagatgacatgatgcgtacagatgtctgcgtgtttgcagcccaagaagatctagagaccatgcaagcatttgctcaggtttttaacaagttaatcaggcgctacaaatacctggagaaaggttttgaagatgaagtaaaaaagctgctgctgttcttgaagggtttttcagagtcggagaggaacaagctagctatgttgactgg

SEQ ID NO: 3517 - DNA, 583 bp, Homo sapiens
  source 1..583: mol_type = genomic DNA
ttttgatgaccagcgcaggatgtcattgcatctacatggagcagattgtgatcctaaaacacagaatgaaatgaatatatgtgaagaagaatttgtagagtataaaaacagggatgccatttcggcattgatgcctttgttctctgaggaagaaagcagtgatggaagcaagcacaataatggtttaccagatcatatctcagctcaactacagaacacctacactctgaaagcctttactgttggatctaaatgtgttgtgtggtcaagtctaagaaacacatggtctaaatgtgagattttagaaacagctgaagaaggaacaagggttttgaacctttcaaatggtatggaggagatagtgaaccctgagaatgtctggaatggcatacccaaattggataagagtccacctgaggctgtatcccaaagagtagggaaagatctttacttcatgtcagtgggtgataccactattaaagaaaaggggtttggaggtgatggagatttaaccgtggatctatagctgtggccaatcagtcagaagctgcccttgaacaagtggcatcttacgcagaccaac

SEQ ID NO: 3518 - DNA, 3745 bp, Homo sapiens
  source 1..3745: mol_type = genomic DNA
cctgagaagccagccaggctgcggctgtttgtggcaggaggcccccacccacagcactggaccaagcgtcgagggcgaggcccccagcagtgagactggcacatccctggacagcccctcagcctacccccagggccccttggtgcccggttccagcctgagcccggatcactacgagcacacgtcagtgggagcctatgggctgtactcggggccgccggggcaacagcagcgcacgcggaggcccaagctgcagcactcgacctccatcctgcgcaagcaggctgaggaggaggccatcaagcgctcacgctcactctccgagagctatgagctctcctcggacctgcaggacaagcaggtggagatgctagaacgaaagtatggggggcgcctggtaacccgccatgcggcccgcaccatccagacggcgtttcgccagtaccagatgaacaagaacttcgagcgcttgcgcagctccatgtcagagaaccgcatgtcacgccggattgtgctgtccaacatgaggatgcagttctcctttgaggggcctgagaaagtgcacagctcctacttcgaggggaagcaggtctcagtgactaacgacggctcccagctgggagccctggtgtcccctgagtgtggtgacctcagcgagcccaccaccctcaagtctccggccccctccagtgactttgcggacgccatcaccgagctggaggacgccttctctaggcaagtgaaatcactggccgagtccatcgacgatgccctcaactgccgcagcctgcacactgaggaggcaccggccctggatgcggcgcgggcccgggacaccgaaccccagacagccctgcacggcatggaccaccgcaaactggacgagatgacggcctcgtacagtgatgtcaccctgtacatcgatgaggaggagctgtcgccccctctgcccctctcgcaggcaggggaccggccgtccagcaccgagtcggacctgcggctacgggctgggggcgcagccccagactactgggccctggcccacaaagaggacaaggctgacacggacacgagctgccggagcacgccgtcgctggagcggcaggagcagcggctgcgggtggagcatctgccgctgctcaccatcgagccacccagcgacagctctgtggaccttagtgaccgctcggagcgggggtcactcaagaggcagagtgcttacgagcgcagccttggcgggcagcagggcagtcccaagcatggtccccacagcggcgcccccaagagcctcccccgggaggagcctgagttgcggccccggccccccaggcccctggacagccacttggccatcaatggctcagccaaccggcagagcaagtctgagtcggactactcagacggtgacaatgacagcatcaacagcacgtccaactccaacgataccatcaactgcagctccgagtcatcgtcccgtgacagcctgcgggagcagacgctcagcaagcagacctaccacaaggaggcccgcaacagctgggactcgcctgcctttagcaacgatgtcatccgcaagaggcactaccgcatcggcctgaacctcttcaacaagaagcctgagaagggagtccagtacctcatcgagcgtggctttgtgcccgacacgcccgtcggggtggcccacttcctgctgcagcgcaagggcctcagccggcagatgatcggcgagttcctgggcaaccggcagaagcagttcaaccgtgacgtgctcgactgcgtcgtggacgagatggacttctctaccatggagctggatgaggccctcaggaaattccaggcgcacatccgtgtccaaggggaggctcagaaagtggagcggctcatagaggcgttcagccagcgctactgcatctgcaaccctggggtggtgcggcaattccggaacccagacaccattttcatcctggccttcgccatcatcctgctgaacaccgacatgtacagccccaatgtcaagcccgagcggaaaatgaagctagaggacttcatcaagaacctccgaggtgtggacgatggtgaggacattccccgtgagatgctgatggggatctatgaacggatccgtaagcgagagctaaagaccaatgaggaccatgtgtcccaggtgcagaaggtggagaagctcattgtggggaaaaagccgatcggatccctgcatcccgggctcggctgtgtgctctctctgccccaccgtcggttggtctgctactgccggctctttgaggttccagacccaaacaagccccagaaactcggactacaccagcgagaaatcttcctgttcaacgacctcctggtggtcaccaagatcttccagaagaagaagaactcggtgacgtacagcttccgacagtccttctccttgtacggcatgcaggtcctgctcttcgagaaccagtactaccccaatggcatccggctcacctcgtctgtccccggagcagatatcaaagtgttaataaacttcaacgcccccaaccctcaagaccggaagaaattcaccgatgacctgcgggagtccattgcggaagtccaagagatggagaagcacaggatagagtcggagctcgagaagcagaaaggcgtcgtgcggcccagcatgtcccagtgctctagcctcaaaaaggagtcgggcaacggaacactgagccgggcctgcctggacgacagctatgccagcggtgagggcctcaagcgcagcgccctcagcagctccctgcgggacctctcggaagccggggtccatcattagcagtcctcacatgcgccggagagctacatcaacacgagagtgtccatctcgcccacaccagactatgcccaactcatcttccctcctgggctccttattcgggagcaagagagggaagccccctccccaggcccacctgccctcagccccagccctggccacccccccacccaccggtggtcctgcctcacttgcagcactctgtggctggccaccacctggggcccccagaggggctgccgcaggccgccatgcacgggcatcacacccagtactgccacatgcagaaccctcccccgtaccaccatcaccaccaccaccacccaccccagcacatccagcacgcacaccagtaccaccacggcccccatgggggccacccagcctacggggcccatgcccacggccacccgccgctgccctcggcccacgtggggcacacagtgcaccaccatgggcagccccctgccccgccgccccccaccagcagcaaggccaaacccagcggcatcagcacaattgtgtagacagcctgggtaggggtcccaggctccctgaaacacctgcacaccacacagggcacgcccgggggtcgccagccgcacaccaaacccggggcacttctgttgccatctctcccctctgcccctcacggcccaaccggagccccaggagcccacagggctggtgttgtgtggaacaaaggcccagatttcatttcttgttggcaccctgggctctgctcacctcagtctgagggatgggtgggcctcagacaccatcagccttgaaacggtgagccagccaagtagtgttgaactgcctcccccactccagctctcagctccctgtgccctaatgtacatgcatatgaaaacccaacctagaaaacgaagaaatgagatacaaaaacagacaaaacaaaccccaaaa

SEQ ID NO: 3519 - DNA, 1403 bp, Homo sapiens
  source 1..1403: mol_type = genomic DNA
cagcttctggcaggatatgagctgatgcctgccccgattctacagacaccatgagatttaatccagagactgacttcactatagaacccacagttgtatcaatggttggggaaagatagtggcaacaggcaaaggagaaacagctctgacatacaaagaaaatgagtatgctaaagccaagtgggcttaaggcccccaccaagatcctgaagcctggaagcacagctctgaagacacctacggctgttgtagctccagtagaaaaaaccatatccagtgaaaaagcatcaagcactccatcatctgagactcaggaggaatttgtggatgactttcgagttggggagcgagtttgggtgaatggaaataagcctggatttatccagtttcttggagaaacccagtttgcaccaggccagtgggctggaattgttttagatgaacccataggcaagaacgatggttcggtggcaggagttcggtatttccagtgtgaacctttaaagggcatatttacccgaccttcaaagttaacaaggaaggtgcaagcagaagatgaagctaatggcctgcagacaacgcccgcctcccgagctacttcaccgctgtgcacttctacggccagcatggtgtcttcctccccctccaccccttcaaacatccctcagaaaccatcacagccagcagcaaaggaaccttcagctacgcctccgatcagcaaccttacaaaaactgccagtgaatctatctccaacctttcagaggctggctcaatcaagaaaggagaaagagagctcaaaatcggagacagagtattggttggtggcactaaggctggtgtagtccggtttcttggggagaccgactttgccaagggggagtggtgtggcgtggagttagatgagccacttgggaagaatgatggcgctgttgctggaacaaggtattttcagtgtcaacccaaatatggcttgttcgctcctgtccacaaagttaccaagattggcttcccttccactacaccagccaaagccaaggccaacgcagtgaggcgagtgatggcgaccacgtccgccagcctgaagcgcagcccttctgcctcttccctcagctccatgagctcagtggcctcctctgtgagcagcaggcccagtcggacaggactacatgtcctggaattggaagccaaaatggaccagctgcgaacaatggtggaagctgctgacagggagaaggtggagcttctcaaccagcttgaagaggagaaaaggaaggttgaggaccttcagttccgggttgaagaagaatcaattaccaaaggtgatcttgagcaaaagagccagatttctgaagatcctgagaatgtggctacagtttcagaaaagtcacgtataatggaactg

SEQ ID NO: 3520 - DNA, 1300 bp, Homo sapiens
  source 1..1300: mol_type = genomic DNA
gtggcgctggcggttgctgtcagctgattcccggggttggtggcagcggcggtagcagcaatggactttctcctggggaacccgttcagctctccagtgggacagcgcatcgagaaagccacagatggctccctgcagagcgaggactgggccctcaacatggagatctgcgacatcatcaacgagacggaggaaggtcccaaagatgccctccgagcagtaaagaagagaatcgtggggaataagaacttccacgaggtgatgctggctctcacagtcttagaaacctgtgtcaagaactgcgggcaccgcttccacgtgctggtggccagccaggacttcgtggagagtgtgctggtgaggaccatcctgcccaagaacaacccacccaccatcgtgcatgacaaagtgctcaacctcatccagtcctgggctgacgcgttccgcagctcgcccgatctgacaggtgtggtcaccatctatgaggacctgcggaggaaaggcctggagttccccatgactgacctggacatgctgtcacccatccacacacccagaggaccgtgttcaactcagagacacaatcaggacaggattctgtgggcactgactccagccagcaagaggactctggccagcatgctgcccctctgcccgccccgcccatactctccggtgacacgcccatagcaccaaccccggaacagattgggaagctgcgcagtgagctggagatggtgagtgggaacgtgagggtgatgtcggagatgctgacggagctggtgcccacccaggccgagcccgcagacctggagctgctgcaggagctcaaccgcacgtgccgagccatgcagcagcgggtcctgagtgataccctgctccgggcccatgccccaaggagcccttcagagcccacactgccagtcgaggcctggctggaggctggccacagtggaaattctgccgagcctcttgtcccttccctgctctgctgcatggggccccatggctttggctggccactgagggtagggtgtggaggtgtggaggccccctgaggagctgcggcggcccaggtacgaagctgcaactctgcgcgcagtgggcgagatctcatcagccccaggctgcaggtgaggcttcaggggatgctggggccccactgcccctccgctgccttgccctccatccttcctctgttccttctggccgggcaccacagcactggggctcacctcttggttgatcctcttgtactgggagaggtgccttttgtatccccaattaaaggtagaaaacc

SEQ ID NO: 3521 - DNA, 489 bp, Homo sapiens
  source 1..489: mol_type = genomic DNA
tatcaatatggtaacattttgatagattctttggtattcttgtttgtgatattaagccatattcacaaaaacttgtcttttttttttttttgagatggagtctcgctctattgcccaggctggagcgtaatggcgcaatctcggctcactgcaccctccgcctcctgggttcaagcgattctcctccttcagcttcctcagtagctgggattacaggcacgcgccaccacacctggcatggcggacaccgacctgttcatggaatgtgaggaggaggagttggagccatggcagaaaatcagtgatgtcattgaggactctgtagttgaagattataattcagtggataaaactaccacagctggcaatcctttggtccagcaaggtggacagccactcatcctgacccagaatccagccccaggtctgggcacaatggttactcaaccagtattgaggcctgttcaggtcatgcagaatgccaatcat

SEQ ID NO: 3522 - DNA, 659 bp, Homo sapiens
  source 1..659: mol_type = genomic DNA
ggcggaagatggcgacgcccctcgggtggtcgaaggcggggtcaggatctgtgtgtctcgctttagatcaactgcgggacgtgattgagtctcaggaggaactaatccaccagctgaggaacgtgatggttctccaggacgaaaattttgtcagtaaagaagagttccaggcagtggagaagaagctggtggaagagaaagctgcccatgccaaaaccaaggtcctcctggccaaggaagaggagaagttacagtttgccctcggagaggtagaggtgctatccaagcagctggagaaagagaagctggcctttgaaaaagcgctctccagtgtcaagagcaaagtccttcaggagtccagcaagaaggaccagctcatcaccaagtgcaatgagattgagtctcacattataaagcaagaagatatacttaatggcaaagagaatgagattaaagagttgcagcaagttatcagccagcagaaacagatcttcaggaatcacatgtctgacttccggatccagaagcagcaggagagctacatggcccaggtgctggaccagaagcataagaaagcctcagggacacgtcaggcccgcagccaccagcatcccagggaaaaataaaatggccgccgctttcctgttctctggctgtaa

SEQ ID NO: 3523 - DNA, 505 bp, Homo sapiens
  source 1..505: mol_type = genomic DNA
cggacttggagtcagagagacctggctgcgaatcccggctccgccactttctagcgctgtgaccttggttttcaggtggcgaaactgactggtctggttagagcgcgtccaagccaagccgcagtgctgtttggatttttaaatttctccttctgagtgagaaaatagcaatcgagatggaaccatccgcacaacagctccagctggcagcatcacttcccgccaatttatccaacttctgccaaggctctgaaatgccaacaacgtcgaggcctgcacttgatgtcaagggtggcacctcacctgcgaaggaggatgccaaccaagagatgagctccgtggcctactccaaccttgcggtgaaagatcgcaaagcagtggccattctgcactaccctggggtagcctcaaatggaaccaaggccagtggggctcccactagttcctcgggatctccaataggctctcctacaaccacccctcccactaaacccccatccttcaa

SEQ ID NO: 3524 - DNA, 1839 bp, Homo sapiens
  source 1..1839: mol_type = genomic DNA
ttgcgcctgcgcagtgcatcaccgcaggcgggcctcgcgggtccgggagcgcggcggagacgatgcctgagatcagagtcacgcccttgggggccggccaggacgtgggccgaagctgcatcctggtctccattgcgggcaagaatgtcatgctggactgtggaatgcacatgggcttcaatgacgaccgacgcttccctgacttctcctacatcacccagaacggccgcctaacagacttcctggactgtgtgatcattagccacttccacctggaccactgcggggcactcccctacttcagcgagatggtgggctacgacgggcccatctacatgactcaccccacccaggccatctgccccatcttgctggaggactaccgcaagatcgccgtagacaagaagggcgaggccaacttcttcacctcccagatgatcaaagactgcatgaagaaggtggtggctgtccacctccaccagacggtccagattaaagtgggctcagagtctgtggtctacacgggtgattataacatgaccccagaccgacacttaggagctgcctggattgacaagtgccgccccaacctgctcatcacagagtccacgtacgccacgaccatccgtgactccaagcgctgccgggagcgagacttcctgaagaaagtccacgagaccgtggagcgtggtgggaaggtgctgatacctgtgttcgcgctgggccgcgcccaggagctctgcatcctcctggagaccttctgggagcgcatgaacctgaaggtgcccatctacttctccacggggctgaccgagaaggccaaccactactacaagctgttcatcccctggaccaaccagaagatccgcaagactttcgtgcagaggaacatgtttgagttcaagcacatcaaggccttcgaccgggcttttgctgacaacccaggaccgatggttgtgtttgccacgccaggaatgctgcacgctgggcagtccctgcagatcttccggaaatgggccggaaacgaaaagaacatggtcatcatgcccggctactgcgtgcagggcaccgtcggccacaagatcctcagcgggcagcggaagctcgagatggaggggcggcaggtgctggaggtcaagatgcaggtggagtacatgtcattcagcgcacacgcggacgccaagggcatcatgcagctggtgggccaggcagagccggagagcgtgctgctggtgcatggcgaggccaagaagatggagttcctgaagcagaagatcgagcaggagctccgggtcaactgctacatgccggccaatggcgagacggtgacgctgcccacaagccccagcatccccgtaggcatctcgctggggctgctgaagcgggagatggcgcaggggctgctccctgaggccaagaagcctcggctcctgcacggcaccctgatcatgaaggacagcaacttccggctggtgtcctcagagcaagccctcaaagagctgggtctggctgagcaccagctgcgcttcacctgccgcgtgcacctgcatgacacacgcaaggagcaggagacggcattgcgcgtctacagccacctcaagagcgtcctgaaggaccactgtgtgcagcacctcccagacggctctgtgactgtggagtccgtcctcctccaggccgccgccccttctgaggacccaggcaccaaggtgctgctggtctcctggacctaccaggacgaggagctggggagcttcctcacatctctgctgaagaagggcctcccccaggcccccagctgaggccggcaactcacccagccgccacctctgccctctccca

SEQ ID NO: 3525 - DNA, 676 bp, Homo sapiens
  source 1..676: mol_type = genomic DNA
tgatgatgcatccctggaagacctgggagccaggtctggctccttggactgtatcttccgtgctccagtgggagtacagactgagagggagaagggggctgggtagagatgcagcccatgtcgtttggctgggatcactcgcttcacaaaaggaaaagacttcctcctgtgaagagatccttagtatactacttgaagaaccgggaagtcaggctacagaatgaaaccagctactctcgagtgttgcatggttatgcagcacagcaacttcccagtctcctgaaggagagagagtttcaccttgggacccttaataaagtgtttgcatctcagtggttgaatcataggcaagtggtgtgtggcacaaaatgcaacacgctatttgtcgtagatgtccagacaagccagatcaccaagatccccattctgaaagaccgggagcctggaggtgtgacccagcagggctgtggtatccatgccatcgagctgaatccttctagaacactgctagccactggaggagacaaccccaacagtcttgccatctatcgactacctacgctggatcctgtgtgtgtaggagatgatggacacaaggactggatcttttccatcgcatggatcagcgacactatggcagtgtctggctcacgtgatggttctatgggactctggg

SEQ ID NO: 3526 - DNA, 3232 bp, Homo sapiens
  source 1..3232: mol_type = genomic DNA
cttctctccccaccccacccccactactccctcacattgaccagtgtcctgggcctttaagagttggatgggctggactggagagagctcacacctctccccttcttactgcttccctccggctataacttgccagtcacagcagccagctgctgtagaagaggggaggaaacaagccagtgcaaggggagcaaaagagaaaaggagccaggctgggcttcctgatcccacagcatcgcagagctcgggaggcacagctcacagacacaggaaacacaggactgctattctgctctcctgcccacggtgatctggtgccagctggtggaacagtgggtgatggcgtccctgctgcaagaccagctgaccactgatcaggacttgctgctgatgcaggaaggcatgccgatgcgcaaggtgaggtccaaaagctggaagaagctaagatacttcagacttcagaatgacggcatgacagtctggcatgcacggcaggccaggggcagtgccaagcccagcttctcaatctctgatgtggagacaatacgtaatggccatgattccgagttgctgcgtagcctggcagaggagctccccctggagcagggcttcaccattgtcttccatggccgccgctccaacctggacctgatggccaacagtgttgaggaggcccagatatggatgcgagggctccagctgttggtggatcttgtcaccagcatggaccatcaggagcgcctggaccaatggctgagcgattggtttcaacgtggagacaaaaatcaggatggtaagatgagtttccaagaagttcagcggttattgcacctaatgaatgtggaaatggaccaagaatatgccttcagtctttttcaggcagcagacacgtcccagtctggaaccctggaaggagaagaattcgtacagttctataaggcattgactaaacgtgctgaggtgcaggaactgtttgaaagtttttcagctgatgggcagaagctgactctgctggaatttttggatttcctccaagaggagcagaaggagagagactgcacctctgagcttgctctggaactcattgaccgctatgaaccttcagacagtggcaaactgcggcatgtgctgagtatggatggcttcctcagctacctctgctctaaggatggagacatcttcaacccagcctgcctccccatctatcaggatatgactcaacccctgaaccactacttcatctgctcttctcataacacctacctagtgggggaccagctttgtggccagagcagcgtcgagggatatatacgggccctgaagcgggggtgccgctgcgtggaggtggatgtatgggatggacctagcggggaacctgtcgtttaccacggacacaccctgacctcccgcatcctgttcaaagatgtcgtggccacagtagcacagtatgccttccagacatcagactacccagtcatcttgtccctggagacccactgcagctgggagcagcagcagaccatggcccgtcatctgactgagatcctgggggagcagctgctgagcaccaccttggatggggtgctgcccactcagctgccctcgcctgaggagcttcggaggaagatcctggtgaaggggaagaagttaacacttgaggaagacctggaatatgaggaagaggaagcagaacctgagttggaagagtcagaattggcgctggagtcccagtttgagactgagcctgagccccaggagcagaaccttcagaataaggacaaaaagaagaaatccaagcccatcttgtgtccagccctctcttccctggttatctacttgaagtctgtctcattccgcagcttcacacattcaaaggagcactaccacttctacgagatatcatctttctctgaaaccaaggccaagcgcctcatcaaggaggctggcaatgagtttgtgcagcacaatacttggcagttaagccgtgtgtatcccagcggcctgaggacagactcttccaactacaacccccaggaactctggaatgcaggctgccagatggtggccatgaatatgcagactgcagggcttgaaatggacatctgtgatgggcatttccgccagaatggcggctgtggctatgtgctgaagccagacttcctgcgtgatatccagagttctttccaccctgagaagcccatcagccctttcaaagcccagactctcttaatccaggtgatcagcggtcagcaactccccaaagtggacaagaccaaagaggggtccattgtggatccactggtgaaagtgcagatctttggcgttcgtctagacacagcacggcaggagaccaactatgtggagaacaatggttttaatccatactgggggcagacactatgtttccgggtgctggtgcctgaacttgccatgctgcgttttgtggtaatggattatgactggaaatcccgaaatgactttattggtcagtacaccctgccttggacctgcatgcaacaaggttaccgccacattcacctgctgtccaaagatggcatcagcctccgcccagcttccatctttgtgtatatctgcatccaggaaggcctggagggggatgagtcctgaggtgggcatttcacgggaagggttggtgtgctggctttagacggggagaaacatctggaaggatgctcgagagaacaaatggaggtggtgaaaatcaagctttggattgtgcattcctaggcacaaaattacctcattcttcctaacaagcaatctgggacctgattttccaccttttttctcttttcttcccttcctttgttttcataagcctttggtatctttcctgcccttttcctttgtgtactctatactggagttcccttcttcctcttgctgtaggctcaatcccataccgacatctacaactaatctttcccatcaactctgtgtgaaggcaggttgcaactagaaattcagaggggcttggaatagagaaacctaaagaagcatcatcccctccatccccaacttcctcaaagcccaaagccaagggaaggataaatcaaggctcaaggcttccccagcaaagattagggaaagagacttgaccccaggactgtactacgactcttaagagaacactgcacagcactcaaagtcccccactggactgcttcctccttagccccactggtataaatacatctctctccaatttggc

SEQ ID NO: 3527 - DNA, 1591 bp, Homo sapiens
  source 1..1591: mol_type = genomic DNA
agtgccaagagcagcggttgttggagtgtaactgccatgctcagccgcgatggctggggctgccgggcgcgtccaagatcgcgccctgcggcggtttcccatcaccctgcctgtgggcgacttgagcaacttgcatcttaaggaagagaaaatcaaaccagataccaatggtgctgttgtcaagaccaatgccaatgcagagaagacagatgaagaagagaaagaggacagagctgcccagtccttactcaacaagctgatcagaagcaaccttgttgataacacaaaccaagtggaagtcctgcagcgggatccaaactcccctctgtactcggtgaagtcttttgaagagcttcggctcccacagaacttaattgcccaatctcagtctggtactggtaaaacagctgccttcgtgctggccatgcttagccaagtagaacctgcaaacaaatacccccagtgtctatgtctctccccaacgtatgagctcgccctccaaacaggaaaagtgattgaacaaatgggcaaattttaccctgaactgaagctagcttatgctgttcgaggcaataaattggaaagaggccagaagatcagtgagcagattgtcattggcacccctgggactgtgctggactggtgctccaagctcaagttcattgatcccaagaaaatcaaggtgtttgttctggatgaggctgatgtcatgatagccactcagggccaccaagatcagagcatccgcatccagaggatgctgcccaggaactgccagatgctgcttttctccgccacctttgaagactctgtgtggaagtttgcccagaaagtggtcccagacccaaacgttatcaaactgaagcgtgaggaagagaccctggacaccatcaagcagtactatgtcctgtgcagcagcagagacgagaagttccaggccttgtgtaacctctacggggccatcaccattgctcaagccatgatcttctgccatactcgcaaaacagctagttggctggcagcagagctctcaaaagaaggccaccaggtggctctgctgagtggggagatgatggtggaacagagggctgcagtgattgagcgcttccgagagggcaaagagaaggttttggtgaccaccaacgtgtgtgcccgcggcattgatgttgaacaagtgtctgtcgtcatcaactttgatcttcccgtggacaaggacgggaatcctgacaatgagacctacctgcaccggatcgggcgcacgggccgctttggcaagaggggcctggcagtgaacatggtggacagcaagcacagcatgaacatcctgaacagaatccaggagcattttaataagaagatagaaagattggacacagatgatttggacgagattgagaaaatagccaactgagaagctccaccagccactgatgccagccctggcactgcccctgcacaggagacaagtgcgttcagggcacaggccccgacatcaccccaaggacaacggcacaagtagagagaaactacctacctcacttcaaattatgtttggacttgacaaaaatgtatgcaaatgatgggggatggt

SEQ ID NO: 3528 - DNA, 1517 bp, Homo sapiens
  source 1..1517: mol_type = genomic DNA
gggggaatttagagcctcgaggcctggggtggggacgcgaggacaccagcgtagaagagcttacatcagaatcgagctttgtgggcgctccgggatttggccctttagcgcggatcctagacaacaggttttggacctcgagagctgcagaactgaggctactggtgccgccagcctgctggctccgcctctgcctcagtttcttcccctatggcccgcgtgccgctggggcggagtctcactctgtcacccaggctggagcacaatggcatgacctcagctcaccacaacttccgcctcccaggttcaagggattctcctgcctcagcctcccaagtagctgagattatagatttggagtggtatgagaagtccgaagaaactcacgcctcccagatagaactacttgagacaagctctacgcaggaacctctcaacgcttcggaggccttttgcccaagagactgcatggtaccagtggtgtttcctgggcctgtgagccaggaaggctgctgtcagtttacttgtgaacttctaaagcatatcatgtatcaacgccagcagctccctctgccctatgaacagcttaagcacttttaccgaaaaccttctccccaggcagaggagatgctgaagaagaaacctcgggccaccactgaggtgagcagcaggaaatgccaacaagccctggcagaactggagagtgtcctcagccacctggaggacttctttgcacggacactagtaccgcgagtgctgattctccttgggggcaatgccctaagccccaaggagttctatgaactcgacttgtctctgctggccccctacagcgtggaccagagcctgagcacagcagcttgtttgcgccgtctcttccgagccatattcatggctgatgcctttagcgagcttcaggctcctccactcatgggcaccgtcgtcatggcacagggacaccgcaactgtggagaagattggtttcgacccaagctcaactatcgagtgcccagccggggccataaactgactgtgaccctgtcatgtggcagaccttccatccgaaccacggcttgggaagactacatttggttccaggcaccagtgacatttaaaggcttccgcgagtgaatgagtgcttcttaatcctaaaaacacaatggctgaattatctttctccatgtggcgctgaatcacccatctggtttggagctagagttgcttcctggtgagagaggaagcaactctccttctggttgtctgcctcccctcagatttcctgataggctgatggcatgtggctgtgactgtgactgtaatcattgctgaacaacatctctttgaatcaaaggttgattttcccagagggtgctgggtcaggcatttctattaggagttggaaagcaaaaatgggtccatagacactctatggaggtgtccctttctgctctttgctgtgtcctttcagaatttttaccaggaacataatgtggatgtgacttatgaacttaaatata

SEQ ID NO: 3529 - DNA, 871 bp, Homo sapiens
  source 1..871: mol_type = genomic DNA
actcctcacaccacttaacagccacttgtttcatcccacctgggcattaggttgacttcaaagatgcctcagttactgcaaaacattaatgggatcatcgaggccttcaggcgctatgcaaggacggagggcaactgcacagcgctcacccgaggggagctgaaaagactcttggagcaagagtttgccgatgtgattgtgaaaccccacgatccagcaactgtggatgaggtcctgcgtctgctggatgaagaccacacagggactgtggaattcaaggaattcctggtcttagtgtttaaagttgcccaggcctgtttcaagacactgagcgagagtgctgagggagcctgcggctctcaagagtctggaagcctccactctggggcctcgcaggagctggggttcagacccagggtcaggccactggctctgcgtgggtcagcagctatgacaggcaagctgagtcccagagccaggaaagaataagcccgcagatacaactctctgggcagacagagcagacccagaaagctggagaaggcaagaggaatcagacaacagagatgaggccagagagacagccacagaccagggaacaggacagagcccaccagacaggtgagactgtgactggatctggaactcagacccaggcaggtgccacccagactgtggagcaggacagcagccaccagacaggaagaaccagcaagcagacacaggaggccaccaatgaccagaacagagggactgagacccacggtcaaggcaggagccagaccagccaggctgtgacaggaggacatgctcagatacaggcagggacacacacccagacacccacccagaccgtggagcaggacagcag

SEQ ID NO: 3530 - DNA, 682 bp, Homo sapiens
  source 1..682: mol_type = genomic DNA
ggaaacctgttgagatcacagagaatatactgacggcataaaagggcagaaccatagcagggtgcgcctcgcagtcacctctgtgccctgctggttgtcttcccagcgctgctgtagttgccttccatggatctataggagagcaagtcctccaggagaagaagtcctcaccagtgaacggagacctctctgaactaagaataccatggccacgtcagccccactacggagcctggaagaggaggtgacctgctccatctgtcttgattacctgcgggaccctgtgaccattgactgtggccacgtcttctgccgcagctgcaccacagacgtccgccccatctcagggagccgccccgtctgcccactctgcaagaagccttttaagaaggagaacatccgacccgtgtggcaactggaaaaaatcctgaaccacctgagtaccctaaggagagacagagacaaaattcagggcttccaggcaaagggagaagctgatatcctggccgcgctgaagaagctccaggaccagaggcagtacattgtggctgagtttgagcagggtcatcagttcctgagggagcgggaggaacacctgctggaacagctggcgaagctggagcaggagctcacggagggcagggagaagttcaagagccggggcgtcggggagcttgcccgg

SEQ ID NO: 3531 - DNA, 1960 bp, Homo sapiens
  source 1..1960: mol_type = genomic DNA
gattcccggggttggtggcagcggcggtagcagcaatggactttctcctggggaacccgttcagctctccagtgggacagcgcatcgagaaagccacagatggctccctgcagagcgaggactgggccctcaacatggagatctgcgacatcatcaacgagacggaggaaggtcccaaagatgccctccgagcagtaaagaagagaatcgtggggaataagaacttccacgaggtgatgctggctcacagtgctcgacggcacctctcggccctccaggtcttagaaacctgtgtcaagaactgcgggcaccgcttccacgtgctggtggccagccaggacttcgtggagagtgtgctggtgaggaccatcctgcccaagaacaacccacccaccatcgtgcatgacaaagtgctcaacctcatccagtcctgggctgacgcgttccgcagctcgcccgatctgacaggtgtggtcaccatctatgaggacctgcggaggaaaggcctggagttccccatgactgacctggacatgctgtcacccatccacacaccccagaggaccgtgttcaactcagagacacaatcaggacaggattctgtgggcactgactccagccagcaagaggactctggccagcatgctgcccctctgcccgccccgcccatactctccggtgacacgcccatagcaccaaccccggaacagattgggaagctgcgcagtgagctggagatggtgagtgggaacgtgagggtgatgtcggagatgctgacggagctggtgcccacccaggccgagcccgcagacctggagctgctgcaggagctcaaccgcacgtgccgagccatgcagcagcgggtcctggagctcatccctcagatcgccaatgagcagctgacagaggagctgctcatcgtcaatgacaatctcaacaatgtgttcctgcgccatgaacggtttgaacggttccgaacaggccagaccaccaaggccccaagtgaggccgagccggcagctgacctgatcgacatgggccctgacccagcagccaccggcaacctctcatcccagctggcaggaatgaacctgggctccagcagtgtgagagctggcctgcagtctctggaggcctctggtcgactggaagatgagtttgacatgtttgcgctgacacggggcagctcactggctgaccaacggaaagaggtaaaatacgaagccccccaagcaacagacggcctggctggagccctggacgcccggcagcagagcactggcgcgatcccagtcacccaggcctgcctcatggaggacatcgagcagtggctgtccactgacgtgggtaatgatgcggaagagcctaagggggtcaccagcgaagaatttgacaaattcctggaagaacgggccaaagccgcggaccgattgcccaacctctccagcccctcagctgaggggcccccgggtcccccatctggcccagcgccccggaagaagacccaggagaaagatgatgacatgctgtttgccttatgagtgtggggtctggcaccctgcagcccaggtccccactgctctcacacccttaggctgggacctccctccctcctctggtgttaaggctgctttgggggtggcttgttacccccttttcctcctctttgaagacggagctgccccagctgtggctgggggtgtggaggcagtgggatgaactgggggacaggtctgcgctgcagtgggatctggctgctctgcctcctttcccaccccagctgaccatgagactttgctgagaagtggaggccccaggacaggctggctggctggctggctgcttgacccagtgtgactctccttcactgagtgataccctgctccgggcccatgccccaaggagcccttcagagcccacactgccagtcgaggcctggctggaggctggccacagtgga

SEQ ID NO: 3532 - DNA, 474 bp, Homo sapiens
  source 1..474: mol_type = genomic DNA
gagcccgtctattttgctgagaaggtgatgtcattaggcagaaattggcaccgaccgtgtctgaggtgccagcgttgccacaagaccctgactgctgggagtcatgctgaggtgtgaacattggcgatgtgggctgctacatctatgacccagtgaagataaaattcaaatgagacgctcacaaaaaaggtcaccctaactcaggcctcccatcatgcccctcatggtccaatggaagctacaaaaatctccagtcccatgggggttggggaaggtgggatcttgggggcctgggcctaggctccatggtaggccagagagtctagactttctctgccaattttttccctttcccatttctatctggttagggaacagcccgttttgaagggtatcctcctcctggccatcacaacccctttccccagcacattctggagcttcaaggtactcataaaacttgtgtttattgaa

SEQ ID NO: 3533 - DNA, 3424 bp, Homo sapiens
  source 1..3424: mol_type = genomic DNA
acaacgctacttccggtctcctcacttccggcttcgctgctcttggttctggttctggaggctgggttgagaggtcgccggtccgactgtcctcggcggttggtcagtgtgaatttgtgacagctgcagttgctccccgcccccgagcagccgaggagtctaccatggctcaagaatctcccaaaaattcagcagcagaaattccagtgactagtaatggagaagttgatgactctcgtgaacatagctttaatagggatttgaagcattcattaccatctggacttggtctctcagaaacccaaattacatctcatggctttgacaataccaaagagggtgttattgaagcaggagcatttcaaggttccccagcaccgccactgccatctgttatgtctcctagcagggttgcagctagtcgactggctcagcaaggaagtgatttaattgttcctgcaggtggccagagaacacagacaaaaagtggaccagttattctagcagatgaaattaaaaatcctgcaatggaaaagttagaacttgttagaaaatggagtctaaacacctataagtgtactcgacagattatctctgagaagctaggccgtggctcaagaactgtggaccttgaacttgaagctcagattgatatattaagggataacaagaaaaaatatgaaaatattttaaaactggctcaaacattgtcgacccagcttttccagatggtacatacccaaaggcaacttggagatgcatttgctgacctgagtttgaagtcactagaacttcatgaagaatttggctataatgccgatacccagaaactgctggctaaaaatggagagactcttcttggggccattaattttttcattgctagtgtgaacactttggtgaataaaaccattgaagatacattaatgactgtgaaacagtatgaaagtgccaggattgaatatgatgcatatcgcactgatttggaagaactgaatcttggaccacgtgacgcaaacactctgccaaagattgagcagtcacagcatctcttccaagcacataaggaaaaatatgataaaatgcgcaatgatgtttctgtcaaattgaaatttctagaagaaaataaggttaaagtattgcacaatcagctggtccttttccacaatgccattgccgcttactttgctgggaatcagaagcagcttgaacagacacttaaacagttccatatcaaattgaaaacccctggagtggatgccccatcttggcttgaagaacagtaaaatcacagcggaaaataaaaagaaagtcgcgttgttatatttctaaaccaacctaacaagaattaagcagagttgggggaagtgggaggggtgacaagcattatagtgattcttgcacaaacagctttaatttttccctttttcatactttaacaattgaactgttaagggtggttttaatgtaaacatagtttctataatctgaacacaataattttcctttttgagaaatccttttgtattgtgagggttgatggctatttctgtagtttgaaaacatctaatagagatttgcactgacaagataaaaattcaaggtttttggtcctggaaatgagggccgattgtaacttttccaaagggaggtttacatgatttgtatcaacatcagatattttatatgtgaatatattaaacatctttaagagattcattttcatgtattaaagaaaaaagaaactattttgcagagtaaagttatatggtgttcctgcagcgtccacacagaggcagcagctctaatgaatgattagcttgtggagttgtggcaaatacctttttaaaaatgaatctgtaccactgtaattttatttagacttttttttaaagacacagaaatcacactgtcatttctgtgaggcttttaagcttatgaatttgcttcacccgaagtcattggacagttacatttgcaatttcttttggttcataacaaaacctgcttaagagaatttttttttttgacaggtggacgtgggaatggaaattcttaatggtttctggagtagaaatctgtacttagaaaactagtttttgggtcagttccattttgatagaagtgaatacatagacagcttttattgacttccatatgtaacaataccgtttaagccttaaatcacagatatgtgccttctcagatacagtaattcttgttcaaccaatgtacaaaatccataaagaaacccctgttggataatgtttgatgtgtctattccttccatggaatggagcactatgtatgaatgttgggtttctttgtacttgttaagccacatttgaggtttatggtaaaaatcatcttttgagtttgctctttggtttttcttcattccttttgaggattgggaaaacagaaagattctttgatttgggtaatgaagaggtaatttgggacagtgtggtggtaccaggaagaaagaggattggaaaggccagtactgttttagttgctcggcactgttggttttgttttaatgtggttgccctgtccactacatggttctatcagtagtgtaatccattttcaatgtaaagctcttttagtttttgtcatagacataaattaatattttgagaggcatccctcacctgttcatttcttctgtgttgaaatgaagtacttaaaattaccgttatacatgaactttgtggactgtaagatttgttatatatgttcaaatgccttttagctggctttttaattaatatgcctgttttgagtgcttaatacaatgtaatgtgattgtaaatcatacctattttaaatcattccttcctgtatatttgtactcagagagccttattttattcttccagcagaattactacttgtgatagttcatttacattccccagaatgtgcctctagtgtgaattttgtattcttattaaacgtgtttgctgcagtaaatcgtttctctggaccttcatagtttaagaagtaactatttggaaattctgaagacacataatttgcgttttctgaaccttaaaaaaaaaggtacttctgtcacttataattgttttagctcagtaagctattttttttcaatgtgaatctcttttgagagctgaacatgtccattcttaaccacatttcaataacagttactgtagctaaggagctaaatagtttcatggattaatttttttcagaataaatttaaaatatccatgattctgatagtgggcacatgaccaaaagaaaaaagtaaatcaatatatttagccaatggtacatttactttgttaggaatgtaatttatgttcattatagaaaagaattagaagaaaatttcaagtaatagaagataagtaccttcccaagtgaataaatactgcatggaaccactcaa

SEQ ID NO: 3534 - DNA, 583 bp, Homo sapiens
  source 1..583: mol_type = genomic DNA
cacagttcccggtccctagacaaccctggctctgcccgcccacttcgcgtgttcgattggcttgtccttcccctttctaagaccggagactaaggcggcttatgacccctacgcttatcccagcgactatgatatgcacacaggagatccaaagcaggaccttgcttatgaacgtcagtatgaacagcaaacctatcaggtgatccctgaggtgatcaaaaacttcatccagtatttccacaaaactgtctcagatttgattgaccagaaagtgtatgagctacaggccagtcgtgtctccagtgatgtcattgaccagaaggtgtatgagatccaggacatctatgagaacagctggaccaagctgactgaaagattcttcaagaatacaccttggcccgaggctgaagccattgctccacaggttggcaatgatgctgtcttcctgattttatacaaagaattatactacaggcacatatatgccaaagtcagtgggggaccttccttggagcagaggtttgaatcctattacaactactgcaatctcttcaactacattcttaatgccgatggtcctgct

SEQ ID NO: 3535 - DNA, 2663 bp, Homo sapiens
  source 1..2663: mol_type = genomic DNA
gtgcaacggccgttagaggagctgagggagggaaccaccgctcaccgcagacgtggtggctgcagtcagtcttcccgagtgagggatttcgccgcccgctttcaggcccgtttggcttaaataactgtgattgatggccatgcaggagaaatatccaactgaggggatctctcacgtcacttcaccgaatttttgcagctcaagtggcagtcctcctttccagcccatcaaaagccacgtaaccattccaacagcccatgtgatgccttctactttagggacctctcctgccaagccaaattctacacctgttggaccctcttcctctaaactccctttgtcagggttggctgaaagtgtgggaatgacaagaaatggagacctcggtgcaatgaaacattctccaggcctatctagagatctcatgtatttctctggtgctactggagaaaatggaattgagcagtcctggtttccagcagtgggccatgaaagacaagaagaggcgaggaagtttgatattcctagcatggaatctaccctcaatcagtcggcaatgatggagacactttattcagatcctcaccaccgagtccgcttccacaacccaagaaccagcacaagtaaggagttgtacagagtgttgcctgaggccaagaaggcaccgggcagcggggcagtgtttgagcggaatggaccacattctaatagcagtggggtcctccctttgggactccagcctgctcccgggctctccaagcctctgccctctcaggtgtggcagccgagtcctgacacttggcatccccgagagcaatcttgtgaactcagcacttgtcggcagcagctggaattgattcgtttacagatggagcaaatgcagcttcagaatggagccatctgccaccatcctgctgcttttggtccttcactgcccatcttagagccagcacagtggatcagcatcttgaacagtaatgaacaccttctgaaggaaaaagagcttctcattgacaagcagaggaaacacatctctcagctggagcagaaagtgcgagagagcgaactgcaagtccacagtgccctcttgggccgccctgccccctttggtgatgtctgcttgctgaggctacaggaattgcagcgagaaaacactttcttacgtgcacagtttgcacagaagacagaagccttgagcagagaaaagattgaccttgaaaagaaactctctgcttctgaagttgaagtccagctcatcagagagtcgctcaaagtggcgttgcagaagcattctgaggaagtgaagaaacaggaagaaagggtcaaaggtcgtgataaacatatcaataatttgaaaaagaaatgccagaaggaatcagagcagaaccgggagaagcagcagcgtattgagaccttggagcgctacctggctgacctgcccacactggaagaccatcagaagcagagccagcagcttaaggattctgagttgaagagcacagagctgcaggagaaagtgactgagctggagagtttgctggaggagacccaggcaatctgcagagagaaggagattcaactggaaagcctgaggcagagagaagcagaattctcctccgctggacatagcctgcaagataaacagtctgtggaggagaccagtggagaaggtccagaagtggaaatggagtcctggcagaagcgatacgattcgctccaaaagattgtggagaagcagcagcagaagatggatcagttgcgctcacaagtacagagcctagagcaggaagtggctcaagaagaaggaacaagccaggccctgagagaggaggcccagcgaagggattcagccctgcagcagctgcgcacagccgtgaaggagctttcagtgcaaaaccaggacttgattgagaagaatctgacactccaggaacacctgcgccaggcccaaccagggtctccaccttcaccagacacggcccagctggcacttgagctgcaccaggagttggccagttgccttcaagatctgcaggctgtctgtagcattgtgacccagagggcccagggccatgaccccaatctctccctgctcctgggcattcactcagcacagcacccagagactcagctagatttgcagaagccagatgtgatcaagaggaaactagaagaggttcaacagctgcgtcgtgacattgaggacttaaggaccaccatgtcagacagatatgcccaggacatgggagaaaactgtgtcacacagtgaggaattctgggggattcccccagggaggagctgggctgctgagagcctagtccagcaggtttctgccctgacattctcttgtctgctattcccagagaggtctcagaggggaggggagagcctgcatctgggggccaagggctgattagggaactgtgtcctacccacactggcatgttggattacgtttgtcctgttaattcactctagacggtgagttactaattaacttttggcaggtacaacagataagtcctcacaaactgttcccagccctaggctgacatgagagacgaacaggctgtccacctttcttctccatccaatgggatggatccatgttcattcccacttcacaccttggtcctgctgattagagagctcatcagagggg

SEQ ID NO: 3536 - DNA, 972 bp, Homo sapiens
  source 1..972: mol_type = genomic DNA
ggcatgcctctgctcctttgcgcacgcgcgccgcttcccagtggcaagcgcgggcaggaccgcgttgcgtcatcggggcgcgcgcctcagagagagctgtggttgccggaagttgagcggcgagcagccttgtgagagacatttctgagacctgtatgtcctgcgtctatgattcttccctgatcaaggcttctcaaaccccataatgctggtatccagtgcatccgttctcaaaaactgaagctgatggacaccagattgcatgtgaaggtgaaggatattatagcagaaggaaaccaaaataaaagaaaaacagctcctggaagtaaccaatgagaaggacagataagagtttgaagactgtggatgtgactgcttgttccctggttgacacactgaagaagaaatcatgttgattcagagttggcttggaggcaagaaataatggcggcagctacgggggatcctggactctctaaactgcagtttgccccttttagtagtgccttggatgttgggttttggcatgagttgacccagaagaagctgaacgagtatcggctggatgaagctcccaaggacattaagggttattactacaatggtgactctgctgggctgccagctcgcttaacattggagttcagtgcttttgacatgagtgctcccaccccagcccgttgctgcccagctattggaacactgtataacaccaacacactcgagtctttcaagactgcagataagaagctccttttggaacaagcagcaaatgagatatgggaatccataaaatcaggcactgctcttgaaaaccctgtactcctcaacaagttcctcctcttgacatttgcagatctaaagaagtaccacttctactattggttttgctatcctgccctctgtcttccagagagtttacctctcattcaggggccagtgggtttggatcaaaggttttcactaaaacag

SEQ ID NO: 3537 - DNA, 1545 bp, Homo sapiens
  source 1..1545: mol_type = genomic DNA
gccagaggagcggctccggccgccgcgcctgacccttgtccggggtcttccgcacagtgggctgagggccatgtcagttttctgccacctacaggatagaccatgaagctgaaggaacttgagcggccagctgtccaggcatggagcccagccagccaataccctttgtatctggccacaggaacatctgcccaacagctagattcctccttcagcacaaatggcacattggaaatatttgaggttgatttcagggacccttctctggacttgaaacacagaggagtcctttctgccttgagcaggtttcacaagctggtctgggggagctttggcagtgggcttctggaaagctccggggttattgttggcggcggggacaatggcatgcttattctatacaatgtgacccacatcctgtcttcggggaaggagcctgtgattgctcagaaacagaagcacacgggggctgtcagagccctcgacttgaatcctttccagggcaacctcctggcttcaggggccagcgattctgaaatcttcatttgggatctgaataacttgaatgtgccaatgaccctgggatccaagtcacagcagcctccagaggacatcaaggcactgtcttggaaccggcaagcccaacacattctgtcttctgctcaccccagtggcaaggcagttgtgtgggatctcaggaagaatgaacctatcatcaaagtcagtgatcacagcaacaggatgcactgctcaggcctggcctggcatcctgacatagccacccagttagtgctgtgctcagaggatgatcgacttcccgtgattcagctgtgggacttgcgctttgcctcctcgcccttgaaggtgctggagagccacagcagggggatcttgtcagtgtcatggagccaggctgatgctgagctgctgctcactagtgctaaggacagccagatcttgtgccggaacctggggagcagtgaggtggtatataagctaccaacacagagcagctggtgctttgatgtgcagtggtgccctcgggacccttcagtgttctctgctgcctccttcaacggctggatcagtttgtactctgtgatgggtaggagctgggaagtccagcatatgagacaggctgacaagatctcctcttccttcagcaaaggccagcctctcccaccactgcaggtgccagagcaagtggcacaagcaccactgatacctcccctgaaaaaaccccccaaatggattagaagaccaacaggtgtttcatttgcttttggagggaagctggttacttttggcctccccagcacccctgcccatctggtgccacagccttgcccccgcctagtcttcatcagtcaagtcaccacagaatctgaattcctgatgcgatcagctgagctgcaggaggccttgggatcaggaaatctactgaattactgtcagaacaagagccagcaagctttactgcaaagtgaaaagatgctgtggcagttcctgaagcccgccagagacagctcaggtgcaaggagatga

SEQ ID NO: 3538 - DNA, 2853 bp, Homo sapiens; identical to SEQ ID NO: 2528
  source 1..2853: mol_type = genomic DNA

SEQ ID NO: 3539 - DNA, 3546 bp, Homo sapiens
  source 1..3546: mol_type = genomic DNA
gagtgtgtgacccagcccttcccccgtggccaagcagagagagtggccttgaggaagccatagcagcaggaccagcatggcctctgctgcctctgtgaccagcctggcagatgaagtcaactgccccatctgtcagggtaccctgagggagccggtcactatcgactgcggccacaacttctgccgggcctgccttacccgctactgtgagataccaggcccagacctggaggagtcccctacttgcccactctgcaaagaacccttccgtcctgggagcttccggcccaactggcagctggctaacgtggtggagaacattgagcgcctccagctggtgtccacactgggtttgggagaggaggatgtctgccaagagcacggagagaagatctacttcttctgtgaggatgatgagatgcagttgtgcgtggtgtgccgggaggctggggagcacgctacccacaccatgcgcttcctggaggatgcagcggctccctatagggaacaaatccataagtgtcttaaatgtctaagaaaagagagagaggagattcaagaaatccagtcaagagaaaataaaaggatgcaagtcctcctgactcaggtgtccaccaagagacaacaggtgatttctgagttcgcacacctgaggaagtttctagaggaacagcagagcatcctcttagcacaattggagagccaggatggggacatcttgaggcaacgggatgaatttgatttgctggttgctggggagatctgccggtttagtgctcttattgaagaactggaggagaagaatgagaggccagcaagggagctcctgacggacatcagaagcactctaataagatgtgaaaccagaaagtgccggaaaccggtggctgtgtcgccagagctgggccagaggattcgggactttccccagcaggccctcccgctgcagagggagatgaagatgtttctggaaaaactatgctttgagttggactatgagccagctcacatttctctagaccctcagacttcccaccccaagctcctcttgtccgaggaccaccagcgagctcagttctcctacaaatggcagaactcaccagacaacccccagcgttttgaccgggccacctgtgttctggcccacactggcatcacaggggggagacacacgtgggtggtgagtatagacctggcccatgggggcagctgcaccgtgggcgtggtgagcgaggatgtgcagcggaagggggagcttcggctgcggccagaggagggggtgtgggctgtgaggctggcttggggcttcgtctcggctctgggctccttccccacacggctgaccctgaaggagcagccccggcaggtgagggtgtctcttgactatgaggtgggctgggtgaccttcaccaacgctgtcacccgagagcccatctacaccttcactgcctccttcactaggaaggtcattcccttctttgggctctggggccgagggtccagtttctccctgagctcctgagaaggagcagttacctactctcctctaagtacaggactcatatcaacccaagtaccatgtggacttgatccctggctgaatcacctggatgacttggaatagaaatgactgctttagaagatgggatggggccgggtggtaagggatagaagagaggactctcaatctactgatcaagtcctttccccaatgcccagtggatggccagggtacctggggactcaggctgctgccagttctgctcaccaccatccgtgcttggcacagaagtagctgcatagaaagggcactggatttgaagtcagaagacctgggttcttgaaccagcctgtcaaccagttgtatgactttaaacaaggcatctcacctcttttcatcttgttttcttccaataatgttagagttcatgtaatcacattctctagaaccatttagtttgtgttaactatgaaccaagcagtgtggtggccactggtgacttgaaaatatagagaaaaaaaaaacctgctctatatctgaaagagctcttgggaagacagagaaacataaagaggaaattacagcacagtgtggtgggtgttacgggaagtccaaccccagcattatgggagttcaggggaaggggcatagcccagcctggaaggagagggtgagtgggggatggctttctgaaaagggtggtctaaaggatgcctatggtcaatagggaaaagaggggaagaagcatcttaagaagaggaaacagcagagaactggctggatgacctgtgactctggagcactgggttgtctccattgtcattatgggcagatgtgtgccatccccagccgacgccactcactgcctccttcctcctggtgttgccacttctgggtgagattaaggtgcagggcctgggggcaggaggacataaggtatagccataaatcataacccagggaccacactcaaccctagggaaattgtcttcctgatcagttgattaccatctgaggtcaagaaatgagatagtgggagcaaatgggtcacaaatagctcagctgtgggctcagaaactgctaggtaaaagaattccagaaggaggccagggcataagttggatgacctatgaactttagtctaaagaattgagactaccgtaattgagactactgtagtgacatctgagaaatgggatggaagagtgaccatgttttattttcttgttcttgtcactattgtattttattttgcataatcatgcccttcactgacagtctccttaacatcatctgtttactctgctcagtgtaaactacaatgctctgtcatctccctactgggtctcctgggaggaggggagccatccagggtgcaaactcaaaggcagagggcacagcgtgcttaggcccaagcttagaattcaattgagaagttctgttgttcatccttacctcagcaggtagaaaagaggtggagatcagaagccagggattagagattgaattgctttccctgggagtgtgcagtatctcattaaaatgttgtatattcaaaaaaatacagacacacacaagtgcctatataatgataaaacatatccaaagcacccaaacctgtgattccagaaaagtagatcctatttttgtttatttttattggctttagctgtgtcttttgaaaggactattatcctctaaaatgtatgtgtatgaagatcctggcttgcagctcgggagctttacacaccttgtgtcactttatcttggtaacgagccaagatcatgcaaccagttcatccatgtctgacccaagagctcttaactgctatgctgcactgcctcattcagagatagatgcctgcatgggtcctggcgattattttaatgctggctacacccccacaggtgacttggattcagaaatacaatttatatttcttctttttaaattgttttattttatttttcttttaatagttatatgtcagtgagaacaatttatatgtcttacactgagaaataaaactgctcataagtgaaaa

SEQ ID NO: 3540 - DNA, 1641 bp, Homo sapiens
  source 1..1641: mol_type = genomic DNA
cgtgtgcagacccgcgtgtggcgcaggcaaggaccctcaaaataaacagcctctaccttgcgagccgtcttccccaggcctgcgtccgagtctccgccgctgcgggcccgctccgacgcggaagatctgactgcagccatgagcagcaatgagtgcttcaagtgtggacgatctggccactgggcccgggaatgtcctactggtggaggccgtggtcgtggaatgagaagccgtggcagaggtggttttacctcggatagaggtttccagtttgtttcctcgtctcttccagacatttgttatcgctgtggtgagtctggtcatcttgccaaggattgtgatcttcaggaggatgaagcctgctataactgcggtagaggtggccacattgccaaggactgcaaggagcccaagagagagcgagagcaatgctgctacaactgtggcaaaccaggccatctggctcgtgactgcgaccatgcagatgagcagaaatgctattcttgtggagaattcggacacattcaaaaagactgcaccaaagtgaagtgctataggtgtggtgaaactggtcatgtagccatcaactgcagcaagacaagtgaagtcaactgttaccgctgtggcgagtcagggcaccttgcacgggaatgcacaattgaggctacagcctaattattttcctttgtcgcccctcctttttctgattgatggttgtattattttctctgaatcctcttcactggccaaaggttggcagatagaggcaactcccaggccagtgagctttacttgccgtgtaaaaggaggaaaggggtggaaaaaaaccgactttctgcatttaactacaaaaaaagtttatgtttagtttggtagaggtgttatgtataatgctttgttaaagaaccccctttccgtgccactggtgaatagggattgatgaatgggaagagttgagtcagaccagtaagcccgtcctgggttccttgaacatgttcccatgtaggaggtaaaaccaattctggaagtgtctatgaacttccataaataactttaattttagtataatgatggtcttggattgtctgacctcagtagctattaaataacatcaagtaacatctgtatcaggccctacatagaacatacagttgagtgggagtaaacaaaaagataaacatgcgtgttaatggctgttcgagagaaatcggaataaaagcctaaacaggaacaacttcatcacagtgttgatgttggacacatagatggtgatggcaaaggtttagaacacattattttcaaagactaaatctaaaacccagagtaaacatcaatgctcagagttagcataatttggagctattcaggaattgcagagaaatgcattttcacagaaatcaagatgttatttttgtatactatatcacttagacaactgtgtttcatttgctgtaatcagtttttaaaagtcagatggaaagagcaactgaagtcctagaaaatagaaatgtaattttaaactattccaataaagctggaggaggaaggggagtttgactaaagttctttttgtttgtttcaaattttcattaatgtatatagtgcaaaataccatattaaagaggggaatgtggaggactg

SEQ ID NO: 3541 - DNA, 550 bp, Homo sapiens
  source 1..550: mol_type = genomic DNA
agctgcgacgccgagtttcactctggctgccttctcctgagagtcggagccacagccagagccctgcccaggccgagccggagctgcagcccgagcgcggtggtgccctcagccccgtcctcttgtcctcctcagcctcggctgtttttgcagagttgtgagagttggttcatccgggccatgaggacatgttgggacataccccgtgtgccgatgatggaggcggccgtggctgcccgagagatgcgtgacacccaggagtaattggcttggaaggcagtcctctgatttgtacctcattgtggttacagaaacttccaattgaagacactgagctgaaccattccgcccgcccgcccgcccgagggcactccagatctgccggaggcgctgggcaatgaccccgggactccaggccagaggggtctgaagctgtttgggaaagcagcgggactccttgggaagatggccatggccccaagcccttccctggtgcaggtgtacaccagccccgcggctgtggccgtgtgggaatggcaggacgggctgg

SEQ ID NO: 3542 - DNA, 4307 bp, Homo sapiens
  source 1..4307: mol_type = genomic DNA
acgtgcttaggagccatattgtcgctagtggccgctggggctgggaggggtgtgctagagaggcgcagcttctctgggcgtggtttttatcctgggggaaggatcggtggaatgtgaggggaggtggaggagatggcggcgacggcccgggaagatggcgccagcggtcaagagcgaggtcagcggggctgcgagcactatgacagaggatgtctcctaaaggcaccttgctgtgacaagctttatacttgccgcttgtgtcatgataacaatgaagatcatcaactagatcgctttaaagtgaaggaagtgcagtgcataaactgtgaaaaaattcaacatgcccaacagacttgtgaagaatgtagcacattgtttggagaatattattgcgatatatgccatttgtttgacaaagataagaagcagtatcactgtgaaaactgtggaatttgtaggattggtccaaaggaagattttttccattgtttgaaatgtaacttatgcctagctatgaatcttcaaggaagacacaagtgtattgaaaatgtgtcccgacagaattgtccaatatgtttggaggacattcacacatcccgtgttgttgctcatgtcttgccatgtggacatcttttacatagaacgtgttatgaagaaatgttgaaagagctacagatgtccattatgtatgcactctgctttagatatgaccaggtattggagacagctggatgatgaagtagcacagactcctatgccatcagaatatcagaacatgactgtggatattctctgcaatgactgtaatggacgatccactgttcagtttcatatattaggcatgaaatgtaagatttgtgaatcctataatactgctcaagctggaggacgtagaatttcactggatcagcaatgacgagcctacacagtactggagaacttggcattttctgatatagaaaaaggctttccttggtatcgtgttatcatgtgtcgtcatctatgcattagagttgatgtgttttgtactagtgtcacagcataaaatcatattacaagtacgtaaggattcagggtctcttgatagacttatcatagctctatattgaatgaaagccactgtgcttgtgttttgattggaaattcctttagtgtcagttttttggaagccaatgatgtttgccactgatacattcatagaagtgtattatattttcatgaagctttgctttaagtgacactacgcgtgcagttcatttctagttcttgatagaactgcacttaattttcagtagtagtcttgactttttaagggctgtgttatattaagttctcccttactgttaaaacctaattaaatatgctttagaattttctaagacagtcctctggatcctctaaatgtgaattttgatgtaataactgctaataaaattatattgaaactgttttatagaaagttttttccaaagttttctatgtttggctcaattagggcagtatcatcagttctataatgtaaaagaaattttctttcttttgaggtattccataaaagtagttgggaaaattattatgtaaaataataagactcttccaaagccttaataaaaacatcaacattgaaaacagttttttttaggttgcccaaaattatttcttcaaagagtcattcattccttcatttagcaagtatttattgagcaactgctatgtggcagatatgtttctagatgctgtagagacaacagtgaacaataaagataaaagtccttgtcctcacagcagtacattctattgttcatcatatttgatcaatgtactcatttttctttatgcaaggagtggatgtcttattgtaaatgaatagaatatttcttccctaagcgtgtgaaaataggggatggatgagtgggaagggcatgggatattcctggcaagatctctgatttcataatacttttttgggctcatgtagtggaattaaatatacctcttacttcaggaacaaagttaacaaatatgtttgatgatccagccgactttgacactgttatctccgtaatagctttaccattaggctaggatgtaaaatgtacatttatcagttgataagtacctattgagcaccagttgtatttccaactttgagctatttgaatcttctttgaataaggaagttagccttttaactagaaagcctaagagttctggcacatttatttcttcttttgttgaaatttattcacctagataaaggcagcagtttgggactcagatctttattttatcccaccttcttgtcttctgtattccactcttcttatgttctttcccttcatctgtttccttggcctggccagagcagcagtgctgatcttcatttgggaaaggatgttcctgggtattaccaattagtatacagataagtaaagactagttttccagatctaatacttttttttgaagtggttttgctctgtcatttaggctagagtgtagtgaagtgatcgtagctcactgcagccttgacttcctgggctgaactgatccttccacctcagcctcctgagtagctgggactacaggtgtgtgccaccatgcccagctaatttttaattgttttgtagaaacaaagtccaggctggtcttgaactcctgggctcaagcatttctcctacctcggccttccaagggctaggattacaggcatgagccactgtgcttggtccagatgtattactttttatgtttggtattattctgccaaaccaatcatgttattgtttttaatcattgaatcattggatctttaaataggagtgagtatataataataaggctcttctgttttcaacatctgtgctgggtcatgcattagcattaattactacaatgattctgtggggtaagtgttgtcctcatagacaagaaagctgaggtttagaggttaaaatgacacattgggggtaaataacagacactatatgttggagttgggaatcagatccaagtttgactccaaacccacttttaccacattgcttttgatctaaacttctattttgctaaaatacccctcacagctagtcatccatatcattgaagcgctcatgatttgatagattaacctttcatttttttaggtgactctagttagaaagtcttatttcacaatctgattgtttctttaacttaggatccaaacatgtccaaaataatgcagagtacatatgcaatcactcgtttatgctgtctagtcatgcacttaaagcaattttcaaatgtactcaaagtctctaggcttcggtacccagggttgcttcaagtatttgttcatgacacgtcaactcgatgattaaaatccttcaacacttctcattcacaataagaataaaatctacatcccttaccattcagtatgcaaaacttaaaatacataactttacccttaaatattttttctttctctgacttcataagtataggttatacctctataagaaagaaggtaaaaaactctcaacaatcccttctttcagagagaactactgttaacattttaacagacaacttcattcttttcctattcttttttataatgcttacaggaatgttaaatacttagacagatcttaagtacactagaattatctgtccctgaaataagttaggttgccctgccgcagaatttgtatctatagtttatttggattatttttgaaaaaagtaaaataacaatacccttacgaattttttggtgcatagcatctcagcttcttttatcattaaagatgtatgtataaaaaaaaaatgagtgtatatcaagttgttcatttcttagtttctggggtcttcttaaccagtacatagaactctttatgaattaactttagcttatgttggaagtagtagtttgtttatagtgtcatggattttaaaatcaaactcagtttttatttcttcactaaaacctattttcatatgatatacatgttaaatttcccttttattttggtcatgcatcaaaataaatttactaagtactaaagagccaacattattttataagtgcctggcaataggtattcactagttgaatagtttaatttgaaatgaattaattttaaatgggagttgttcaaaactatgccactttttcttttgtcctttgtgttattaaaatttaattgataattgtgtatattatatatatggagtacaatgtgatgttttgatatatgtttacagtgtagaatgattaaatcaatgtaataaatttattgcctcataccattttttgtggt

SEQ ID NO: 3543 - DNA, 646 bp, Homo sapiens
  source 1..646: mol_type = genomic DNA
gcggaagatggcgacgcccctcgggtggtcgaaggcggggtcaggatctgtgtgtctcgctttagatcaactgcgggacgtgattgagtctcaggaggaactaatccaccagctgaggaacgtgatggttctccaggacgaaaattttgtcagtaaagaagagttccaggcagtggagaagaagctggtggaagagaaagctgcccatgccaaaaccaaggtcctcctggccaaggaagaggagaagttacagtttgccctcggagaggtagaggtgctatccaagcagctggagaaagagaagctggcctttgaaaaagcgctctccagtgtcaagagcaaagtccttcaggagtccagcaagaaggaccagctcatcaccaagtgcaatggtaggcgggaggcccgtgctctccaccacggttatataaacgggctctttcctaaccacccagtgcctgtgtcaaaggcagggtttcactctaacacctgtccccagctgaggatacaggcaggcccgggtgggccacaccttcgaaaaggccttaagggaccaggcaggccacggaaatgagggaagcagtcggtgtactatattcttcaccgccataaaggaatgggcttgctcccatttttcctgaaacat

SEQ ID NO: 3544 - DNA, 950 bp, Homo sapiens
  source 1..950: mol_type = genomic DNA
ccccaacccccctgctgggccgggtaggcgtttcagtctttcgcggcccgggagctcagcagagctaccagctgccctgttggcttcgctggtcggatcgtcctcctggccccgccaaacaggcggggggagcggccccgactgtggggccatggcagtagtctcctcgttcgccgccgccgctagcctagctgagtcgccggcttctgcgctaggggctcccaccgcctccgcaggctaaggagccgctgccaccaacgagctgtgagggttactatgctccctctttgccgccgtctcctcctcttgcccgcgcaggcacccctctggctgctcagtcctgcctcagtgtcaaaccagaagagaagtaaaattcaacaaaaatttatgtgtggagttccttcttaaaagaagaaaaaagtgattatttagactatggatcggagcaaacggaattcaattgcaggatttcctccacgtgtggagcgtcttgaagagtttgaaggaggtggtggaggagaaggaaatgtgagccaggtgggaagagtttggccatcttcgtatcgagctcttataagtgccttttccagactgacgcgtttggatgatttcacctgtgaaaaaatagggtctggcttcttttctgaagtgttcaaggtacgacaccgagcttctggtcaggtgatggctcttaagatgaacacattgagcagtaaccgggcaaacatgctgaaagaagtacagctcatgaatagactctcccatcccaacatccttaggtgcagaagtatgaaccagaatttttccccaaattgagattagatctacattgggaagaatccatctcttggaaccctaggattacacagatgtgccttctcaggtcctagtccaatggaggttgggtagaggtggaaggagagctcattttcacctagaagagggcctca

SEQ ID NO: 3545 - DNA, 4617 bp, Homo sapiens
  source 1..4617: mol_type = genomic DNA
actgccgctgccgcggctacctgcggttcatctccgcacattccacacgcggcccaaacggtctctctctctctctctcaaacaccgcctttccgtctttgttttatcttgagtagcttagaaagattggagaagaaagcttacgtggaatgaaaatcaacttttatggatattttgaggactaaaagaataaatagggcgtccgtactgtagcgaaagtgcgactaaggttaggcatctggatttcccccgtagccctctttcaccccccccccccggccattaccgaagcggatgaaaacaaacactaacgatggcggcgccgggaagcgaccggctgctgggcttaaggcgggagtgaccgcttaaccagtgagggaagcactgaagagcgccagtcgacgtgggtgcgacaactcgcggagtcttaggagcaaaacgtctggggcctgcgagccaggacccttctgaagccttaggtgtctatcggcgacgtgtacggtcactgcagctccggagcgcggaaccctcagccaggaggcgcggctggtcggtcccaggtcccggcctccgtaatgagagcccggaaccactctttgtgccgcagcttcgcaggtactaacttttgcgggggataccccaagatctctcagcgcccccgggtgggaggctgtggattcctataggcaatggaaactgatctcaattcccaggacagaaaggacctggacaagtttattaaattttttgccctcaagactgtccaagtgattgtccaggctcggcttggtgaaaagatttgcactcgttcatcatcttctccaacgggttcagattggttcaacttagcaatcaaagacatcccagaggttacacatgaagcaaagaaggcactggcaggacagctgcctgcagtcgggaggtccatgtgtgtggagatttcacttaagacttctgagggagattccatggagctggaaatatggtgtcttgaaatgaatgaaaagtgtgataaagaaatcaaagtttcctacacggtgtacaacagactgtcattgctgctgaagtcccttcttgctataactagggtgacaccagcctataggctctccaggaaacaagggcatgaatatgtcatattatacaggatatattttggagaagttcagctgagtggcttaggagaaggcttccagacagttcgtgttgggacagtgggcacccctgtgggcaccatcactctttcttgtgcttacagaattaacttggcattcatgtctaccaggcaatttgagaggaccccacctatcatggggattattattgatcactttgtggaccgtccctatcccagctcctctcccatgcacccctgcaattacagaactgctggtgaggacactggagtaatatacccgtctgtagaagactctcaagaagtgtgtaccacctctttttccacctccccaccatcccagctgatggttcctgggaaggaaggtggggtaccccttgctcccaaccagcctgtccatggtacccaggctgaccaggagagactggcaacctgcaccccttctgacagaacccactgtgctgccacaccctccagtagtgaggatactgaaaccgtatcaaacagcagtgagggacgggcctcccctcacgatgtcttggagaccatctttgtccgaaaagtgggggcttttgtcaacaaacccattaaccaggtgaccctgacgagtttggatataccctttgccatgtttgctcccaagaatttggagctggaggataccgatccaatggtgaatcctccagattccccagagactgaatctcctctccagggcagcctgcactcagatggctccagcgggggcagcagtggcaatacccatgatgactttgttatgatagactttaaaccagctttttctaaagatgacattcttccgatggacctggggaccttctatcgggagtttcagaacccacctcagctgagcagcctctccatagatattggagcacagtccatggctgaagacttggactcattaccagagaagctggctgtgcatgagaagaatgtccgcgagtttgatgcctttgtggaaaccctgcagtaaaagtatccttgagtcccagcagcaccccctttttgtggccccagggcataagcagcctcccatgcatcagctgctcccacccctcatcctgctctgagccaggtggaagggaggctggcttctcccatggggacccagaagtccctactcttggacctcctggagactccgtggcggcagtcaagcccagtgcccagttggagaagactcacgtgctggccttggagatgggaagaaccttcgtacgaaaaagccctcagcagggccatctgtgtgccctgcccatcaccaactgcttcccaagggtgtcatcctgttcctcctgctgccggcctcctgcctgggcctgccttgcagctggccccttccctgcctgctgtcaccatccactgtttgacattccagctggtggccaagagattggtgtggagtcgcagaaagaggaaggagacagtgccaggaggaagaaggaaggagtcccttagctctcttcattgtcccctttacttcctgctatcttcttctcctcttcttctctctcttgcctctatgcctgtatttctggcaatatgacaggcctgcctacccaagatcagaactccaaaaccactcccacccctgaaggtcgggagggtctgagcagccctggtggctgcctgtgctcaggtcctcagctccatgggaaataaaaatggcaccctgaatctctaggattttgtcacttggagtcacagcaaagttctcttcctcttgtccccccgttgctgctccttggttatagaacatggtaaatatttattactttcagagaaaccagatattttatagaggaaatatgtttgaggtgagttgtttttcacttggagaaggcggagggctcttcctgggacggagacctcctcctccggaggttattgagaatccgggctgctgctttgaggatcttcccaccatacagacagcgagatccaagaagagggctggccgggggcaaagtcacctcccagtgtggctgcactggaactgactaaaggctttaccttggatagttgcgtattcctggtgagagccttacatctcccacagtttctgcagagtgactgactccattctggcagcccaggaagtcctgggtgctaaatgtgatggccacatgtagtggttaggggatgttgtgtgtgtcccccaactgcctgggtacttgttcctgatccctggggctgtcctgtggagcttttcctcctgcttgggcctagctaccatctccctctaatcccaggttctctacactgccctggggtttaccagctggattggcttctggttgagaaatcaaagctgggcgtatgattgacttaacccttcaggtattgttacttgaataagtcaagtgcctagcctcacccacctatgatctgtcctttcccagcctcgctggtagtcctggtcaaggagatctaggtctactccattcctcctggcccacctggggcattcactggcagcagctgtgcttcagtggagcaggtggttctcagctgcttgttagtatactgcatgtgacactgttcccacatacaaggctgacttctgaggattggagcaggctctggcggggaccagagctctgcgtgctgctgctgccaccaagaagtgttagcagaagcagtagcagccaactggccctcctgactttggcccagagcacatgcgtggcttgctgaacccaggctcaggtttatccccaaggccccagctttgagaagggggaaggcccctggtaagttattgatgcccccatatttcagctactgctctctttccaaggccttgcatggaaaggcctagccattgtctgaggcagcaatctttggcatctacaggtggcagcagcctttcaccagggctccatctgtgaagagtctcagccatgactttgagctgagcttgggagaagtaaagcaactgttaaggccagcccttgcccctcagacctgccatgaaaggaatgagccctagactgactcctgcagcacccccgggacaggctgggaccagctgtttgtctccaggtgtcagagtccctcctcctcctccaacctctccaacctactttgtttggaaataccgagctacacttcaaaatgtattcaagggatttccaataaatttttttctgtactttacagcctcctgtcctgtaggttgtctgaagacctcgtaaccccttccccacccctgccccagtgcaggtctgggaaaggggagagtggtgcgttgtgaagcgcagaaagacctcaagtgtctgggcaagcctgttttgagtcgggtgtggcctcttaggggctgtataccctggggtttcctgggtcaggaaacttcttagtatttctctttccctggtcccctatcaggggcttgaatttgaatattcagttggagaatgcatttaaaatacacccatagtaaaatctccataaaatgc

SEQ ID NO: 3546 - DNA, 521 bp, Homo sapiens; identical to SEQ ID NO: 1926
  source 1..521: mol_type = genomic DNA

SEQ ID NO: 3547 - DNA, 596 bp, Homo sapiens
  source 1..596: mol_type = genomic DNA
agacaaagcctgaatcctggaaaaagccaactctttgaacaggaattagagtgtgatcggctcagttgacgtacagggaaacctttatttgaagccgataaatgacttgtcgtgggcgagcccttcgggtgctattaatactttcgggtcacagcggagactctggctgttgttcagaaaagaactacgaatcccagaatgccctgttcccccattttcccctcgagaatccaaggcattgtcctacataatggtagaggacgaactggcacttttcgataaaagcataaatgaattttggaataaattcaaaagtacggacacctcctgtcagatggcgggactaagagatacctacaaggattccatcaaagcatttgcagaaaagctgtctgtgaaattaaaggaagaagaacgaatggttgagatgtttctggaatatcaaaatcagatcagcaggcaaaataagctcattcaagaaaaaaaggataacttgttaaaattgattgctgaagtaaaaggcaaaaagcaggaattggaagtactgactgcaaatatccaggatcttaaggaagaatattctaggaagaaggaaa

SEQ ID NO: 3548 - DNA, 620 bp, Homo sapiens
  source 1..620: mol_type = genomic DNA
gttcttccgcaccttcctcagggaggtcccgctggccaaggtctggctgtccctcctgtcctctgcccccgcctcccttccaccggtccccgacgtgccgccagctcccagcccagcgtcccgcagggcggtgcgggcagatgccgccgaagcgtctagcgggaagggcgccggcgcggctggagctttgtaggcagccaatcccagagaagcagacgggatggctagttcagcccgggagcacctgctttttgtgaggcgtcgaaatccccagatgcggtacacattgagcccagagaacctccagagccttgccgcccagagctccatgccagagaacatgaccctgcagcgggccaacagcgacaccgacctggtgacttctgagagccgctccagcttaactgccagcatgtacgagtacacgctggggcaagcccagaacctcattatcttctgggacattaaagaggaggtggaccccagtgattggattggactttatcatatagatgagaattctccagccaacttctgggattctaagaacaggggtgtgactggaacacaaaaagggcaaattgtatggagaattgagcctgggccctatttcatggaac

SEQ ID NO: 3549 - DNA, 691 bp, Homo sapiens
  source 1..691: mol_type = genomic DNA
gctggaaatggccttaggggtcacctagggcctaatccatcgtttctcttgtgggggaactgagcctctgggaagggtcacattgcgttaatgcagtgtgtgtcgcctctgtccctcccccttacacgtctggcgtctcgtcagatacatgtcagctcctgggagaagctttccctggccgctttgcagaagggcgtccccttttagcctcttccacgtcaacctgctccatttctttcgtagcagttaccagtctctgaaactaagtctgtttctgtcttagcccgccaagtatttattgtatacgtatataggtgccaccgtacaggcagtacttctccaggcaagtagtattaaacaccagccgccctgggccaggcattgtactgtgggacccagtatgcattaagggaagaatccaggttcaaaatgagcctgtttggaacaacctcaggttttggaaccagtgggaccagcatgtttggcagtgcaactacagacaatcacaatcccatgaaggatattgaagtaacatcatctcctgatgatagcattggttgtctgtcttttagcccaccaaccttgccggggaactttcttattgcaggatcatgggctaatgatgttcgctgctgggaagttcaagacagtggacagaccattccaaaagcccagcagatgcacactgggc

SEQ ID NO: 3550 - DNA, 1797 bp, Homo sapiens
  source 1..1797: mol_type = genomic DNA
gctgaggacggggcggggcctcgcgctaacggtcgcgcggccgtcgcacctgcacgaggctgtggcccgagcgtcctgtggagaagccgcgaagcgcgggcgacccgggggtcgggcgggccaggtccgcgaggccgcggcggcagctgtgcaggcccggggagcagccggccgggcgagcctcggattaaaaaaatggcaaactcctttgcagcgaggattttcactaccctttcagatctgcagacaaatatggctaatctgaaagttatcggtatagttattgggaaaacagatgtcaaaggctttccagacagaaaaagtattggatcagaaaggtacactttcagcttcaccattcgggattcaccagcacattttgtaaatgcagcttcctggggcaatgaagattacatcaagtctctttctgacagctttagggttggtgactgtgtgataattgaaaatcctctgatccaaagaaaggaaatagaaagagaagaaaaattcagccctgcaactcctagcaactgtaaactgttgctcagtgagaatcactcaacagtaaaagtttgttccagttatgaagtggacacaaagttactttctttgatacatttacctgttaaagagtctcatgattattattcactgggtgacattgttgcaaatggacacagtcttaatgggaggattattaacgtgcttgcagctgtgaaatcggttggagagccaaaatactttacaacttcagaccggagaaaaggccagaggtgtgaagttagactctatgatgaaacagagtcgtcttttgcgatgacatgttgggataatgaatccattctacttgcacagagctggatgccacgagaaacagtaatatttgcctcagatgtaagaataaattttgacaaatttcggaactgcatgacagcaactgtaatctcaaaaaccattattacaactaatccagatataccagaagctaacattctgctgaattttatacgagaaaataaagaaacgaatgttctggatgatgaaattgacagttatttcaaagaatccataaatttaagtacaatagttgatgtctacacagttgaacaattaaagggaaaagctttgaagaatgaaggaaaagctgatccttcctatggcatcctttatgcctacatttccacactcaacattgatgatgaaactacaaaagtagttcgaaatagatgttccagctgtggttatattgtaaatgaagcatctaacatgtgcacaacttgcaacaaaaactccttggactttaaatctgtctttctcagtttccatgtgctgattgatctgactgatcacacaggcacccttcattcctgtagtctcacaggaagtgttgctgaggagactttgggctgcacgttcgttctatcacacagagcaaggagtggattgaaaattagtgtactctcgtgcaagcttgcagatcctactgaggcaagcagaaacttgtctggacaaaaacatgtttaaaacggtctatcattttgaactctggaaaagtataagagttttaactccctttaaaatggaatattaatttgaaaattatggggaaaattgcattttgtttacatgtggtgaacatgtttctagaaattgttatggtggaggtggtctgggtgagtctgaaggcctctctcatctgacctcccttcttagaaggcctcctactgtctttgccttgtctcctcccaagttggaaaatgtttacatgaattaataaacagatttaatcttctacag

SEQ ID NO: 3551 - DNA, 1059 bp, Homo sapiens
  source 1..1059: mol_type = genomic DNA
gacttccggtgctggaggagggggccggcggcgagggactccaggaggacgcgtccaacttcgagaccggcgggggccggctccgctcttccaacccctccatgtgtgaagagggcggacgacgcagcgggggaagaaaaataagctagtctaggacaagtgtccaggcgacgtggaacccagtaagggaataaagaagactggaaacgtctctcccctcccctatcccagtccctcaccctaatccgcgcgcaatagaaaaggcggaagcgcctgtccacgatcagggcggggcaaggggaagaaatctcgcgataggagagcggtccgggcgggggtggcacctctccctcctcctggcgttagttccggtcgcagaggagacaccgccgcagttgccgggtgtcttttatgaataatcaaaagcagcaaaagccaacgctatcaggccagcgttttaaaactagaaaaagagatgaaaaagagaggtttgaccctactcagtttcaagactgtattattcaaggcttaactgaaaccggtactgatttggaagcagtagctaagtttcttgatgcttctggagcaaaacttgattaccgtcgatatgcagaaacactctttgacattctggtggctggtggaatgctggccccaggtggtacactggcagatgacatgatgcgtacagatgtctgcgtgtttgcagcccaagaagatctagagaccatgcaagcatttgctcaggtttttaacaagttaatcaggcgctacaaatacctggagaaaggttttgaagatgaagtaaaaaagctgctgctgttcttgaagggtttttcagagtcggagaggaacaagctagctatgttgactggtgttcttctggctaatggaacacttaatgcatccattcttaatagcctttataatgaaaatttggttaaagaaggagtttcagcagcttttgctgtgaagctctttaaatcatggataaatgaaaaagatatcaatgcagtagctgcaagtcttcggaaagtcagcatggataacagactgatg

SEQ ID NO: 3552 - DNA, 2913 bp, Homo sapiens
  source 1..2913: mol_type = genomic DNA
cccgcccgcgtggtcgtcgccaccgcagccgcccgagaggagctgggggaggacggtggcccgcgaggctcgtcgcagacaacgcggcggcgatgtccgcgagccaggcgacacaaagttatcattgttgggctggataatgcagggaaaactaccattctttaccaattttctatgaatgaagttgtacatacatctcctacaataggaagtaatgtagaagagatagtgattaataatacacgtttcctaatgtgggatattggtggccaagaatctcttcgttcttcctggaacacttactatactaacacagagtttgtaatagttgttgtggacagtacagacagagagaggatttctgtaactagagaagaactctataaaatgttagcgcatgaggacctaagaaaagctggattgctgatttttgctaataaacaagatgttaaagaatgcatgactgtagcagaaatctcccagtttttgaagctaacttctattaaagatcaccagtggcatatccaggcatgctgtgctctaactggcgagggattgtgccaaggacttgaatggatgatgtcacgacttaagattagatgatctctactgacctcttctcatagattttgtataaatgaagtgctggactttacctgaaagctgcaaaaattaatggtttagatatatttataataaactgatttaaactttttctataagaagaaaaattaagaccacttatttgaaaacaaagatgaagtctcaccttccagtttgctttctcattagttttttccaaagtaagttattgaagctgtgattgacatttttctcataatgaatcctctcaggacattgtgtagcctatggtaagtacaaagggagaggaagacattttgaattttaagagctttattatcagtttaaccctccctagttgaatgttattttcttcttgttccattaagtcagaatacaaatcagcacagatattcgaatgtttccaatattttaaaatgtaatgttacttatgaaaagtattttgcttaaggttgtgtgtgtattgtgtatatacctcaagttcaagttaatggcattgatttatgttccagacaaaaataacacaaataataatatccttcgttataaccacaatgagataagtattggcattagtgttcagtgccattttatactttctctctgtgttctctgtattgtactaaccaacctcccaaatcgctgagctgcttgtttaaaaaaaaaaaaaaggaaaaggaaaaagcatgacattgtgtatcgattttttgttgttgaccaaaatcacacacatggaaacatgtaattcaacagagtgggaaagctagcagattcttggcttagtattactaataggcaggattgtacaatgagcaactatcagattattcctttcagtggttcttatggcatctaaattactgaataaattattaatccattaatcagtgaatcaaattatgattacaattatcaaatgaatgctcagcattaattgaaaactgttttgtgaaacatgtctacccagaaaagtagcattctataaatactattaaacaacttagctatattatttttaagtattaaattatatgtcaagcagttaaagtgaatttcagagtaaaagtaaggcatgtttctgagcaacattgataatttcttaatttgcaaatttcttcttattttggtacttggaatatagtgtgagattttttatttctaaattttgttgtatcttctattacataaatgcattgacaattataaaatgcaagtgttttttgaatgattttaagaatttggcttaaaaattgattgatacaacgtattatttgtactaagaagtaacttgacccaaaacaccttttatgtttgcttagggtatattttttcagtgtctgaaagtcaaaggtattcctgtcacaactgtaaacaaacttatcctaaatgtgttaaaacatattcttgggtactctatttatgtatctttcatgccttgaaaatctgaaggttaatccaaactcacatgttttagcatatttgagaaaaaaaaactaccttcaatatcagccttttaaatttcatgaagattttggtgaggaataatagtatatagtttaagtattgacaaaactttgaaagtttctttctttaaaatgggaaatactcaatatctaaatccaggtcaggcatgggatatcagtatttaacattggatgttttatgttttatatttataatgttcaaaatgcaagcataacatttaatatttgtccacatggttttacaaaagtaaatcttaaattactaagcttttcccatatgttctcgtactttctcaaatccctataaagaattacttgttatctattaaaaatctcctttacccaaatctgtattatggtttcgccagacaaatattatgtgatgtagcccagaaaatccacaccttttgtcctttttatgttttaatttgaataatcatgtgcttagtcccttggattactgccacatcagtttaacacgatatcagcacattcccttgtcatcatcaaggtgttggctcagatttattcttaattggatgtttaaagcatgtactaccttgttacagttggtttagtgtagtggattattgacatgacatcatgagaagatgtgtaattttataccacatttataaaacatgattttgttttctacccttcaaggtaaacattaaaaataaggtggtacttgtgtacttgtacataaaaccaaaattatagttgggaaaaaaataaatttatatatgaaaatgtcaaaatcattttaaaagtattattttcaaataaaatggagaagctggtgaaaagtcatattggcaatttt

SEQ ID NO: 3553 - DNA, 445 bp, Homo sapiens
  source 1..445: mol_type = genomic DNA
gccatccacatcctcgatgtccttgtgctgaatggcaccgacgttcgggagcagcactttaaccagcgaattcagcttgccgagaaatttgtgaaagccgtttccaagcctagtcggcccgacatgaatcccatcagggtgaaggaggtgtacagactggaagagatggagaagatttttgtcaggttggagatgaagatcatcaagggctccagtggcaccccaaagctcagctacacagggcgtgatgaccggcactttgtacccatgggcctctacatcgtcaggacagtgaatgagccctggactatgggattcagcaaaagcttcaagaagaagttcttctacaacaagaaaaccaaggactctacttttgacctcccttactaccctttcccttcctttttcttccctaataggaggtacaatctgcttttgtttgtcg

SEQ ID NO: 3554 - DNA, 545 bp, Homo sapiens
  source 1..545: mol_type = genomic DNA
acatccgggaccctcatccggggctctcacccacatccgggaccctcatgcctgggcggaggagggggggccctcattcgggaccctgcactccgtcgccggaagtgccaccgagaagcgccggcctcggggctgtctacagcggcccgggagaggctgtggtggccccgagcgcgagtgtgtaggtgacaggacagcggccaggcccgcccctcccctcgtgatggtcattgtcctccagagcagtgatggaggaaataccagcccaggaagcagcagggtcaccaagggtccagtttcagtctttggagacccagtctgagtgtctgtccccagagcctcagtttgtgcaggacaccgacatggaacagggactcactgggggcatacttctccgccttcccaccacccggattcatagtgtgaattcctgcccggccctgagtcatacccaggcaagtgctttctctggagaaacacttgccgtccttacagcaggaatctccaagagatggcccaagtatcggcttcccatcgatattgct

SEQ ID NO: 3555 - DNA, 5544 bp, Homo sapiens
  source 1..5544: mol_type = genomic DNA
atgcagctccgagcgagcgagcggcgcccagcccagcgcctcggccgaacccctccgcagcaggctgcctgctgtttcccggggagatcatgaaacgaggtcgccttcccagcagcagtgaggattctgacgacaatggcagcctgtcaactacttggtcccagaattcccgatcccagcataggagaagctcctgctccagacatgaagatcgaaagccttcagaggtgtttaggacagacctgatcactgccatgaagttgcatgactcctaccagctgaatccggatgagtactatgtgttggcagatccctggagacaggaatgggagaaaggggtccaggtgcctgtgagcccggggaccatccctcagcctgtggccaggcccaagaagtacatcgtgtcatcaggctctgagcctcccgagttgggctatgtggacatccggacgctggctgacagcgtgtgtcgctatgacctcaatgacatggatgctgcatggctggaactgaccaatgaagaatttaaggagatgggaatgcctgaactagatgaatacaccatggagagggtcctagaggaatttgagcagcgatgctacgacaatatgaatcatgccatagagactgaggaaggcctggggatcgaatatgatgaagatgttgtctgtgatgtctgccagtctcctgatggtgaggacggcaatgagatggtgttctgtgacaaatgcaacatctgtgtgcaccaggcctgttatggaatcctcaaggtaccagagggcagctggctgtgccggacatgtgccctgggggttcagccaaaatgtctgctgtgtccgaagaagggtggagctatgaagcccacccgtagcggaaccaagtgggtccacgttagctgtgctctgtggatccctgaggtgagcattggcagcccagagaagatggagcccatcaccaaggtgtcacacattcccagcagccggtgggcgctagtgtgcagcctctgcaatgagaagtttggggcctctatacagtgctctgtgaagaactgccgcacagccttccatgtgacctgtgcttttgaccggggcctggagatgaagaccatcttagcagagaatgatgaagtcaagttcaagtcctattgcccaaagcacagctcacataggaaacccgaggagagtcttggcaagggggctgcacaggagaatggggcccctgagtgttccccccggaatccgctggagccctttgccagccttgagcagaaccgggaggaggcccaccgggtgagtgtccgtaagcagaagctgcagcagttggaggatgagttctacaccttcgtcaacctgctggatgttgccagggctctgcggctgcctgaggaagtagtggatttcctgtaccagtactggaagttgaagaggaaggtcaacttcaacaagcccctgatcaccccaaagaaagatgaagaggacaatctagccaagcgggagcaggatgtcttatttaggaggctgcagctgttcacgcacctgcggcaggacctggagagggttcggaacctcacttacatggtgacccgcagggaaaagattaaacggtctgtgtgcaaagtccaggaacagatattcaatctttacactaagcttttggagcaagaaagagtttcaggtgtgccttcttcctgctcctcctcctcactggaaaacatgcttttgtttaacagtccttctgttggccctgatgctcccaagatagaggacttgaagtggcattctgcattcttcagaaaacaaatgggtacttccttggttcattcgctgaaaaagccccataagcgagatcctttgcagaatagccctggaagtgaaggcaaaaccctgctgaagcagccagacctgtgtggtagaagggaggggatggtggtcccagagagctttttgggtttagaaaagacctttgcagaagcacgtctcatatcagcacaacagaaaaatggtgtggtgatgccagaccatgggaaaagaagagacaatcgttttcattgtgatctcattaaaggagacttaaaggacaaatcttttaaacagagtcacaagcctctcaggtccacagatgtgtcccagaggcatctggacaacacaagagctgccacctcccctggagtggggcagtcagcacctggcacaaggaaggagatagtgcccaagtgcaatggctccctaatcaaagtaaactataatcagactgcagtcaaagtgcctacaacacctgccagcccagtgaaaaactggggaggattccggattccaaagaagggggaacggcagcagcagggagaggcccacgatggggcctgccaccagcactcagactacccatatttgggcttaggccgagttccagccaaggaaagggcaaaaagcaaattaaaatccgacaatgagaatgacgggtatgtccccgatgtggaaatgagtgactcagagagtgaggcatcagaaaagaaatgtatacacaccagcagcactatcagcagaaggacagacattatcaggagaagcatcttggcttcttgatgcaacagagatgatgcggaagccctttgggctcgtcattgggtttgctagaggagagctctgatgtgggggagaagcagaaacccattaatcctgagctacacaaacacatttacttgcaattcagattaatttttttccagagtcatttttaaatcatttttgtgagaagtttgtgttatttgcaacttgttgaggaaacagaagagtagattgtaaccataagacactgctaagactagaacccgaactgaacactaaaataaaaatgaaatgttttaaagaaggcaaggcttaaataagcctcatgaatttttatagccctctgcattcttcccaaagcacaaactcatggttacctgaatatagggaaccagatatggttcttgagaaaccctcatggtaccattcacagcccataaagtttattttctaggactgtggtagatcttgaaatcatatttatatttggccctcaaggctatttttgttgcattatagcatataggcagcagctctgaagcttcagtaacactaagaaatttatgtgtaaatatagcagtcagggaagagaattttaaaaaaggtcattattgaagaagctgaggggacagggtagagctgctgcaatatggagatttagggtaatatggcaaggtcctgctgcttgaagcctgtgagtgggttgtggatatgggactggtggagagtgagactgttaggaaagttgtatctatgaataagggcagttgaagtagaatttttaccagtccacttgaccttcttcttccctaaccactggctcttgagccagcttgggatttccctggccattgccaatacctggccatctggcttccaatagtacagtggctactcaagttcaagcgaagaacttccagactctggtgactgttacttcccagagccaaccactagtgcatatgttagggaatctgggcttccaacatgaatggattccttaagaaaaaggaaaaaaaaaaaaaaaagaaaaaaagaaaaaaaaaagaaaaaagaaaaaaagagaaaaaagcgaaataggttatattttaaaaacaatagaaaggcaataagttgcgataagctcttactattgaccaaggttatacaggaaagagactgaagtgtacccttgaataggttttctgtagtcagagttctaaactctaatttgtaacttggactttctaattgcaaatggcaataactattaagttatcagcaataataaatttagcattaaatttgagtacaatgttttgtttttgcactccccatagtgcgtatgtattaagacagtggatagtgtttaggtcctgttaattttctttggaattcaatgtggttgtgaatcaaacttaaggaaggaacgtttaaatagcaatgagatacagaattatgggcctttggaacaagcccgacttcccctaaattctccttagtttgttaataccagtattcagattcctgattcatttatacatctgtttccatatggcagggacattatgatacttaatgaataatgctttgaggagttctgcagttaactttcaagtcttccagatgattgtcaacaacaaaaaaggcttattgaatcccatcttgctatgcaagttttatcagatgatcaaatagtagatctgatacatccccattgtatgtacgacattttcaaaccaagtcttaacttttcaaggacattttagtagctaattcaggggagggggaagaatgatgcaggtttttagattgactgactatttttgagttatggggctcattttgaaagactgctgtccagatcagcttgttgctgcagataatagaaggttcttatgaatccaagttgtatattcacttgtaggataatttaaaaattagattttttttgcatatgagcaaaaaccttttgctggatacaggagaaggttggactttatctacagttatcttttgattacagcaacagctctgggtgagagtagaatttatagagggataatttgtcaagccatagaaagaaaatctaaattaatctagtaagtgtatgacctctcaccattttaagaggtatcagattcatttgcactattaggaatgctagttttgtgcaaaaataatgccttacctgttttttccccacatttaggttgaaaagctttcaaatgttccaagttatgctgaaccaaaaaaaacaaaacaaaaacaaaacaaaaaatattaaaaaaaacccacacaaaaacaaaacacacaaaaataaaaagcccacactttttattcctgcttcgaaatgcaaatggatagagcacggtttctctgacagtataatgatagctttgtgagttagtttcatgtcatgctgggaactctctatgaggtggccataagcagcaaccagcccaaacacccacttgcgttctattagtatggaaccatttgcatttgttttttttaagctttatctttccttgtgcatcctgaccaagaaatatctttgattatgattaatgtattatgtcaaaatgtaggctagttaaacttttgtaaagttgcctggaatgtcatttgttaggttataaacacaagatctaaatgaagggttttatgtgttgtgtacaaatcttattttgaaatggacaaacttgtcattacatttgtaaccttgtacagaggatttttcactatgtgcctagcttggtgtccattcagctaaaattgaaaaaaaaaaaaaggtgcatgaagagttaaaaatcaaattaaagtatatgtagagatgactattttatattacatgacccaatcctgtatttatttctaccccctttttgaaagtatttataaaactagttgaggacagctgtatttttttgttgaactatttagtagaattgtgcctttttgtctgtatgtgaataaatgctgtacattttgcaataca

SEQ ID NO: 3556 - DNA, 603 bp, Homo sapiens
  source 1..603: mol_type = genomic DNA
gaaaccagacgtgcagtggggctgacccctgtgccccaccccagagtcatgccagcgtgggtggtggggcattctctgggatgaatgatctggatcccatagccatctgtgtcctgtttgaggaatgggaccctcaaacagagaacagccaagatgctcaagcagtctgcagatctccaggggagcccaccagcctagtcaacatggcctcggaagacattgccaagctggcagagacacttgccaagactcaggtggccgggggacagctgagtttcaaaggcaagagcctcaaactcaacactgcagaagatgctaaagatgtgattaaagagattgaagactttgacagcttggaggctctgcgtctggaaggcaacacagtgggcgtggaagcagccagggtcatcgccaaggccttagagaagaagtcggagttgaagcgctgccactggagtgacatgttcacgggaaggctgcggaccgagatcccaccagccctgatctcactaggggaaggactcatcacagctggggctcagctggtggagctggacttaagcgacaacgcattcgggcccgacggtgtgcaaggcttcgagg

SEQ ID NO: 3557 - DNA, 442 bp, Homo sapiens
  source 1..442: mol_type = genomic DNA
gtaggctgcgggcagcgaggagcggctggcgctcgaggcggcggacggcaccatgtccccggggagcggggtgaagagcgagtacatgaagcgctaccaggagccgcgctgggaggagtacgggccgtgctaccgcgagctgctgcactaccgcctaggccgccggctgctggagcaggcgcacgcgccctggctctgggacgactggggcccggccggctcctcggaggactcggcgtcgtcagagtcgtcgggcgccgggggccccgcaccccggtgcgccccgccctcgcccccgccgcccgtagagccggcgacccaggaggaggcggaacggcgggcgcgcggggccccggaggagcaggacgcggaggccggggacgcggaggccgaggacgcggaggacgcggctctgccagggaatgcctggctgcgcacctag

SEQ ID NO: 3558 - DNA, 740 bp, Homo sapiens; identical to SEQ ID NO: 1924
  source 1..740: mol_type = genomic DNA

SEQ ID NO: 3559 - DNA, 816 bp, Homo sapiens
  source 1..816: mol_type = genomic DNA
gcaaattatcgcatccctgagcttaggatccccctttagtttcacatatgcccccacccccgtttccactttgatggcggcttccaaggagcatcccttagtaagaaccgtcgcaaatatcgtgatttggatccaccaaggcttggggcgagccgtcgaatgtgtgtggtaggggagcgggctgatgttagcacgtggtcttgttaggccttgaatgggggaataggaggcctgtgttcacgattagtttccaccacctaccaacttggaacctttacatctctccaagcctgagtttccttatctgtgagacagctgcgaataccggtttccagagagtagttaagaacccttgtgaacaccttcttcagcttccttcgacgcaaaacagactttttcattggaggagaagaagggatggcagagaagcttatcacacagactttcagccaccacaatcagctggcacagaagacccggcgggagaagagagcccggcaggaggccgagcggcgggagaaggcggagcgggcggccagactggccaaggaagccaagtcagagacctcagggccccagatcaaggagctaactgatgaagaggcagagaggctgcagctagagattgaccagaaaaaggatgcagagaatcatgaggcccagctcaagaacggcagccttgactccccagggaagcaggatactgaggaagatgaggaggaagatgagaaggacaaaggaaaactgaagcccaacctaggcaacggggcagacctgcccaattaccgctggacccagaccctgtcggagctggac

SEQ ID NO: 3560 - DNA, 2707 bp, Homo sapiens
  source 1..2707: mol_type = genomic DNA
acagccaggcagccccgcgtggggagtgcaggtggtttcggttgcggcagtcgcgtcccgggagcgtcgctgcctggtgaacgctgggtcgctcatctctgaaacccaggcgaaggagggctcgacgtcgcgggagtcctttcaacctgaccgcggcttacggtcttcggagctaatgttcattggtcccacaaaggggtcccacgtcgcgtccaggacatagaggccgtgaggcagggagccagaggtcgtctggactcttccgtactagtcagttttcgaactagagggggctttgggatcaccagtcggagcccttcgtgttacagctagaatgggtactaggaaaaaagttcatgcatttgtccgtgtcaaacccaccgatgactttgctcatgaaatgatcagatacggagatgacaaaagaagcattgatattcacttaaaaaaagacattcggagaggagttgtcaataaccaacagacagactggtcgtttaagttggatggagttcttcacgatgcctcccaggacttggtttatgagacagttgcaaaggatgtggtttctcaggccctcgatggctataatggcaccatcatgtgttatgggcagacgggagctggcaagacatacaccatgatgggggcaactgagaattacaagcaccgggggatcctccctcgtgccctgcagcaggtttttaggatgatcgaagaacgccccacacatgccatcactgtgcgtgtttcctacttggaaatctataatgagagcctgtttgatctcctgtccactctgccctatgttggaccctcagtcacaccaatgaccatcgtggaaaaccctcaaggagtcttcattaagggcttgtcagttcacctcacaagtcaggaggaggatgcattcagcctcctttttgagggtgagaccaacaggattatagcctcccacactatgaacaaaaactcttccagatcacactgcattttcaccatctacttagaggcccattcccggaccttatcagaggaaaagtacatcacttccaaaattaacttggtggatctggcaggctcagagaggctggggaagtctgggtctgagggccaagtcctgaaggaagccacctacatcaacaaatcgctctcattcctggagcaggccatcattgcccttggggaccagaagcgggaccacatcccctttcggcagtgcaagctcacccacgctctgaaggactcgttagggggaaactgcaatatggtcctcgtgacaaacatctatggagaagctgcccagttagaagaaacgctatcttcactgagatttgccagcaggatgaagctagtcaccactgagcctgccatcaatgaaaagtatgatgctgagagaatggtcaagaacctggagaaggaactagcactactcaagcaggagctggctatccatgacagcctgaccaaccgcacctttgtgacctatgaccccatggatgaaatccagattgctgagatcaactcccaggtgcggaggtacctggaggggacactggacgagatcgacataatcagccttagacagatcaaggaggtgttcaaccagttccgggtggttctgagccaacaggaacaggaagtggagtccactttgcgcaggaagtacaccctcattgacaggaatgactttgcagccatttctgctatccagaaggcggggcttgtggatgttgatggccacctagtgggtgagcctgaaggacaaaactttggactcggagtcgcccctttctctaccaaacctgggaagaaagccaagtccaagaagacattcaaagagccactcagctccttggcaagaaaggaaggtgccagcagccctgtgaatgggaaggacttggattacgtttccacctccaagacccagctggtcccatcctccaaagatggggatgtcaaagacatgctttcgcgggaccgggaaacttccagcattgagccccttccctcagactccccgaaggaggaattacgcccaattaggcccgacaccccaccctccaaaccagtggcctttgaggagtttaagaatgagcaaggtagtgagatcaaccgaattttcaaagaaaacaaatccatcttgaatgaacggaggaaaagggccagcgagaccacacagcacatcaatgccatcaagcgggagattgatgtgaccaaggaggccctgaatttccagaagtcactacgggagaagcaaggcaagtacgaaaacaaggggctgatgatcatcgatgaggaagaattcctgctgatcctcaagctcaaagacctcaagaagcagtaccgcagcgagtaccaggacctgcgtgacctcagggctgagatccagtattgccagcacctagtggatcagtgtcgccaccgcctgctcatggaatttgacatctggtacaatgagtcctttgtcatccctgaggacatgcagatggcactgaagccaggcggcagcatccggccaggcatggtccctgtgaacaggattgtgtctctgggagaagatgaccaggacaaattcagccagctgcagcagagggtgcttcctgagggccctgattccatctccttctacaatgccaaagtcaagatagagcagaagcataattacttgaaaaccatgatgggcctccagcaggcacatagaaaatag

SEQ ID NO: 3561 - DNA, 1473 bp, Homo sapiens
  source 1..1473: mol_type = genomic DNA
accaccgctgcggccgccgcctccgccgctgctttcgctggagggcgggcggatgtacggggcgcctggggccccggcgcaaagcgcctcagtgactgtggtccgctcgttgcggcggccgccaccgcaggcgacaggggtgtcttttatgaataatcaaaagcagcaaaagccaacgctatcaggccagcgttttaaaactagaaaaagagatgaaaaagagaggtttgaccctactcagtttcaagactgtattattcaaggcttaactgaaaccggtactgatttggaagcagtagctaagtttcttgatgcttctggagcaaaacttgattaccgtcgatatgcagaaacactctttgacattctggtggctggtggaatgctggccccaggtggtacactggcagatgacatgatgcgtacagatgtctgcgtgtttgcagcccaagaagatctagagaccatgcaagcatttgctcaggtttttaacaagttaatcaggcgctacaaatacctggagaaaggttttgaagatgaagtaaaaaagctgctgctgttcttgaagggtttttcagagtcggagaggaacaagctagctatgttgactggtgttcttctggctaatggaacacttaatgcatccattcttaatagcctttataatgaaaatttggttaaagaaggagtttcagcagcttttgctgtgaagctctttaaatcatggataaatgaaaaagatatcaatgcagtagctgcaagtcttcggaaagtcagcatggataacagactgatggaactctttcctgccaataagcaaagtgttgaacacttcacaaaatattttactgaggcaggcttgaaagagctttcagaatatgttcggaatcagcaaaccatcggagctcgtaaggagctccagaaagaacttcaagaacagatgtcccgtggtgatccatttaaggatataattttatatgtcaaggaggagatgaaaaaaaacaacatcccagagccagttgtcatcggaatagtctggtcaagtgtaatgagcactgtggaatggaacaaaaaagaggagcttgtagcagagcaagccatcaagcacttgaagcaatacagccctctacttgctgcctttactactcaaggtcagtctgagctgactctgttactgaagattcaggagtattgctatgacaacattcatttcatgaaagccttccagaaaatagtggtgcttttttataaagctgaagtcctgagcgaggagcccattttgaagtggtataaagatgcacatgttgcaaaggggaagagtgttttccttgagcaaatgaaaaagtttgtagaatggctcaaaaatgctgaagaagaatctgaatctgaagctgaagaaggtgactgaattttgaaactacaccctcagtaaagcaaacaggagttgtagataaaatgtcatgtctcatgtgt

SEQ ID NO: 3562 - DNA, 1421 bp, Homo sapiens
  source 1..1421: mol_type = genomic DNA
aatcggctaggagcagcgagcggcgcggctgaggcgcggcggccccgtggagcagcgcagtatggcgggcggggcccgggaggtgctcacactgcagttgggacattttgccggtttcgtgggcgcgcactggtggaaccagcaggatgctgcgctgggccgagcgaccgattccaaggagcccccgggagagctgtgccccgacgtcctgtatcgtacgggccggacgctgcacggccaggagacctacacgccgcgactcatcctcatggatctgaagggtagtttgagctccctaaaagaggaaggtggactctacagggacaaacagttggatgctgcaatagcatggcaggggaagctcaccacacacaaagaggaactctatcccaagaacccttatctccaagactttctgagtgcagagggagtgctgagtagtgatggtgtctggagggtcaaatccattcccaatggcaaaggttcctcaccactccccaccgctacaactccaaaaccacttatccctacagaggccagcatcagggtctggtcagacttcctcagagtccatctccatccccggagcatctgtatgattcagaagtacaaccacgatggggaagcaggtcggctggaggcttttggccaaggggaaagtgtcctaaaggaacccaagtaccaggaagagctggaggacaggctgcatttctacgtggaggaatgtgactacttgcaggtagtggcgtggcaatgtgcactccagggtggaagctcttctcatcctgctaactatctttcgtcactcacccccgcccagggcttccagatcctgtgtgacctgcacgatggcttctctggggtaggcgcgaaggcggcagagctgctacaagatgaatattcagggcggggaataataacttggggcctgctacctggtccctaccatcgtggggtgagtggaacttggaggagtaaacattcgaatcccattgggagagtggcttaatgcaaactggtttttttctttacgaggaggcccagagaaacatctatcgtctattaaacacagcttttggtctcgtgcacctgactgctcacagctctcgtctgccccttgtccttgggtgggagcctgggcctgcgacctgagccacctgtcaacttcccttacctgcattatgatgtaagtctcggtgctcttgttctgactgcggcaggctacagggcctcctcatgctcccagtcagtcgctgtctgtactggctctgttcctgaggcccgagcttgaactcagctgtgatgtggcctctcagatcacactgtcctatgcttgtccagcctggggtcaaacatacccctgattcatcccctgggtctctctggtgttaacattctgcctccacacattcttttccagg

SEQ ID NO: 3563 - DNA, 282 bp, Homo sapiens
  source 1..282: mol_type = genomic DNA
tgcaccagctcctgcacgccctcgtgctgccagcagtctagctgccagccggcttgctgcacctcctccccctgccagcaggcctgctgcgtgcccgtctgctgcaagactgtctgctgcaagccttctagctgccagccagcttgctgcatctcctccccgtgtcaacagtcctgctgtgtgcccgtctgctgcaagcccatctgctgtgtgcctccagcttgctgcaccacctcctgctgcagaccctcctcctccgtgtccctcctctgccgccctgtg

SEQ ID NO: 3564 - DNA, 1513 bp, Homo sapiens
  source 1..1513: mol_type = genomic DNA
agctacagcagcggcgcggagactgcggggcgggccatggcggcgaacctgagccggaacgggccagcgctgcaagaggcctacgtgcgggtggtcaccgagaagtccccgaccgactgggctctctttacctatgaaggcaacagcaatgacatccgcgtggctggcacaggggagggtggcctggaggagatggtggaggagctcaacagcgggaaggtgatgtacgccttctgcagagtgaaggaccccaactctggactgcccaaatttgtcctcatcaactggggggcccatgtgaccatcaacgcacgggccgaggaggatgtggagcctgagtgcatcatggagaaggtggccaaggcttcaggtgccaactacagctttcacaaggagagtggccgcttccaggacgtgggaccccaggccccagtgggctctgtgtaccagaagaccaatgccgtgtctgagattaaaagggttggtaaagacagcttctgggccaaagcagagaaggaggaggagaaccgtcggctggaggaaaagcggcgggccgaggaggcacagcggcagctggagcaggagcgccgggagcgtgagctgcgtgaggctgcacgccgggagcagcgctatcaggagcagggtggcgaggccagcccccagagcaggacgtgggagcagcagcaagaagtggtttcaaggaaccgaaatgagcaggagtctgccgtgcacccgagggagattttcaagcagaaggagagggccatgtccaccacctccatctccagtcctcagcctggcaagctgaggagccccttcctgcagaagcagctcacccaaccagagacccactttggcagagagccagctgctgccatctcaaggcccagggcagatctccctgctgaggagccggcgcccagcactcctccatgtctggtgcaggcagaagaggaggctgtgtatgaggaacctccagagcaggagaccttctacgagcagcccccactggtgcagcagcaaggtgctggctctgagcacattgaccaccacattcagggccaggggctcagtgggcaagggctctgtgcccgtgccctgtacgactaccaggcagccgacgacacagagatctcctttgaccccgagaacctcatcacgggcatcgaggtgatcgacgaaggctggtggcgtggctatgggccggatggccattttggcatgttccctgccaactacgtggagctcattgagtgaggctgagggcacatcttgcccttcccctctcagacatggcttccttattgctggaagaggaggcctgggagttgacattcagcactcttccaggaataggacccccagtgaggatgaggcctcagggctccctccggcttggcagactcagcctgtcaccccaaatgcagcaatggcctggtgattcccacacatccttcctgcatcccccgaccctcccagacagcttggctcttgcccctgacaggatactgag

SEQ ID NO: 3565 - DNA, 1103 bp, Homo sapiens; identical to SEQ ID NO: 3427
  source 1..1103: mol_type = genomic DNA

SEQ ID NO: 3566 - DNA, 887 bp, Homo sapiens
  source 1..887: mol_type = genomic DNA
ccagggcaaccagaccgagaggagcatgtgtaacctgaaacaggtgagcctatggagacagtacctaatgcgactgtgcacggaatatgtgtatgcagcatgagctccagggaataaaactgcaaggtgtggaatatttctggcttctagtccaatgccaagtgtgtgacctgtggctacatgattccctgaaagataagaacaatgttatgttggggatattggtctctgggccaacctggtatcagcaccaacctgcagggaattgtggctgagccccaggtgtgtgggttcatatctgacagaagtgtcaaggaagtggcctgtgggggaaaccactctgtgttcctgctggaagatggggaagtttacacatgtggtttgaacaccaaggggcaactgggccatgagagggaaggaaacaagccagaacaaattggagctctggcagatcagcatatcattcatgtggcatgtggcgagtcccacagtctggccctcagtgaccgaggccagctgttttcttggggtgcagggagtgatggtcagctaggactcatgactactgaggattctgtggcagtgcccaggttaatacaaaagctgaaccagcaaacaatattacaagtttcctgtggcaactggcattgcttggctcttgcggctgatggccagttcttcacctggggaaagaacagccatgggcagcttggcttagggaaggagttcccctcccaagccagcccacagagggtgaggtccctggaggggatcccactggctcaggtggctgccggaggggctcacagctttgccctgtctctctcaggagctgtttttggctgggggatgaataatgccgggcagctagggctcagtgatgaaaa

SEQ ID NO: 3567 - DNA, 782 bp, Homo sapiens
  source 1..782: mol_type = genomic DNA
tactttcccaagcaccaccaggccaaaggtctctcagttcagagcagaaagccgtatacccagaggagcaggcagataacagaaacttccagaaacctctgtggagacagtggaagaggcaaaagggagttcctgacagctggattctagaagtagaactatgagctcacctttggcctcccttagcaagacccgaaaagtgcccctgccctcggagcctatgaatcctgggaggcgaggaatccgcatctatggagatgtccctgcatcccatgactcggagctgatggccttcatgacgaggaagttgtgggacctggagcagcaggtgaaggcccagactgatgagatactgtccaaggatcagaagatagcggccctagaggacctggtgcagaccctccggccacacccagccgaggcaaccctgcagcggcaggaggaactggagacgatgtgtgtgcagctgcagcggcaggtcagggagatggagcggttcctcagtgactatggcctgcagtgggtgggcgagcccatggaccaggaggactcagagagcaagacagtctcagagcatggcgagagggactggatgacagccaagaagttctggaagccaggggactcattggcgccccctgaggtggactttgacaggctgctggccagcctgcaggatcttagtgagctggtggtagagggtgacacccaagtgacaccagtgcccggcggggcacggctgcgtaccctcgagcccatcccgctgaagctctaccggaatg

SEQ ID NO: 3568 - DNA, 938 bp, Homo sapiens
  source 1..938: mol_type = genomic DNA
gcggcggcggcagcggcagcggcagcggcgctgagttttgtctcccgggccgtctgggcgcgcgcgggtgtcccaggtaccccgccgcctccctccttcccgcaggactcgtccctcctggccctgggccccaacggtgcccgcctgcccggcggtcggtcagcgcacagggcacggcttcctctgcttctcccggaccacttagtctcaacccggaatgaaatatgactgaggactctcagagaaactttcgttcagtatattatgagaaagtggggtttcgtggagttgaagaaaagaaatcattagaaattctcctaaaagatgaccgtctgggaatcttgcctccacaccacgagtcccatgccaaggtgatgatgtatcgtaaggagcagtacttggatgtccttcatgccctgaaagtcgttcgctttgttagtgatgccacacctcaggctgaagtctatctccgcatgtatcagctggagtctgggaagttacctcgaagtccctcttttccactggagccagatgatgaagtgtttcttgccatagctaaagccatggaggaaatggtggaagatagtgtcgactgttactggatcacccgacgctttgtgaaccaattaaataccaagtaccgggattccttgccccagttgccaaaagcgtttgaacaatacttgaatctggaagatggcagactgctgactcatctgaggatgtgttccgcggcgcccaaacttccttatgatctctggttcaagaggtgctttgcgggatgtttgcctgaatccagtttacagagggtttgggataaagttgtgagtggatcctgtaagatcctagtttttgtagctgtcgaaattttattaacctttaaaataaaagttatggcactgaacagtgcagagaagataacaaagtttctggaaaat

SEQ ID NO: 3569 - DNA, 618 bp, Homo sapiens
  source 1..618: mol_type = genomic DNA
gtacgggagctggaggctgagcttgatgcagagcagaagaagcacgccgaggcccttaagggcgtgcgcaagcatgagcgccgtgtcaaggagctcgcataccaggccgaggaggacaggaagaacctggctcgcatgcaggacctggtggacaagctgcagagcaaggtcaagagctacaagcgccagtttgaggaggcggagcagcaggccaacaccaacctggccaagtatcgcaaggcccagcacgagctggatgatgcggaggagcgggcagacatggcggaaacccaggccaacaagctgcgggcacggacccgggacgccctgggccccaagctatccctttctcctcagcacaaggagtgacggcctgaccccctgggctctaaagaggaatgtctgctgttgcacatctggctgaggccacctgccccgatcctgccatctctgcatcgccccctgctgccttcagccttccctgggccctgaataaacaccacagccagtttccttctcattcttttctttggggttcaggaggaaaaacacagtcctagggacaaaagccaggtccacagcagtcatttttaaaataaagttatttaatagtctcca

SEQ ID NO: 3570 - DNA, 591 bp, Homo sapiens
  source 1..591: mol_type = genomic DNA
tgagtccctagtaggcctccaggagggcaaaagcaccgagcagggtaaccacgaccagcttaaagaactgtattcggctgggaacttgacggtgctggctactgaccccctgctccaccaggacccagtacagttagactttcacttccgccttacctcccagacctctgcccattggcacggccttctctgtgaccgtcgactcttcttggatatcccatatcaggccttggatcaaggcaaccgggaaagtttgactgcaaccctggagtacgtggaagagaagacaaatgtggactctgtgtttgtgaacttccagaatgatcggaacgacagaggtgccctgctgcgggccttcagctacatgggctttgaggtggtcagaccagatcaccctgccctccctcccttggacaatgtcatctttatggtgtatccccttgaaagggatgttggccacctgcccagtgagcctccttgaacatgcttattccaacgctttgaggggctggaagccttgacacatggaatcaggggcccgggatgtgattcaggacactttccatcctaggaataaagggtagtgcaatc

SEQ ID NO: 3571 - DNA, 505 bp, Homo sapiens
  source 1..505: mol_type = genomic DNA
agaattcagctgagagacagaggtcagacatgccagcagggttggaaagaggcaggtacggaagctgagctgcagagttagccggcatctgacagaaaaatgtgagtgtgctgtggaaggcttgcatttcctttaaggtagacctctttgaaagtagaattttcacggaattgttttctttctcactgagtgactgatttaacagaactctcaccttctatgcaagcgcacctagttttagagctccgtgacggcaatgttcaattagttcattattaactgagcaatgcagaatgctttatccagggtgcttggagaagatgtcagagtttgtctacagattttgagcgttcgaagttgacccctgactaagtatactttgctgctccctcagcctttgaaaaaatgtctgtcacatatgatgattccgttggagtagaagtgtccagcgacagcttctgggaggtcgggaactacaagcggactgtgaagcggatcgacgatg

SEQ ID NO: 3572 - DNA, 796 bp, Homo sapiens
  source 1..796: mol_type = genomic DNA
ggcggtgggggagtggctggggctgggggcggtatcggaccgggtgggcgcggtagagtgggcttggtgggttcccagggctggggttcgttccgggtgggctccgctttgggaagaggcccagcggaggggccttagtgtcagcgtagggagagtgaggcggcgaaggcgggggcgggcaaaggctagtggagtcgggatgcgagggcggtattcgtgacccggagctgtgcgaggagagtaccgaggagggggtcggcgggagaggagataggactcaagagtagccttcctcgaggacctgcctttcccatttgctgcctgaagttaatgtttcttgctggccaaatcagggacatgccggcattagcgggatgagtgggtgttccggcagggatgtggtcattgacggccagtgagggcgagagtaccacggcccacttcttccttggagctggagatgaggggctgggcacccgtggaataggcatgaggccagaagagagtgacagcgagctccttgaggatgaggaggatgaagtgcctcctgaacctcagatcattgttggcatctgtgccatgaccaagaaatccaagtccaagccaatgactcaaatcctagagcgactctgcagatttgactacctgactgttgtcattctgggagaagatgtaatccttaatgaacctgtggaaaactggccatcctgccactgcctcatctctttccactccaaaggctttcctctggacaaagctgttgcttactccaagcttcgaaacccctttcttatca

SEQ ID NO: 3573 - DNA, 1519 bp, Homo sapiens
  source 1..1519: mol_type = genomic DNA
gatacagcagcagctggtgctcctggccaggctgtgcgtgctctctctgcctctctctctcggactctctgctctctctctctgactctctcctctctctctgttggcctggtgaaatgttcttggctgtaggcacacagagccttggactcaaggctgttggagtcgaggacaccttgacttcggtcctggaggttgaaattctgcctctgagaagctaacagtcttcctgtggtcgccactcctccccagcagccccctccttgccaaggacggtccagaaggagccccactggggcctccccgctcagcaaagcagacctcacctcccactaccagcttgaagtcacagcagccagaggaaattctgccaccattttcccaggtctgcagcccctccagctgggaacctgctcctggagccatccctctgcaaacagagagcccagagtgcctcggggaaaattggctgaataaaagagcgatcaggacgccacggctccgcctgaagcgatggcccagccctacccccccgcccagtacccccctccgccacagaacggcatccctgccgagtacgccccgcccccaccgcaccccacgcaggactactccggccagaccccggtccccacagagcatggcatgaccctgtacacaccagcacagacccaccccgagcagccaggctccgaggccagcacacagcccatcgccgggacccagacagtgccgcagacagacgaggcggcacagacggacagccagccgctccacccctccgaccctacagagaagcagcagcccaagcggctacacgtctccaacatccccttccggttcagggaccccgacttgcggcaaatgttcgggcaattcggaaaaattttagacgtggagatcatttttaacgagcggggctccaagggttttgggtttgtaacttttgaaactagctcagatgctgaccgagcccgggagaagctgaatgggacgatcgtagagggacggaaaattgaggtcaataatgccacggcccgagtgatgaccaacaagaagacggggaacccctacaccaacggctggaagctaaatccagtggtcggcgcagtctacgggcctgaattctatgcagtgacggggttcccctaccccaccaccggcacagccgttgcctaccggggcgcacatcttcggggccggggccgggccgtgtataatacatttcgggctgcgccacccccaccccccatcccgacttacggagcggtcgtgtatcaggatggattttatggtgctgagatttatggaggctacgcagcctacagatacgctcagcccgctgcagcggcggcagcctacagcgacagttacggcagagtctacgcagctgccgacccgtaccatcacaccatcgggcccgcggcgacctacagcattggaaccatgtgaaaccttccaccgtttccttctcggaccatgaagggcaaaaacaaaaaaacaaaaaaaatcacaaaac

SEQ ID NO: 3574 - DNA, 2821 bp, Homo sapiens
  source 1..2821: mol_type = genomic DNA
tcagcatcttgaacagtaatgaacaccttctgaaggaaaaagagcttctcattgacaagcagaggaaacacatctctcagctggagcagaaagtgcgagagagcgaactgcaagtccacagtgccctcttgggccgccctgccccctttggtgatgtctgcttgctgaggctacaggaattgcagcgagaaaacactttcttacgtgcacagtttgcacagaagacagaagccttgagcagagaaaagattgaccttgaaaagaaactctctgcttctgaagttgaagtccagctcatcagagagtcgctcaaagtggcgttgcagaagcattctgaggaagtgaagaaacaggaagaaagggtcaaaggtcgtgataaacatatcaataatttgaaaaagaaatgccagaaggaatcagagcagaaccgggagaagcagcagcgtattgagaccttggagcgctacctggctgacctgcccacactggaagaccatcagaagcagagccagcagcttaaggattctgagttgaagagcacagagctgcaggagaaagtgactgagctggagagtttgctggaggagacccaggcaatctgcagagagaaggagattcaactggaaagcctgaggcagagagaagcagaattctcctccgctggacatagcctgcaagataaacagtctgtggaggagaccagtggagaaggtccagaagtggaaatggagtcctggcagaagcgatacgattcgctccaaaagattgtggagaagcagcagcagaagatggatcagttgcgctcacaagtacagagcctagagcaggaagtggctcaagaagaaggaacaagccaggccctgagagaggaggcccagcgaagggattcagccctgcagcagctgcgcacagccgtgaaggagctttcagtgcaaaaccaggacttgattgagaagaatctgacactccaggaacacctgcgccaggcccaaccagggtctccaccttcaccagacacggcccagctggcacttgagctgcaccaggagttggccagttgccttcaagatctgcaggctgtctgtagcattgtgacccagagggcccagggccatgaccccaatctctccctgctcctgggcattcactcacagcacccagagactcagctagatttgcagaagccagatgtgatcaagaggaaactagaagaggttcaacagctgcgtcgtgacattgaggacttaaggaccaccatgtcagacagatatgcccaggacatgggagaaaactgtgtcacacagtgaggaattctgggggattcccccagggaggagctgggctgctgagagcctagtccagcaggtttctgccctgacattctcttgtctgctattcccagagaggtctcagaggggaggggagagcctgcatctgggggccaagggctgattagggaactgtgtcctacccacactggcatgttggattacgtttgtcctgttaattcactctagacggtgagttactaattaacttttggcaggtacaacagataagtcctcacaaactgttcccagccctaggctgacatgagagacgaacaggctgtccacctttcttctccatccaatgggatggatccatgttcattcccacttcacaccttggtcctgctgattagagagctcatcagaggggcctggaaaggctgagcaagtaccagtgacaatggccatttaagaattctcaggccccatgtgccagccttcttgggaactgagctggctttctgggttttctcatgcctggtcttactgcttcttcctcagggctcttgttctcccagaagcctcagggtaatgtgttggttagcacgtaactactaggattggggccctagggattatagccaggactctaatctgcctaccatgccatttaacaagagatcccactctccagctgccttgtgtccctagggtcctggccatgtgtttagtgtgctaaactttctcctttgttctcaggccttccaggtagtccccttcctggacttaagagtgcaaactcttctctgtggttctagccttgggcagaattatatcccagagaccacagagcaactgtcaagctgcttaccccctcacccagggctacagcctgtgcccagccctctaatttgtgcctctcttgtgttgggggtggtgggggttattcctttccctttcctgctctggcctccttgaaagttcagagtacccagtacaagtcagctttaaagtacagcttttagtgtttcctgggttgtttctctggggctttagtgagggacctttgccctctggtttttcttgcctcctggtttagggagcatctcacacttgttagtatctggttgttgggccagccgtgcctcctctagatctggagccaggccaggcaggggccacgtgtgggccagtcagccactacaagatttttgctaagctttgggctgttggcagcatcttggacctcatgcctgggcctgaatgaggctctttcttaagtgtttttacaagtttgtgttttatttatggagtgacttatcccttccattcagagcagccccacccagccagcccttcagcctctgggctcctgctgcttaaaggcagagccgcctggttggtctccaccctgtgcattgggagcccagccaccatgctgacgggtatttttcctcataaagtttataaccagttatttatatgaatctttgttatgtccatttgtttgtattgcgtattttgattataaaataaagtatcttaacaga

SEQ ID NO: 3575 - DNA, 673 bp, Homo sapiens
  source 1..673: mol_type = genomic DNA
tttctgcgttcaatgtacatgtgttgagtcccagtttctgccgctttatctttcccgcctcccggcaggcaggccgttaaccgtcttccggaagacgctgctagaaccctccggccgctcctgcccgccatcgtccccgaacgacactcgctcagctctcagggccagagcggggcaggaggatgctttcccagccccaccatggagctgcgctgtgggggattgctgttcagttctcgctttgattcagggaatctagcccacgtggagaaggtggaatctttgtccagtgatggggaaggggtaggaggtggggcgtcagccctgaccagtggcattgcctcttcccctgactatgaattcaacgtgtggacccgaccagactgtgctgaaacggaatttgagaatgggaacaggtcatggttctacttcagcgtccggggaggaatgccaggaaaactcatcaagatcaacattatgaacatgaacaagcagagcaagctgtattcccagggcatggccccctttgtgcgcacactgcccacccggccacgctgggaacgcattcgagaccggcccacctttgagatgacagagacgcagtttgtgttatcctttgttcatcgtttcgtggagggccgtggggccaccaccttcttcgccttctgctacc

SEQ ID NO: 3576 - DNA, 3318 bp, Homo sapiens; identical to SEQ ID NO: 2439
  source 1..3318: mol_type = genomic DNA

SEQ ID NO: 3577 - DNA, 6785 bp, Homo sapiens
  source 1..6785: mol_type = genomic DNA
ccgagccgggagccgagcgcgctgggcgcggccgtcccgctgccgccgccaagcccggagtgcgccagcggccatggttcccgcggcggcgccgggcgcctgagccccgggacgcaagcgctggaggcgggctgccggctgtgcgggcgctccggagagaccgacagaaggtgagcactgtgggctatgggatggatgaggtggagcaggaccagcatgaggcccgactcaaggagctgtttgacagttttgacacgacgggcacagggtccctggggcaggaggaactcaccgacctttgccacatgttgagcttggaggaggtggccccagtgctgcagcagacattacttcaggacaacctcttgggcagggtacattttgaccaatttaaagaagcattaatactcatcttgtccagaactctgtcaaatgaagaacactttcaagaaccagactgctcactagaagctcagcccaaatatgttagaggtgggaagcgttacggacgaaggtccttgcccgagttccaagagtccgtggaggagtttcctgaagtgacggtgattgagccactggatgaagaagcgcggccttcacacatcccagccggtgactgcagtgagcactggaagacgcaacgcagtgaggagtatgaagcggaaggccagttaaggttttggaacccagatgacttgaatgcttcacagagtggatcttcccctccccaagactggatagaagagaaactgcaagaagtttgtgaagatttggggatcacccgtgatggtcacctgaaccggaagaagctggtctccatctgtgagcagtatggtttacagaatgtggatggagagatgctcgaggaagtattccataatcttgatcctgacggtacaatgagtgtagaagattttttctatggtttgtttaaaaatggaaaatctcttacaccatcagcatctactccatatagacaactaaaaaggcacctttccatgcagtctttcgatgagagtggacgacgtaccacaacctcatcagcaatgacaagtaccattggctttcgggtcttctcctgcctggatgatgggatgggccatgcatctgtggagagaatactggacacctggcaggaagagggcattgagaacagccaggagatcctgaaggccttggatttcagcctcgatggaaacatcaatttgacagaattaacactggcccttgaaaatgaacttttggttaccaagaacagcattcaccaggcggctctggccagctttaaggctgaaatccggcatttgttggaacgagttgatcaggtggtcagagaaaaagagaagctacggtcagatctggacaaggccgagaagctcaagtctttaatggcctcggaggtggatgatcaccatgcggccatagagcggcggaatgagtacaacctcaggaaactggatgaagagtacaaggagcgaatagcagccttaaaaaatgaactccgaaaagagagagagcagatcctgcagcaggcaggcaagcagcgtttagaacttgaacaggaaattgaaaaggcaaaaacagaagagaactatatccgggaccgccttgccctctctttaaaggaaaacagtcgtctggaaaatgagcttctagaaaatgcagagaagttggcagaatatgagaatctgacaaacaaacttcagagaaatttggaaaatgtgttagcagaaaagtttggtgacctcgatcctagcagtgctgagttcttcctgcaagaagagagactgacacagatgagaaatgaatatgagcggcagtgcagggtactacaagaccaagtagatgaactccagtctgagctggaagaatatcgtgcacaaggcagagtgctcaggcttccgttgaagaactcaccgtcagaagaagttgaggctaacagcggtggcattgagcccgaacacgggctcggttctgaagaatgcaatccattgaatatgagcattgaggcagagctggtcattgaacagatgaaagaacaacatcacagggacatatgttgcctcagactggagctcgaagataaagtgcgccattatgaaaagcagctggacgaaaccgtggtcagctgcaagaaggcacaggagaacatgaagcaaaggcatgagaacgaaacgcacaccttagaaaaacaaataagtgaccttaaaaatgaaattgctgaacttcaggggcaagcagcagtgctcaaggaggcacatcatgaggccacttgcaggcatgaggaggagaaaaaacaactgcaagtgaagcttgaggaggaaaagactcacctgcaggagaagctgaggctgcaacatgagatggagctcaaggctagactgacacaggctcaagcaagctttgagcgggagagggaaggccttcagagtagcgcctggacagaagagaaggtgagaggcttgactcaggaactagagcagtttcaccaggagcagctgacaagcctggtggagaaacacactcttgagaaagaggagttaagaaaagagctcttggaaaagcaccaaagggagcttcaggagggaagggaaaaaatggaaacagagtgtaatagaagaacctctcaaatagaagcccagtttcagtctgattgtcagaaagtcactgagaggtgtgaaagcgctctgcaaagcctggaggggcgctaccgccaagagctgaaggacctccaggaacagcagcgtgaggagaaatcccagtgggaatttgagaaggacgagctcacccaggagtgtgcggaagcccaggagctgctgaaagagactcttaagagagagaaaacaacttctctggtcctgacccaggagagagagatgctggagaaaacatacaaagaacatttgaacagcatggtcgtcgagagacagcagctactccaagacctggaagacctaagaaatgtatctgaaacccagcaaagcctgctgtctgaccagatacttgagctgaagagcagtcacaaaagggaactgagggagcgtgaggaggtcctgtgccaggcaggggcttcggagcagctggccagccagcggctggaaagactagaaatggaacatgaccaggaaaggcaggaaatgatgtccaagcttctagccatggagaacattcacaaagcgacctgtgagacagcagatcgagaaagagccgagatgagcacagaaatctccagacttcagagtaaaataaaggaaatgcagcaggcaacatctcctctctcaatgcttcagagtggttgccaggtgataggagaggaggaggtggaaggagatggagccctgtccctgcttcagcaaggggagcagctgttggaagaaaatggggacgtcctcttaagcctgcagagagctcatgaacaggcagtgaaggaaaatgtgaaaatggctactgaaatttctagattgcaacagaggctacaaaagttagagccagggttagtaatgtcttcttgtttggatgagccagctactgagttttttggaaatactgcggaacaaacagagcagtttttacagcaaaaccgaacgaagcaagtagaaggtgtgaccaggcggcatgtcctaagtgacctggaagatgatgaggtccgggacctgggaagtacagggacgagctctgttcagagacaggaagtcaaaatagaggagtctgaagcttcagtagagggtttttctgagcttgaaaacagtgaagagaccaggactgaatcctgggagctgaagaatcagattagtcagcttcaggaacagctaatgatgttatgtgcggactgtgatcgagcttctgaaaagaaacaggacctactttttgatgtttctgtgctaaaaaagaaactgaagatgcttgagagaatccctgaggcttctcccaaatataagctgttgtatgaagatgtgagccgagaaaatgactgccttcaggaagagctgagaatgatggagacacgctacgatgaggcactagaaaataacaaagaactcactgcagaggttttcaggttgcaggatgagctgaagaaaatggaggaagtcactgaaacattcctcagcctggaaaagagttacgatgaggtcaaaatagaaaatgaggggctgaatgttctggttttgagacttcaaggcaagattgagaagcttcaggaaagcgtggtccagcggtgtgactgctgcttatgggaagccagtttagagaacctggaaatcgaacctgatggaaatatactccagctcaatcagacactggaagagtgtgtgcccagggttaggagtgtacatcatgtcatagaggaatgtaagcaagaaaaccagtaccttgaggggaacacacagctcttggaaaaagtaaaagcacatgaaattgcctggttacatggaacaattcagacacatcaagaaaggccaagagtacagaatcaagttatactggaggaaaacactactctcctaggctttcaagacaaacattttcagcatcaggccaccatagcagagttagaactggagaaaacaaagttacaggagctgactaggaagttgaaggagagagtcactattttagttaagcaaaaagatgtactttctcacggagaaaaggaggaagagctgaaggcaatgatgcatgacttgcagatcacgtgcagtgagatgcagcaaaaagttgaacttctgagatatgaatctgaaaagcttcaacaggaaaattctattttgagaaatgaaattactactttaaatgaagaagatagcatttctaacctgaaattagggacattaaatggatctcaggaagaaatgtggcaaaaaacggaaactgtaaaacaagaaaatgctgcagttcagaagatggttgaaaatttaaagaaacagatttcagaattaaaaatcaaaaaccaacaattggatttggaaaatacagaacttagccaaaagaactctcaaaaccaggaaaaactgcaagaacttaatcaacgtctaacagaaatgctatgccagaaggaaaaagagccaggaaacagtgcattggaggaacgggaacaagagaagtttaatctgaaagaagaactggaacgttgtaaagtgcagtcctccactttagtgtcttctctggaggcggagctctctgaagttaaaatacagacccatattgtgcaacaggaaaaccaccttctcaaagatgaactggagaaaatgaaacagctgcacagatgtcccgatctctctgacttccagcaaaaaatctctagtgttctaagctacaacgaaaaactgctgaaagaaaaggaagctctgagtgaggaattaaatagctgtgtcgataagttggcaaaatcaagtcttttagagcatagaattgcgacgatgaagcaggaacagaaatcctgggaacatcagagtgcgagcttaaagtcacagctggtggcttctcaggaaaaggttcagaatttagaagacaccgtgcagaatgtaaacctgcaaatgtcccggatgaaatctgacctacgagtgactcagcaggaaaaggaggctttaaaacaagaagtgatgtctttacataagcaacttcagaatgctggtggcaagagctgggccccagagatagctactcatccatcagggctccataaccagcagaaaaggctgtcctgggacaagttggatcatctgatgaatgaggaacagcagctgctttggcaagagaatgagaggctccagaccatggtacagaacaccaaagccgaactcacgcactcccgggagaaggtccgtcagttggaatccaatcttcttcccaagcaccaaaaacatctaaacccatcaggtaccatgaatcccacagagcaagaaaaattgagcttaaagagagagtgtgatcagtttcagaaagaacaatctcctgctaacaggaaggtcagtcagatgaattcccttgaacaagaattagaaacaattcatttggaaaatgaaggcctgaaaaagaaacaagtaaaactggatgagcagctcatggagatgcagcacctgaggtccactgcgacgcctagcccgtcccctcatgcttgggatttgcagctgctccagcagcaagcctgtccgatggtgcccagggagcagtttctgcagcttcaacgccagctgctgcaggcagaaaggataaaccagcacctgcaggaggaacttgaaaacaggacctccgaaaccaacacaccacaggccttgctaccggagcagcgagcagtgcacgcagattcctacagaaggattgggcacctgtgaaaactgggctgctattgatggcatttcttaccatggcagacagatgcacacacccacccatgcacacacaccacacacagagacataagctaagatatgttggaattaagtgctcttttaaattattttattatttttactgttaaacctttgcagtattatgtctcttatttatttatgtagaaatgacagatcttgtgaatcaaattcacaaacatcagcttgttacaaatcattttatttataccctttaaagagtgtggatttaagattcttgaaaggatgtagtctatatattttctcattccatatgttgtaactatttttaaccaaaggtactacttttatatatggaatttgaagaaaaccaggggtatttatactgttttgtataagatgtacaaatctttttgacaggaaatttttgatgaaacaataaaataaattttaagt

SEQ ID NO: 3578 - DNA, 1218 bp, Homo sapiens
  source 1..1218: mol_type = genomic DNA
cgggcgccgcgggccatggcgggcgagaaccaccagtggcagggcagcatcctctacaacatgcttatgagcgcgaagcaaacgcgcgcggctcctgaggctccagagacgcggctggtggatcagtgctggggctgttcgtgcggcgatgagcccggggtgggcagagaggggctgctgggcgggcggaacgtggcgctcctgtaccgctgctgcttttgcggtaaagaccacccacggcagggcagcatcctctacagcatgctgacgagcgcaaagcaaacgtacgcggcaccgaaggcgcccgaggcgacgctgggtccgtgctggggctgttcgtgcggctctgatcccggggtgggcagagcggggcttccgggtgggcggcccgtggcactcctgtaccgctgctgcttttgtggtgaagaccacccgcggcagggcagcatcctctacagcttgctcactagctcaaagcaaacgcacgtggctccggcagcgcccgaggcacggccagggggcgcgtggtgggaccgctcctacttcgcgcagaggccagggggtaaagaggcgctaccaggcgggcgggccacggcgcttctgtaccgctgctgcttttgcggtgaagaccacccgcagcagggcagcaccctctactgcgtgcccacgagcacaaatcaagcgcaggcggctccggaggagcggccgagggccccctggtgggacacctcctctggtgcgctgcggccggtggcgctcaagagtccacaggtggtctgcgaggcagcctcagcgggcctgttgaagacgctgcgcttcgtcaagtacttgccctgcttccaggtgctgcccctggaccagcagctggtgctggtgcgcaactgctgggcgtccctgctcatgcttgagctggcccaggaccgcttgcagttcgagactgtggaagtctcggagcccagcatgctgcagaagatcctcaccaccaggcggcgggagaccgggggcaacgagccactgcccgtgcccacgctgcagcaccatttggcaccgccggcggaggccaggaaggtgccctccgcctcccaggtccaagccatcaagtgctttctttccaaatgctggagtctgaacatcagtaccaaggagtacgcctacctcaaggggaccgtgctctttaacccgggaaaagggaaggaaaatgattgcaatcatcattaa

SEQ ID NO: 3579 - DNA, 1079 bp, Homo sapiens
  source 1..1079: mol_type = genomic DNA
cggaccgggagcagcggccgcaggtccgggcgccatggctgcggagcggacccggccgctgcaaggctctggcggtccgagcgtgcctagtagctgtgaacccggcgcgaggtcccgggccccggggcgctcgctcagaaaaatgaaactctggatcacctgattagtctgagtggggcagtccagctcaggcatctctccaataacctagagactctcctcaagcgggacttcctcaaactccttcccctggagctcagtttttatttgttaaaatggctcgatcctcagactttactcacatgctgcctcgtctctaaacagtggaataaggtgataagtgcctgtacagaggtgtggcagactgcatgtaaaaatttgggctggcagatagatgattctgttcaggacgctttgcactggaagaaggtttatttgaaggctattttgagaatgaagcaactggaggaccatgaagcctttgaaacctcgtcattaattggacacagtgccagagtgtatgcactttactacaaagatggacttctctgtacagggtcagatgacttgtctgcaaagctgtgggatgtgagcacagggcagtgcgtttatggcatccagacccacacttgtgcagcggtgaagtttgatgaacagaagcttgtgacaggctcctttgacaacactgtggcttgctgggaatggagttccggagccaggacccagcactttcgggggcacacgggggcggtatttagcgtggactacaatgatgaactggatatcttggtgagcggctctgcagacttcactgtgaaagtatgggctttatctgctgggacatgcctgaacacactcaccgggcacacggaatgggtcaccaaggtagttttgcagaagtgcaaagtcaagtctctcttgcacagtcctggagactacatcctcttaagtgcagacaaatatgagattaagatttggccaattgggagagaaatcaactgtaagtgcttaaagacattgtctgtctctgaggatagaagtatctgcctgcagccaagacttcattttgatggcaaata

SEQ ID NO: 3580 - DNA, 884 bp, Homo sapiens
  source 1..884: mol_type = genomic DNA
aaaatgctcccgccgacgcacagcagtgacgacacacaaggtttcggggactgagtgggtttcagactttctctcaggatttccgctggcttcaggttccggtcaggcgtcgggacagagcctgatccaggcttcggcggccggtggcagctctcgatcagctctcgcagtcggagaggcggctaaggaaaggtgccacagcagagacgcgaaggagaggccctagaaccgaggtgttcctgctcatatgtttggcgtgacaaagtttggggataacattgaggatgaatggtttattgtttatgtaataaagcagatcacaaaggaatttccagagttagtagcaaggattgaagacaatgatggtgaattcttgttaatagaagctgctgactttctccctaaatggctggatcctgaaaatagcaccaatagggtatttttctgccatggggaattgtgtattatccctgcaccaagaaaatctggagcagaatcttggttacccaccacacccccaacaattccacaagcattgaatataatcacagcacattcagaaaaaatacttgcttcagaatctatacgagctgctgtgaataggcgcatcagagggtacccagaaaaaattcaggcctcacttcatcgagcacactgcttccttccagctggcattgtggcagtgctaaagcagcgccccagattggtggctgcagcagtccaggcattttacctacgagaccctattgacctgcgagcttgtcgtgttttcaagacattcttgcctgaaacacgaataatgacatcggtcacattcactaaatgtctatatgcacaattggtgcaacaaaggtttgtgccagaccggcggagtggatacaggc

SEQ ID NO: 3581 - DNA, 603 bp, Homo sapiens; identical to SEQ ID NO: 2833
  source 1..603: mol_type = genomic DNA

SEQ ID NO: 3582 - DNA, 6784 bp, Homo sapiens
  source 1..6784: mol_type = genomic DNA
gtgggctcggcccgggctgccacgagcgtgcgggcctcgccgggcatgtcctaggcggcggccccgcccagcgctcggccgggcgggcgggcgggcgcgagggcagggaccgagccgggccgagctggggaacaagccggggaccaagccggggaccaagccggggactaaggcgagccggagaccgagcccgaacagcagggccagacgggcccagccagcaccaagatgagtgccacgtcctggttcctggtgagcagcagcggcgcccgccaccggctccctcgggagctcatcttcgtggggcgtgaggagtgtgagctcatgctacagtcccgcagcgtggacaagcagcatgccgtcatcaactacgaccaggacagggacgagcactgggtgaaggacctgggcagcctcaatgggacgtttgtgaatgacatgcgcatcccggaccagaagtacgtcacgctgaagctcaacgatgtcatccgcttcggctacgattccaacatgtatgtgctggagcgtgtgcagcaccgagtcccggaggaggcactcaagcatgaaaagtacaccagccagctgcaggtgagcgtgaagggtttggcgcccaagaggagcgaggcactgccggaacacacaccatactgcgaggcctcgaaccccaggccggagaagggggaccggagaccaggaacagaggcagcctcttaccgcacacccctgtatgggcagccctcctggtggggtgaggacgatggtagcacgctgcctgacgcccagcgccagggagagccctacccagcagagcgccccaagggaccagtgcagcaggacggggagctccacggcttccgcgcccctgctgagcctcagggctgctcgttccggcgggagcccagctacttcgagatccccacgaaggagaccccgcagccgtcgcagccccccgaggtgccggcacacgagatgcccacgaaggatgcagaggcaggtgggggcggagcggcccctgtggtgcagagccacgcctccttcaccatcgagtttgatgactgcagccctggcaagatgaagatcaaggaccatatcaccaagttttccctgcgccagcggcggcccccgggcaaggaggccacacctggcgagatggtgtcggctgagaccaaggtggccgactggctggtgcagaatgacccgagcctgctgcaccgggttggccctggggatgaccgccacagcaccaagagcgacctgcctgtccacacccgcaccctgaagggccacaagcacgaggacggcacgcagagtgactcagaggaccccctggccaaggcggcctcggccgctggggtgcccttggaggccagcggggagcaggtgcggctgcagaggcagatcaagcgggacccccaggagctactacataaccagcaggcctttgtcatcgagttcttcgacgaggacacaccccgaaagaagcgctcccagtccttcacgcacagcccgtccggggaccccaaggccgacaagcgccgtggcccaacgccggccgatagggaccgccccagtgtcccagccccagtccaggcagggggccgcagctcggggccacagagggccggctcgctcaagcgggagaagacagaggaacggctgggcagcccctcgcccgcctcccgaacccctgcccgccccttcggaagcgtggggcgccgctcccgcctggcccaggacttcatggcccagtgtctgcgggagagctccccggccgcccggcccagccccgagaaggttcctccggtgctgcccgctcccctgacaccccatgggaccagccccgtgggccccccgaccccaccgcccgcccccacggacccccagctgaccaaggcacggaaacaggaggaggacgacagcctcagtgacgcagggacatacaccatcgagaccgaggcgcaggacacggaggtggaggaggcccggaagatgatcgaccaggtctttggggtgttggagtcccctgaactctccagggcatcttcggccacctttcgcccagtcatcagaggggacagagatgagtctgatgacgggggcgtggcccagcggatggcgctactgcaggagtttgcctcccggccactgggtgcggccccccaggcggagcaccagggcctcccggtgccgggctcccctgggggtcagaagtgggtgtcccgctgggccagcctggctgacagctactcagacccgggcctcacagaggatggcctgggacgtagaggcggggagccggaggggtccctgcctgtgcgcatgcggcgacggctccctcagctgcccagtgagagggctgacagccctgcgggcccagagagcagcaggaggagtgggcctgggccaccggagctggacagtgagcagcccagccgcctcttcggccaggaggagttggatcctgacagcctcagcgatgccagtgggtcggacgggggccgaggccccgagccaggggtggagccacaggacagcagacgcaggagcccccaggaggggcccacgtggagcaggggtcggcgctcaccaagggcccccggggagccaactcccgcctctttcttcattggggaccagaatggggacgctgtgttatctaggaaaccgcttgcggctccaggggatggggagggcctagggcagacagcccagcccagccccccagcacgggatggcgtctatgtcagtgccaatgggagaatggtcatccagctacggcctggacggtccccagaacccgacggccctgccccagcctttctccggcaagagagcttcactaaggagccagccagtggtcccccagcgcccggcaagcccccccacatctccagccacccgcttctacaggacctggccgctacccgggccgcacgcatggacttccactcccaggacacccacctgatcttgaaggagacggagacggccctggcggccctggaggcccgactcctctctaattctgtggatgccgagtgtgaggggggcagcaccccgaggccgccggaggacgccctgtctggggactcggacgtggacacagccagcaccgtcagcctgcgtagtggcaagagcgggcccagccccacaaccccccagcctctgcgggcacagaaggagatgtcgccatccccgccagctgcacaggacccgggaggcaccgccctggtcagtgcccgtgagcagtcctcagagaggcagcatcacccacttggcccgacggacatgggccgtggagagccggtacggcgctcagccataaggcgtggccacaggccccgagggtccctggattggcccagtgaggagcgtggccctgtcctcgcccacctacccagctcagatgtgatggcctccaaccacgaaacccctgaggccaccggggcaggacggctaggttctcgccggaaaccagcggccccaccgccatccccagctgcccgggaggagcagagccgtagctcagccagctcccagaaggggccgcaggccttgacccgctccaacagcctgtccacccctcgccccacacgggcctcccggctgaggcgggcccggctgggggacgcttcagacactgaggctgcggatggtgagcgggggtccctgggcaaccctgagcccgtgggccggccagctgctgagcaggccaagaagctgtcacgcctggacatcctggccatgccccggaagcgggccggctccttcacagggactagtgaccccgaggcagcccctgcccgcaccagcttctctggccgcagtgtggagttgtgctgtgccagccgcaagcccaccatggccgaagcacgggctgtctccaggaaggctgccaacacagccaccaccacgggtccccgccagcccttcagcagggcccgctcaggcagtgcccgatacacctccaacacgaggcgccggcagcagggctcggattacacgtccacctctgaggaggagtacggctcccgccacggctcccccaaacacacacgctcccacacctcaacagccactcagaccccgagggctggcagctccagccgggctcgttcccgggcccccggcccccgggacacggacgacgatgaggaggagcctgacccttatggtttcatcgtgcagacggcagagattgcggagattgccaggctgagccagacgctggtgaaggacgtggccatcctagcccaggagatccacgatgtggctggggacggtgacacactgggctcctcggagcctgcccacagcgcctccctcagcaacatgcccagcacccccgcctcgaccatctctgcccgggaggagctggtgcagcgcatccccgaggccagcctcaacttccagaaggtgccgcccggctcgctgaactctcgggactttgaccagaacatgaacgacagctgtgaggacgccctggccaacaagacgcggcctcggaaccgagaggaggtgatcttcgataacctgatgctgaacccggtgtcccagctgtcgcaggccatccgtgagaacacagagcaccttgccgagaagatgaagatcctctttcagaacacagggagagcttgggaggacctggaagccaggatcaacgccgagaacgaggtgcccatcctgaagacatctaacaaggaaatcagctccatcctgaaggaactgaggcgggtgcagaaacagctggaagttatcaatgccatcgtggaccccagtgggagcctggacctgctcacaggaaacaggagcttggccagctctgcacagccggggctggggaagggccgcgtggctgcccagagcccaccctcacccgcctcagccgaggccctgctgccagccctgcccctgaggaatttcccacagcgggccagctgtgggcctcccagcctcccggaccccaccttcctccctgatgccgagaggttcctgatctaggccccagacctggccaggccagcctccctgtgcgtgtgcgtctctgccttccgtccgccgcacacccgcctgcctggccgcaggtggttctccctgaagacccccacatgtgccatatccctgtgggcgggtgcctcccacgcccttgccccctcgtcagctcccagccagcaccctactcaccctgtccagccccatggccacccccacccctgcctcgccccctacaggcctctgggcccagctcctggccaggctgctgccaaggtcaagccctcaagggcattaccccgcctcctcttcatcactgttatttttgtctttagctttaaaggaaagagttgttggtgccattgcaggtgccccctccaggcctgactggctccgccaggcactaacctgccataaccctttgtgctggcctgcggccaggcagaggaagagaggtcgactgtggggtcatttggtgccaaacatggaggtgggcaggctcacctgttcctgggactgtctgagatggcagggcacttgccctggtggctcccacctgaccccaggccttttataggcaggagccccactgcttccagcctctggtgccaacacagttgccaaacccattgagcttggggctgccctgtggaggcctcctgggtatggaccaggggcttgttgagagctgagccatgcacacaggtgcagacaccccccaactcccatgcacacggctagtccaggcgcctccacgctgcaccgtgaggactgcagggcatgtccccgtgaggggctatgggcctctgtaggtgggcttccaaggtcctgggtgcagccgggtgcatggcagcccttctggcgggggtgagcgcacgaccaaagtcactggaagccgggtttccggaagctcgcagcttggcctgcaccacacgccctccccttttggcttcacgccatcaggcctcaagtgggcatgggggcagggacgggcccaggaactgttgttttctcaggattctttcagctgggaacatggcaggtgagcagagcttggtgcctctgccgtggcccctgctggggcagcccgtgttgccggagcctctaagccaaagagcccgttggccgtggttggtgggggtggacgtgggggtgtcccacctggaccagactggcgtgggtgagctccacaccctgcctggcaatggtatgagagtcggacctggacagggccagctgctgggggagcggcactggggactggaggctggaagcgggtggtgtgtgtcccctgtttacttttagctgagctggggttgggtgtacgggttctgttcctctgagcctgcggcccacctgatgtttacgtgtgtgtgtgagggggggcgggggtggcaggtgtccccccctggtccccgccccaagagcctgctgtctgtatggaggaggtgctagcccggtccaccgggctgctgcccacccctgcatgccccagttgcccaccccgcctgcccctggacatgaagtggtcacgcttcatccacggctccttcccacccctcggcagtggctgtgcaatgttttaagttcacaagttcctgctcctccccacactgagctcctttgttcctccccctccagcctttgcctgggaactggtccttgtttgccgggcttctcggagggttcactgtacattcgttctcaggtggtcttgtggctgtctttcggaaaatggttattttatatgatttgtcatggaatttgttctaataaatcattcttctatcac

SEQ ID NO: 3583 - DNA, 1897 bp, Homo sapiens
  source 1..1897: mol_type = genomic DNA
tcccggcgtgccccgcggcgggcgctgggccggagccggagcccaagccagagcggcgcggcctggaagaggccagggcccgggggaggcggcggcagcggcggcggctggggcagcccgggcagcccgagccccgcagcctgggcctgtgctcggcgccatgagcggcggcgggccttcgggaggcggccctgggggctcgggcagggcgcggactagctcgttcgcggagcccggcggcggaggcggaggaggcggcggcggccccggaggctcggcctccggcccaggcggcaccggcggcggaaaggcatctgtcggggccatgggtgggggcgtcggggcctcgagctccgggggtggacccggcggcagcggcggaggaggcagcggaggccccggcgcaggcactagcttcccgccgcccggggtgaagctgggccgtgacagcgggaaggtgaccacagtcgtagccactctaggccaaggcccagagcgctcccaagaagtggcttacacggacatcaaagtgattggcaatggctcatttggggtcgtgtaccaggcacggctggcagagaccagggaactagtcgccatcaagaaggttctccaggacaagaggttcaagaaccgagagctgcagatcatgcgtaagctggaccactgcaatattgtgaggctgagatactttttctactccagtggcgagaagaaagacgagctttacctaaatctggtgctggaatatgtgcccgagacagtgtaccgggtggcccgccacttcaccaaggccaagttgaccatccctatcctctatgtcaaggtgtacatgtaccagctcttccgcagcttggcctacatccactcccagggcgtgtgtcaccgcgacatcaagccccagaacctgctggtggaccctgacactgctgtcctcaagctctgcgattttggcagtgcaaagcagttggtccgaggggagcccaatgtctcctacatctgttctcgctactaccgggccccagagctcatctttggagccactgattacacctcatccatcgatgtttggtcagctggctgtgtactggcagagctcctcttgggccagcccatcttccctggggacagtggggtggaccagctggtggagatcatcaaggtgctgggaacaccaacccgggaacaaatccgagagatgaaccccaactacacggagttcaagttccctcagattaaagctcacccctggacaaaggtgttcaaatctcgaacgccgccagaggccatcgcgctctgctctagcctgctggagtacaccccatcctcaaggctctccccactagaggcctgtgcgcacagcttctttgatgaactgcgatgtctgggaacccagctgcctaacaaccgcccacttccccctctcttcaacttcagtgctggtgaactctccatccaaccgtctctcaacgccattcttatccctcctcacttgaggtccccagcgggcactaccaccctcaccccgtcctcacaagctttaactgagactccgaccagctcagactggcagtcgaccgatgccacacctaccctcactaactcctcctgagggccccaccaagcacccttccacttccatctgggagccccaagaggggctgggaaggggggccatagcccatcaagctcctgccctggctgggcccctagactagagggcagagaaaacgtcgattcgcaccgtccaacctggccccgcccctcctacagctgtaactcccctcctgtcctctgcccccaaggtctactccctcctcaccccaccctggagggccaggggagtggagagagctcctgatgtcttagtttccacagtaaggtttgcctgtgtaca

SEQ ID NO: 3584 - DNA, 2589 bp, Homo sapiens
  source 1..2589: mol_type = genomic DNA
ctgagctgagtgacaggaagacggttcaatgggcggcgcggaggcggagccgtgggggcgggctcccggtcccgctatcggcggccggcgggcaggcgactcctgtcccgggtggaggcggcggagccggagccgggggagggggcagcggctgtctcacggaccacggcggcgcccgcagctcctcaccgcagcacccccactgcaggcccgaggagctttccggagcttcccacactcctggggagaagacttcttagccagcttgatgtttaaaattcagctggagcccttaaaacttcgagcgtggacgctgaatgggtttgtaaagtttcgaaacaaggagaccagtgctggtccagtggctgtgatgggaaaagattattacaagattcttgggatcccatcgggggccaacgaggatgagatcaagaaagcctaccggaagatggccttgaagtaccacccagacaagaataaagaacccaacgctgaggagaagtttaaggagattgcagaggcctatgatgtgctaagtgaccccaagaaacggggcctgtatgaccagtatggggaggaaggcctgaagaccggcggtggcacatcaggtggctccagtggctcctttcactacacctttcatggggacccccatgccacctttgcctccttctttggtggctccaaccccttcgatatcttctttgccagcagccgctccactcggcccttcagtggctttgacccagatgacatggatgtggatgaagatgaggacccatttggcgctttcggccgttttggcttcaatgggctgagtaggggtccaaggcgagccccagaaccactgtaccctcggcgcaaggtgcaggaccccccagtggtgcacgagctgcgggtgtccctggaggagatctaccatggctccaccaagcgcatgaagatcacaaggcgtcgcctcaaccctgatgggcgaactgtgcgcaccgaggacaagatcctgcacatagtcatcaagcgtggctggaaggaaggcaccaagatcaccttccccaaagaaggcgacgccacacctgacaacatccctgctgacatcgtctttgtgctcaaagacaagccccatgcacacttccgccgagatggcaccaacgtgctctacagtgccctgatcagcctcaaggaggcgctgtgtggctgcactgtgaacattcccactatcgacggccgagtgatccctttgccctgcaatgatgtcatcaagccaggcaccgtgaagagactccgtggggagggccttcccttccccaaagtgccaactcagcgaggagacctcattgttgagttcaaagttcgcttcccagacagattaacaccacagacaagacagatccttaagcagcacctaccctgttcctaggctctgccccagccagtccagagcctaccacagcaatacccccaacactcactccactcaatgtgcacccagcttgatgtccactggacactggcaactttttctaaaatgcaaaaaaaagccactggttttcaggaaaatgttcctgtccctgaccccttttagagctgggctgcctggggggagtgggagggaggtggggagagctagcccaggccaggggtcaatgttcatgtcactagctttcaatccagtttccactgcagtggctggagagtgacctgagtgctacttgaagatatgtagagattccttatccatgcctgtacatagcatgtcctcctcccctcagctttgctaataccagtcccctcccttccctttggcttcctgctgttgggggtggaaaagactagaaaggacattgctttctcagccccacccccaggtccacagtgtccaaggtaatggcacacatattcatgcacaagaagcactcacctagagctgtctgtgcctctctgggagaaaggagagaggataagaagggaaagttcacaacctgtgaacagggacttgagcacgagacacttttcatctggagcaggggggtgagctcctcagcagcctccgtaacagctgccctgcctacacctgcagagctggaggttctgtcctccctgctgctctcaggagtgttcaagggtggagggcagggaatggggcctgaggtattaaggctaagaggtgggggacagggcccatctaccagccttcatcaggaagggaaagggctttggggtcaggtggcagctattccccaccaagagattcagggtcacaggtttttccccacacctctgaactcagggcctagccacccccaaacttccaaatcccacttttgtgatatgtgaagctactcatttcttacccttggaggctgtgtggggaatttccagcccttttatgcctgtgtgatcccaccccacccccatagttgtataaaggtcatagtgaagaagctgggggaagactgcttcagccagatcctggggtggggtctttaggttttctcactttgacaacccccgaatgtttttatagtagtttttttgtatttttttgtaatgacagtattatgtaaaaaataaagtattttaaaaatatgg

SEQ ID NO: 3585 - DNA, 503 bp, Homo sapiens
  source 1..503: mol_type = genomic DNA
gtctatggagccaaagatattgaactctctcctgaggcacaagccaaaatagatcgttacactcaacagggttttggaaatttgcccatctgcatggcaaagacccacctttctctatctcaccaacctgacaaaaaaggtgtgccaagggacttcatcttacctatcagtgacgtccgggccagcataggcgctgggttcatttaccctttggtcggaacgagaagctcccctctggctctagttggagaatcccaacccaagcaagtccatccttaaacaataaacatctccagcattgctggctttggaagaccccatggtgagatgctggagcttttttccgctccagatttcgcttctaaatatttacttttactttccatgttcacttataggccagggtttttttttcctaccattgaattatttcgtcatgttctatttaattattgctttaattggcattggtgaccacaaataataataaatactattaactg

SEQ ID NO: 3586 - DNA, 818 bp, Homo sapiens
  source 1..818: mol_type = genomic DNA
gggtctgggcagggctgggcagtgctgccggagcaaaagcggtagcgggagcccggccggagctgggtctggagacgccgtggcagcctgaacggagtgtgcgacggattgggaggaggaactgccaggtcggatgtggagatgaacccggagagtgtccttcggctctggtcggccttcaggggcattcctgccagtctcagaagatgacagtctgcaatcgtgttatcatcaacgtggaaaaaataagggcaatgcagttttcatgtgtgtaaggtttgtctacagattttgagcgttcgaagttgacccctgactaagtatactttgctgctccctcagcctttgaaaaaatgtctgtcacatatgatgattccgttggagtagaagtgtccagcgacagcttctgggaggtcgggaactacaagcggactgtgaagcggatcgacgatggccaccgcctgtgcagcgacctcatgaactgcctgcatgagcgggcgcgcatcgagaaggcgtatgcgcagcagctcactgagtgggcccggcgctggaggcagctcgtggagaaagggccccagtacgggaccgtggagaaggcctggatggccttcatgtccgaggcagagagggtgagcgagctgcacctcgaggtgaaggcctcactgatgaacgatgacttcgagaagatcaagaactggcagaaggaagcctttcacaagcagatgatgggcggcttcaaggagaccaaggaagctgaggacggctttcggaaggcacagaagccctgggccaagaagctgaaagaggtacatctgtcc

SEQ ID NO: 3587 - DNA, 1476 bp, Homo sapiens
  source 1..1476: mol_type = genomic DNA
gaaagagcagaagaggaggtggggtggagggagcagagccagggattaggggactactgaggctctggagatgagaccgccaggagtccttccccaccatgagccccctccactcctgcagctggaggagtttttcccagtctcagtgctgccctggggcgagagagactgaacaagctgtttgggtgggaagagaatggaggaagttgacagggatgggcggggcccgtgggggggctgaccaggaacccagcttcctgctcagtacccaggcatccagcccccagctcacccccaccccttccagcccccactcccctcaggaacccaaggttccagccctcctcccaaatcccagccacccctcccccaccagtttctcccctctaggggatggaggctgagagaccccaggaagaagaggatggtgagcagggcccccctcaggatgaggaaggctggccccctccaaactccaccactcggccttggcgatctgctcctccgtcccctcctcctccagggacccgccacacagccctgggaccccgctcggcctccctgctctccctgcagactgaactccttctggacctggtggctgaagcccagtcccgccgcctggaggagcagagggccaccttctacaccccccaaaacccctcaagcctagcccctgccccactccgtcctctcgaggacagagaacagctttacagcactatcctcagtcaccagtgccagcggatggaagcccagcggtcagagcctcccctccctccaggggggcaagagctcctggagttgctgctgagagttcagggtgggggtcgaatggaggagcaaaggtcccggccccccacacacacctgctgagacttgagccccaaccagcccttccttgccactggtctcaaagctgggcagcccattgcatgccctcaactcttgcttggcaggggtaccagagactgaaagacacggcacaaatctcaatattcatctcccacatcaccttccctgggaactggacagggtgaaagtcctcaaactctgggaacaggcgagatggaacagggatttaactccccgcccacaggtccatgggagcttgaggcagtaagggggatcccaggcacccatctcaaggagtggctgggagtcttttccctaacttgtggggacaccaccagttgtcaagctactaggcagtagggtctgagggctcaggcctccacctgagaggttataacctgagagacagctctacccttcctcccagtaagaagggaaggtgggtgggcacctgagagattaagactattctcccagtcccactaccagcacccccgatccctgagactgaggggtttacgggctgtgaatggaccttcagccctgcccaccctccctccccactgctgctgagtctgtctgatgttttggttgtgtgaataaatataattcccctctgga

SEQ ID NO: 3588 - DNA, 998 bp, Homo sapiens
  source 1..998: mol_type = genomic DNA
gcaccgctgagctgccgagaggaagctcgctctgcccggctgccctcttgtagtccgccggcgaggggcagttctcggtgaggaggaagagagcagcggacggcacagcacccgcgcgggccctccggcaggcggcttctcagagttttcaggtggcgaaactgactggtctggttagagcgcgtccaagccaagccgcagtgctgtttggatttttaaatttctccttctgagtgagaaaatagcaatcgagatggaaccatccgcacaacagctccagctggcagcatcacttcccgccaatttatccaacttctgccaaggctctgaaatgccaacaacgtcgaggcctgcacttgatgtcaagggtggcacctcacctgcgaaggaggatgccaaccaagagatgagctccgtggcctactccaaccttgcggtgaaagatcgcaaagcagtggccattctgcactaccctggggtagcctcaaatggaaccaaggccagtggggctcccactagttcctcgggatctccaataggctctcctacaaccacccctcccactaaacccccatccttcaacctgcaccccgcccctcacttgctggctagtatgcacctgcagaaacttaatagccagtatcaggggatggctgctgccactccaggccaacccggggaggcaggacccctgcaaaactgggactttggggcccaggcgggaggggcagaatcactctctccttctgctggtgcccagagccctgctatcatcgattcggacccagtggatgaggaagtgctgatgtcgctggtggtggaactggggttggaccgagccaatgagcttccggagctgtggctggggcagaatgagtttgacttcactgcggactttccatctagctgctaatgccaagtgtccctaaagatggaggaataaagccaccaattctgttgtaaataaaaataaagttacttacaaagagacgggccaa

SEQ ID NO: 3589 - DNA, 558 bp, Homo sapiens
  source 1..558: mol_type = genomic DNA
aaaaccgcatccccgcaggaggctcggccgccgcgcgcccgcggccctccgtcccgccccggccggctggcggtcacctggcacaccagcgcccgcaggatgcccagaaacagagcctcactctgtcacctaggctggagtgcagtggtgcaattatggctcactgcagtttcaacctcccagattccagtcatcctcctgcctcagccacccaagaagctgggaccacaggtactgcttaggatgaatatgatttggagaaattccatttcttgtctaaggctaggaaaggtgccacacagataccaaagtggttaccacccagtggcccctctgggatcaaggattttaactgacccagccaaagtttttgaacacaacatgtgggatcacatgcagtggtctaaggaagaagaagcagcagccagaaaaaaagtaaaagaaaactcagctgtgcgagtccttctggaagagcaagttaagtatgagagagaagctagtaaatactgggacacattttacaagattcataagaataagtttttcaaggatcgtaat

SEQ ID NO: 3590 - DNA, 361 bp, Homo sapiens
  source 1..361: mol_type = genomic DNA
ggaaggagagtctccaacggcatcaccccactcatctgccaccgatgacctccaccattcagacagataccagacctttctgcgagtacgagccaaccggcagacccgactgaatgctcggattgggaaaatgaaacggaggaagcaagatgaagggcaggtatgtcccctgtgcaaccgccccctggcaggatcggagcaggagatgagtaggcatgtggagcattgcctttctaagagggaaggctcctgcatggctgaggatgatgctgtggacatcgagcatgagaacaacaaccgctttgaggagtatgagtggtgtggacagaagcggatacgggccaccactctcctggaaggt

SEQ ID NO: 3591 - DNA, 3010 bp, Homo sapiens
  source 1..3010: mol_type = genomic DNA
actgctccttctctcacgccaactgagtctcttgatctgtacatgcaatcccaggcagctcgcgaacacaaacccggggccagccgcctactgctgctgctgctgctgccgctgccgccgccgccgccgccgctgcctccgccggctctgcgaacccgggacttttcatgcaccacactctccgcctgcttccctccgtgtcctgaaaagtgcgaccgttctcccaaggaatttccacggcaagtcttaggagggaatgattccccagtaatattccctgccctgacccaaagtgctggttggcctccctcccagggaagactgcttcttgcgtaacgccggccacagaaagagactccgatggacttacaccgggcagccttcaagatggagaactcatcctaccttcccaaccctctggcatccccagcactgatggtcctggcatccacggctgaggccagccgtgatgcttccatcccttgtcagcagccacgaccctttggtgtacctgtctcagttgacaaggacgtgcatattcctttcaccaacggttcctatacctttgcctctatgtaccatcggcaaggtggggtgccaggcacttttgccaatcgtgatttccccccttctctactacacctccaccctcaatttgctcccccaaatctagattgcaccccaatcagtatgctgaatcatagtggtgtgggggctttccggccctttgcctccaccgaggaccgggagagctatcagtcagcctttacgccggccaagcgacttaagaactgccatgacacagagtctccccacttgcgcttctcagatgcagatggcaaggaatatgactttgggacacagctgccatctagctcccccggttcactaaaggttgatgacactgggaagaagatttttgctgtctctggcctcatttctgatcgggaagcctcatctagcccagaggatcggaatgacagatgtaagaagaaagcagcggcattgttcgacagccaggccccaatttgccccatctgccaggtcctgctgaggcccagtgagctgcaggagcatatggagcaggaactggagcagctagcccaactgccctcgagcaagaattcccttctgaaggatgccatggctccaggcaccccaaagtccctcctgttgtctgcttccatcaagagggaaggagagtctccaacggcatcaccccactcatctgccaccgatgacctccaccattcagacagataccagacctttctgcgagtacgagccaaccggcagacccgactgaatgctcggattgggaaaatgaaacggaggaagcaagatgaagggcagagggaaggctcctgcatggctgaggatgatgctgtggacatcgagcatgagaacaacaaccgctttgaggagtatgagtggtgtggacagaagcggatacgggccaccactctcctggaaggtggcttccgaggctctggcttcatcatgtgcagcggcaaagagaacccggacagtgatgctgacttggatgtggatggggatgacactctggagtatgggaagccacaatacacagaggctgatgtcatcccctgcacaggcgaggagcctggtgaagccaaggagagagaggcacttcggggcgcagtcctaaatggcggccctcccagcacgcgcatcacacctgagttctctaaatgggccagtgatgagatgccatccaccagcaatggtgaaagcagcaagcaggaggccatgcagaagacctgcaagaacagcgacatcgagaaaatcaccgaagattcagctgtgaccacgtttgaggctctgaaggctcgggtcagagaacttgaacggcagctatctcgtggggaccgttacaaatgcctcatctgcatggactcgtactcgatgcccctaacgtccatccagtgttggcacgtgcactgcgaggagtgctggctgcggaccctgggtgccaagaagctctgccctcagtgcaacacgatcacagcgcccggagacctgcggaggatctacttgtgagctatctgccccaggcaggcctcgcctccagcagccccacctgcccccagcctctgtgacagtgaccgtctccctttgtacatacttgcacacaggttccccatgtacatacatgcacatactcaaacatgcgtacacacacacacatttacacacgcaggactctggagccagagtagaggctgtggcccaggcactacctgctggctcccacctatggtttgggggccatacctgttccagctctgttcccagggtggggcagggaggtgggggttgggggagtagtggggcacggctcctaagatccagcccccatactgacagacggacagacagacatgcaaacaccagactgaagcacatgtaatatagaccgtgtatgtttacaatgttgtgtataaatgggacaactcctcgccctctacctgtcccctccccctttggttgtatgattttcttcttttttaagaacccctggaagcagcgcctccttcagggttggctgggagctcggcccatccacctcttggggtacctgcctctctctctcctgtggtgtcccttccctctcccatgtgctcggtgttcagtggtgtatatttcttctcccagacatggggcacacgccccaagggacatgatcctctccttagtcttagctcatggggctctttataaggagttggggggtagaggcaggaaatgggaaccgagctgaagcagaggctgagttagggggctagaggacagtgctcctggccacccagcctctgctgagaaccattcctgggattagagctgcctttcccagggaaaaagtgtcgtctccccgaccctcccgtgggccctgtggtgtgatgctgtgtctgtatattctatacaaaggtacttgtcctttccctttgtaaactacatttgacatggattaaaccagtataaacagttg

SEQ ID NO: 3592 - DNA, 5169 bp, Homo sapiens
  source 1..5169: mol_type = genomic DNA
gcgcatcaggcgctgttgttggagccggaacaccgtgcgactctgaccgaaccggccccctcctcgcgcacacactcgccgagccgcgcgcgcccctccgccgtgacagtggccgtggcctccgctctctcggggcacccggcagccagagcgcagcgagagcgggcggtcgccagggtcccctccccagccagtcccaggcgcccggtgcactatgcggggcacgtgcgccccccagctctaatctgcgcgctgacaggagcatgatctgtgcccaggccagggctgccaaggaattgatgcgcgtacacgtggtgggtcattatgctgctgcacctgtgtagtgtgaagaatctgtaccagaacaggtttttaggcctggccgccatggcgtctccttctagaaactcccagagccgacgccggtgcaaggagccgctccgatacagctacaaccccgaccagttccacaacatggacctcaggggcggcccccacgatggcgtcaccattccccgctccaccagcgacactgacctggtcacctcggacagccgctccacgctcatggtcagcagctcctactattccatcgggcactctcaggacctggtcatccactgggacataaaggaggaagtggacgctggggactggattggcatgtacctcattgatgaggtcttgtccgaaaactttctggactataaaaaccgtggagtcaatggttctcatcggggccagatcatctggaagatcgatgccagctcgtactttgtggaacctgaaactaagatctgcttcaaatactaccatggagtgagtggggccctgcgagcaaccacccccagtgtcacggtcaaaaactcggcagctcctatttttaaaagcattggtgctgatgagaccgtccaaggacaaggaagtcggaggctgatcagcttctctctctcagatttccaagccatggggttgaagaaagggatgtttttcaacccagacccttatctgaagatttccattcagcctgggaaacacagcatcttccccgccctccctcaccatggacaggagaggagatccaagatcataggcaacaccgtgaaccccatctggcaggccgagcaattcagttttgtgtccttgcccactgacgtgctggaaattgaggtgaaggacaagtttgccaagagccgccccatcatcaagcgcttcttgggaaagctgtcgatgcccgttcaaagactcctggagagacacgccataggggatagggtggtcagctacacacttggccgcaggcttccaacagatcatgtgagtggacagctgcaattccgatttgagatcacttcctccatccacccagatgatgaggagatttccctgagtaccgagcctgagtcagcccaaattcaggacagccccatgaacaacctgatggaaagcggcagtggggaacctcggtctgaggcaccagagtcctctgagagctggaagccagagcagctgggtgagggcagtgtccccgatggtccagggaaccaaagcatagagctttccagaccagctgaggaagcagcagtcatcacggaggcaggagaccagggcatggtctctgtgggacctgaaggggctggggagctcctggcccaggtgcaaaaggacatccagcctgcccccagtgcagaagagctggccgagcagctggacctgggtgaggaggcatcagcactgctgctggaagacggtgaagccccagccagcaccaaggaggagcccttggaggaggaagcaacgacccagagccgggctggaagggaagaagaggagaaggagcaggaggaggagggagatgtgtctaccctggagcagggagagggcaggctgcagctgcgggcctcggtgaagagaaaaagcaggccctgctccttgcctgtgtccgagctggagacggtgatcgcgtcagcctgcggggaccccgagaccccgcggacacactacatccgcatccacaccctgctgcacagcatgccctccgcccagggcggcagcgcggcagaggaggaggacggcgcggaggaggagtccaccctcaaggactcctcggagaaggatgggctcagcgaggtggacacggtggccgctgacccgtctgccctggaagaggacagagaagagcccgagggggctactccaggcacggcgcaccctggccactccgggggccacttccccagcctggccaatggcgcggcccaggatggcgacacgcaccccagcaccgggagcgagagcgactccagccccaggcaaggcggggaccacagttgcgagggctgtgacgcgtcctgctgcagcccctcgtgctacagctcctcgtgctacagcacgtcctgctacagcagctcgtgctacagcgcctcgtgctacagcccctcctgctacaacggcaacaggttcgccagccacacgcgcttctcctccgtggacagcgccaagatctccgagagcacggtcttctcctcgcaagacgacgaggaggaggagaacagcgcgttcgagtcggtacccgactccatgcagagccctgagctggacccggagtccacgaacggcgctgggccgtggcaagacgagctggccgcccctagcgggcacgtggaaagaagcccggaaggtctggaatcccccgtggcaggtccaagcaatcggagagaagactgggaagctcgaattgacagccacgggcgggtcttttatgtggaccacgtgaaccgcacaaccacctggcagcgtccgacggcagcagccaccccggatggcatgcggagatcggggtccatccagcagatggagcaactcaacaggcggtatcaaaacattcagcgaaccattgcaacagagaggtccgaagaagattctggcagccaaagctgcgagcaagccccagcaggaggaggcggaggtggagggagtgactcagaagccgaatcttcccagtccagcttagatctaaggagagaagggtcactttctccagtgaactcacaaaaaatcaccttgctgctgcagtccccagcggtcaagttcatcaccaaccccgagttcttcactgtgctacatgccaattatagtgcctaccgagtcttcaccagtagcacctgcttaaagcacatgattctgaaagtccgacgggatgctcgcaattttgaacgctaccagcacaaccgggacttggtgaatttcatcaacatgttcgcagacactcggctggaactgccccggggctgggagatcaaaacggaccagcagggaaagtcttttttcgtggaccacaacagtcgagctaccactttcattgacccccgaatccctcttcagaacggtcgtcttcccaatcatctaactcaccgacagcacctccagaggctccgaagttacagcgctggagaggcctcagaagtttctagaaacagaggagcctctttactggccaggccaggacacagcttagtagctgctattcgaagccaacatcaacatgagtcattgccactggcatataatgacaagattgtggcatttcttcgccagccaaacatttttgaaatgctgcaagagcgtcagccaagcttagcaagaaaccacacactcagggagaaaatccattacattcggactgagggtaatcacgggcttgagaagttgtcctgtgatgcggatctggtcattttgctgagtctctttgaagaagagattatgtcctacgtccccctgcaggctgccttccaccctgggtatagcttctctccccgatgttcaccctgttcttcacctcagaactccccaggtttacagagagccagtgcaagagccccttccccctaccgaagagactttgaggccaagctccgcaatttctacagaaaactggaagccaaaggatttggtcagggtccggggaaaattaagctcattattcgccgggatcatttgttggagggaaccttcaatcaggtgatggcctattcgcggaaagagctccagcgaaacaagctctacgtcacctttgttggagaggagggcctggactacagtggcccctcgcgggagttcttcttccttctgtctcaggagctcttcaacccttactatggactctttgagtactcggcaaatgatacttacacggtgcagatcagccccatgtccgcatttgtagaaaaccatcttgagtggttcaggtttagcggtcgcatcctgggtctggctctgatccatcagtaccttcttgacgctttcttcacgaggcccttctacaaggcactcctgagactgccctgtgatttgagtgacctggaatatttggatgaggaattccaccagagtttgcagtggatgaaggacaacaacatcacagacatcttagacctcactttcactgttaatgaagaggtttttggacaggtcacggaaagggagttgaagtctggaggagccaacacacaggtgacggagaaaaacaagaaggagtacatcgagcgcatggtgaagtggcgggtggagcgcggcgtggtacagcagaccgaggcgctggtgcgcggcttctacgaggttgtagactcgaggctggtgtccgtgtttgatgccagggagctggagctggtgatagctggcaccgcggaaatcgacctaaatgactggcggaataacactgagtaccggggaggttaccacgatgggcatcttgtgatccgctggttctgggctgcggtggagcgcttcaataatgagcagaggctgagattactgcagtttgtcacgggaacatccagcgtgccctacgaaggcttcgcagccctccgtgggagcaatgggcttcggcgcttctgcatagagaaatgggggaaaattacttctctccccagggcacacacatgcttcaaccgactggatcttccaccgtatccctcgtactccatgttgtatgaaaagctgttaacagcagtagaggaaaccagcacctttggacttgagtgaggacatggaacctcgcctgacattttcctggccagtgacatcacccttcctgggatgatccccttttccctttcccttaatcaactctcctttgattttggtattccatgatttttattttcaaac

SEQ ID NO: 3593 - DNA, 1945 bp, Homo sapiens
  source 1..1945: mol_type = genomic DNA
atggatttaaaggggcagtaccggcaagagcggcagccacaccggcagattgcagaccgggcaaggtcccccaggccaggatgtcaggcctggtgttggggcagcgggatgagcctgcaggccaccggctcagccaagaggagatcctggggagcacacggctggtcagccaagggctagaggccctacgcagtgaacaccaggccgtgctgcaaagcctgtcccagaccattgagtgtctgcagcagggaggccatgaggaagggctggtgcatgagaaggcccggcagcttcgccgttctatggaaaacattgagctcgggctgagtgaggcccaggaggagaaagaaggcgatgccaccaaggattccctggatgacctctttcctaatgaggaggaagaggaccccagcaatggcttgtcccgtggtcaaggtgctacagcagctcagcagggtggatatgagatcccagcaaggttgcggacgttgcacaacctggtgatccagtacgcagcccaaggtcgctatgaggtggccgtgccactctgtaagcaggcactagaggacctggagcgcacatcaggccgtggccaccctgatgtcgccaccatgctcaacatccttgctttggtgtatcgtgaccagaataagtataaggaagctgcccacctgctgaatgatgcccttagcatccgggagagcaccttgggacctgaccatcctgctgtggctgccacactcaacaatttggctgtgctctatggcaaaaggggcaagtacaaggaggcagagcctctgtgccagcgggcactggagattcgagaaaaggtcctgggcacgaatcatccagatgtggcaaaacagctgaacaacctggccctcttgtgccaaaaccagggcaagtatgaggccgtggaacgctactaccagcgagcactggccatctacgaggggcagctggggccggacaaccctaatgtagcccggaccaagaacaacctggcttcctgttacctgaaacagggcaaatatgctgaggctgagacactatacaaagagatcctgacccgtgcccatgtacaggagtttgggtctgtggatgatgaccacaagcccatctggatgcatgcagaggagcgggaggaaatgagcaaaagccggcaccatgagggtgggacaccctatgctgagtatggaggctggtacaaggcctgcaaagtgagcagccccacagtgaacactactctgagaaacctgggagctctgtataggcgccagggaaagctggaggctgctgagaccctggaggaatgtgccctgcggtcccggagacagggcactgaccctatcagccagacgaaggtggcagagctgcttggggagagtgatggtagaaggacctcccaggagggccctggagacagtgtgaaattcgagggaggtgaagatgcttctgtggctgtggagtggtccggggatggcagtgggaccctgcagaggagtggctctcttggcaagatccgggatgtgctccgcagaagcagtgaactcttggtgaggaagctccaggggactgagcctcggccctccagcagcaacatgaagcgagcagcctccttgaactatctgaaccaacctagtgcagcacccctccaggtctcccggggcctcagtgccagcaccatggacctctcttcaagcagctgacattcaacccggcccccaggtctgctgggtccccccacccccacagccctcacagcattccccattgctcctggctcttccccacccctaggtgggacagtgaaggggagcagtttaaccagaagattgctgctgcccttagggtctcagctccctcctcaggaatccctcttaggaaggaccctcaggacaccctctctgcaccctgtggtcctctagagtagctagctctgagg

SEQ ID NO: 3594 - DNA, 1721 bp, Homo sapiens
  source 1..1721: mol_type = genomic DNA
gccctcgcgctgtcgccgccacagtctgcgacgggacccggcgtgcccatgtgtcaggtgggcgaggactacggggagccggcgcctgaggagccgcccccggcgccgcggcccagccgtgagcagaagtgtgtgaagtgcaaggaagcgcagcccgttgtggtgatacgagccggagatgccttctgcagggactgtttcaaggccttctacgtccacaagttcagagccatgctgggcaagaaccggctcatctttccaggcgagaaggtgctcttggcgtggtctggggggccttcgtccagctccatggtctggcaggttcttgagggcctgagccaagattctgccaaaagactgcgctttgtggcaggagtcatctttgttgacgagggagcagcctgtggccagagcctagaggagagatcaaagaccctggccgaagtgaagcccattctgcaagcaactgggttcccatggcatgtggtggccttagaggaggtgttcagcctgccaccgtcggtgctttggtgctctgcccaggagctggtgggatccgagggggcctacaaggcggccgtggacagcttcctccagcagcagcatgtgctgggggccgggggtggtcctggcccgactcaaggggaggaacagccaccccagcccccgctggacccccagaacctggcaagaccgcctgcccctgcccagactgaggctctttcccaactgttctgctcagtgaggacactgactgccaaggaggagcttctgcagaccctgcggacccacctgatcctccacatggcccgagcccacggctactccaaggtcatgactggggacagctgcacacgcttggctatcaagctcatgaccaacctggcgctgggtcgaggggccttcctggcctgggatacgggcttctcggatgagcggcacggggacgtggtggtggtgcggcccatgcgggaccacaccctgaaggaggtcgctttctacaaccgcctgttctccgttccttctgtcttcacaccagccgtcgacaccaaggcccctgaaaaggccagcatccaccggctgatggaggccttcatcctcaggctgcagacccagttcccctccactgtcagcactgtgtacaggacaagtgagaagctggtgaagggcccccgggatggccctgctgctggcgactccggcccccgctgcctcctctgcatgtgtgccctggacgtcgacgccgctgacagtgccacggcttttggggctcagacctcctcgcgtctctcccagatgcagtcacccatccccctgactgagacccggacacccccggggccctgctgttctccaggggtgggctgggcccagcgctgtggccagggggcctgcaggagggaggacccccaagcctgcattgaggagcagctgtgctacagctgccgcgtgaacatgaaggacttgccctcactggaccccctgccgccgtacatcctggctgaggcccagctccgcacacagagggcctggggcttgcaggagatccgggactgtctgattgaggacagtgacgacgaggcgggccagagctgagcgtgaggacgtgcttgccgggacagcaggcagtggccacctggtacaccacactggagccggaaggcaaggacgggggactggcctctgattgtccatttgtataaataaaacattttttaatt

SEQ ID NO: 3595 - DNA, 2818 bp, Homo sapiens
  source 1..2818: mol_type = genomic DNA
cattgagtaggttcttggggattggggtcgggtcctccccagtgagaggcgacaggagctcactgcctctcgggccctcacaatcacacctgtcacaggtatacacgctgccactcacaaacacacgcttgcactcccagcctcactgacacgctgccatacagccgctcacagccagccagacactgctgcacctgagagcaggtggccgcgggtcttctcccttcactctccacatttggggatcaggtccggcacctgctgcgccagacaggccttgctgggcacgcgcctctgagagtccaaggaggtggcttccagagctgcagcacttcaggccggctccggtggagcgatcagaggtgaggggcttggctgggcatgtttaagcgcacagtgctctcctgcccacccccagcagcacccccactgcaggcccgaggagctttccggagcttcccacactcctggggagaagacttcttagccagcttgatgtttaaaattcagctggagcccttaaaacttcgagcgtggacgctgaatgggtttgtaaagtttcgaaacaaggagaccagtgctggtccagtggctgtgatgggaaaagattattacaagattcttgggatcccatcgggggccaacgaggatgagatcaagaaagcctaccggaagatggccttgaagtaccacccagacaagaataaagaacccaacgctgaggagaagtttaaggagattgcagaggcctatgatgtgctaagtgaccccaagaaacggggcctgtatgaccagtatggggaggaaggcctgaagaccggcggtggcacatcaggtggctccagtggctcctttcactacacctttcatggggacccccatgccacctttgcctccttctttggtggctccaaccccttcgatatcttctttgccagcagccgctccactcggcccttcagtggctttgacccagatgacatggatgtggatgaagatgaggacccatttggcgctttcggccgttttggcttcaatgggctgagtaggggtccaaggcgagccccagaaccactgtaccctcggcgcaaggtgcaggaccccccagtggtgcacgagctgcgggtgtccctggaggagatctaccatggctccaccaagcgcatgaagatcacaaggcgtcgcctcaaccctgatgggcgaactgtgcgcaccgaggacaagatcctgcacatagtcatcaagcgtggctggaaggaaggcaccaagatcaccttccccaaagaaggcgacgccacacctgacaacatccctgctgacatcgtctttgtgctcaaagacaagccccatgcacacttccgccgagatggcaccaacgtgctctacagtgccctgatcagcctcaaggaggcgctgtgtggctgcactgtgaacattcccactatcgacggccgagtgatccctttgccctgcaatgatgtcatcaagccaggcaccgtgaagagactccgtggggagggccttcccttccccaaagtgccaactcagcgaggagacctcattgttgagttcaaagttcgcttcccagacagattaacaccacagacaagacagatccttaagcagcacctaccctgttcctaggctctgccccagccagtccagagcctaccacagcaatacccccaacactcactccactcaatgtgcacccagcttgatgtccactggacactggcaactttttctaaaatgcaaaaaaaagccactggttttcaggaaaatgttcctgtccctgaccccttttagagctgggctgcctggggggagtgggagggaggtggggagagctagcccaggccaggggtcaatgttcatgtcactagctttcaatccagtttccactgcagtggctggagagtgacctgagtgctacttgaagatatgtagagattccttatccatgcctgtacatagcatgtcctcctcccctcagctttgctaataccagtcccctcccttccctttggcttcctgctgttgggggtggaaaagactagaaaggacattgctttctcagccccacccccaggtccacagtgtccaaggtaatggcacacatattcatgcacaagaagcactcacctagagctgtctgtgcctctctgggagaaaggagagaggataagaagggaaagttcacaacctgtgaacagggacttgagcacgagacacttttcatctggagcaggggggtgagctcctcagcagcctccgtaacagctgccctgcctacacctgcagagctggaggttctgtcctccctgctgctctcaggagtgttcaagggtggagggcagggaatggggcctgaggtattaaggctaagaggtgggggacagggcccatctaccagccttcatcaggaagggaaagggctttggggtcaggtggcagctattccccaccaagagattcagggtcacaggtttttccccacacctctgaactcagggcctagccacccccaaacttccaaatcccacttttgtgatatgtgaagctactcatttcttacccttggaggctgtgtggggaatttccagcccttttatgcctgtgtgatcccaccccacccccatagttgtataaaggtcatagtgaagaagctgggggaagactgcttcagccagatcctggggtggggtctttaggttttctcactttgacaacccccgaatgtttttatagtagtttttttgtatttttttgtaatgacagtattatgtaaaaaataaagtattttaaaaatatggca

SEQ ID NO: 3596 - DNA, 9444 bp, Homo sapiens
  source 1..9444: mol_type = genomic DNA
gtgctgtggcggcggcggcggcggtagtggcggcggcggcggtgcctgggcggcagcagcagcagtagcggcagccctgaggacggtgagacggccgcggcggcggcgacagcgcggaagtcgcgcgggacccagagcttcccccctgtcgctagtgctgaggctttcgcctttcctacccagcttcttgctcacggcccgggctgggctgggcagggcaacgcgcccccggggaggggcggagctgtagatatggtgtaagatacttcttcaagattggacagctggggaccttcttctgattaaccttaaaccaacttgtagccatagagacacctcacaaggttcccatttttgttgttgttgttgttgattttctgctcacacctttcctgaccttgcaaccatgtatggaagtgcccgctctgttgggaaggtggagccgagcagccagagccctgggcgttcacccaggcttccacgttcccctcgcttgggtcaccgtcgaaccaacagtacgggagggagttcgggaagcagtgttggaggtggcagtgggaaaaccctttcaatggaaaatatacaatctttaaatgctgcctatgccacctctggccctatgtatctaagtgaccatgaaaatgtgggttcagaaacacctaaaagcaccatgacacttggccgttctgggggacgtctgccttacggtgttcggatgactgctatgggtagtagccccaatatagctagcagtggggttgctagtgacaccatagcatttggagagcatcacctccctcctgtgagtatggcatccactgtacctcactcccttcgtcaggcgagagataacacaatcatggatctgcagacacagctgaaggaagtattaagagaaaatgatctcttgcggaaggatgtggaagtaaaggagagcaaattgagttcttcaatgaatagcatcaagaccttctggagcccagagctgaagaaggaacgagccctgagaaaagatgaagcttccaaaatcaccatttggaaggaacagtacagagttgtacaggaggaaaaccagcacatgcagatgacaatccaggctctccaggatgaattgcggatccagagggacctgaatcagctgtttcagcaggatagtagcagcaggactggcgaaccttgtgtagcagagctgacagaggagaactttcagaggcttcatgctgagcatgagcggcaggccaaagagctgtttcttcttcgaaagacattggaggaaatggagctgcgtattgagactcaaaagcagaccctaaatgctcgggatgaatccattaagaagcttctggaaatgttgcagagcaaaggactttctgccaaggctaccgaggaagaccatgagagaacaagacgactggcagaggcagagatgcacgttcatcacctagaaagccttttggagcagaaggaaaaagagaacagtatgttgagagaggagatgcatcgaaggtttgagaatgctcctgattctgccaaaacaaaagctctgcaaactgttattgagatgaaggattcaaaaatttcctctatggagcgtgggcttcgagacctggaagaggaaattcagatgctgaaatcgaatggtgctttgagtactgaggaaagggaagaagaaatgaagcaaatggaagtgtatcggagccattctaaatttatgaaaaataagattggccaggtgaaacaggagctgtccagaaaggacacagaactactcgccctgcagacaaagctagaaacactcacaaaccagttctcagatagtaaacagcacattgaagtgttgaaggagtccttgactgctaaggagcagagggctgccatcctgcagactgaggtggatgctctccgattgcgtttggaagagaaggaaaccatgttgaataaaaagacaaaacaaattcaggatatggctgaagagaaggggacacaagctggagagatacatgacctcaaggacatgttggatgtgaaggagcggaaggttaatgttcttcagaagaagattgaaaatcttcaagagcagcttagagacaaggaaaagcagatgagcagcttgaaagaacgggtcaaatccttgcaggctgacaccaccaacactgacactgccttgacaactttggaggaggcccttgcagagaaagagcggacaattgaacgcttaaaggagcagagggacagagatgagcgagagaagcaagaggaaattgataactacaaaaaagatcttaaagacttgaaggaaaaagtcagcctgttgcaaggcgacctttcagagaaagaggcttcacttttggatctgaaagagcatgcttcttctctggcatcctcaggactgaaaaaggactcacggcttaagacactagagattgctttggagcagaagaaggaggagtgtctgaaaatggaatcacaattgaaaaaggcacatgaggcagcattggaagccagagccagtccagagatgagtgaccgaatacagcacttggagagagagatcaccaggtacaaagatgaatctagcaaggcccaggcagaagttgatcgactcttagaaatcttgaaggaggtggaaaatgagaagaatgacaaagataagaagatagctgagttggaaagccttttttctaggcaagtgaaagaccagaataagaaggtagcaaatctgaagcacaaggaacaggtggaaaaaaagaagagtgcacaaatgttagaggaggcgcgacgacgggaggacaatctcaacgacagctctcagcagctacaggacagtctccgtaagaaggatgacaggattgaagagctggaagaagcactaagagaaagtgtacagataactgcagagcgggaaatggtgctagcacaagaggaatcagccaggaccaatgctgaaaaacaggtggaggagttactgatggccatggagaaggtaaagcaggaactagaatccatgaaagcaaagctgtcctccacccagcagtctctggcagaaaaggaaactcacttgactaatcttcgggcagagagaaggaaacacttagaggaagttctggagatgaagcaagaagctcttctggctgccattagtgaaaaagacgccaatatagctctcttggagctttcgtcctctaagaagaagacccaagaggaagtggctgccctgaagcgggagaaggatcgtctggtacagcagcttaagcagcagacgcaaaatcgaatgaagctaatggccgacaactacgaggatgaccacttcaaatcctcccattccaatcaaacaaatcacaagccctccccagaccaggatgaggaggagggtatatgggcatagccaatcagaggcttagttcagccattttgttcagaacgatcatccagcccctcttagaacttgaccaaaatagaagtaaattaaagttgtacattggacacctgacaaccctctgccatgaccgagaccccctgatcctccgtggactcactccaccagcttcctataacttggacgatgaccaggcggcttgggagaatgagctgcagaagatgacccgggggcagcttcaggatgagttagagaaaggtgaacgggacaatgcagaactgcaggagtttgccaacgccattcttcagcagatagcagaccattgtcccgacatcctagagcaagtggtcaacgccctggaagagtcctcttgaccctgctttatggggaagcctgaggtagtcaacccaggagccaagaaaagagaactacgaggaacaggtgcccggaaccttcttggcaccaaacactacaaacttcatcccaacttgctcacttgaagaagtgtgattccagcaccgtttctacatctgccatcttactctgcctttctgctttggatgtggtctctacactaaccttcttgatgtccagggtagataaagggtcgaatctctctgaagaactgccacctggtcatcagcagtggagaactgtgggagctggtggctctgccctgacagagagccatggagcagaggagcctctcacctcctgtcctctgacatgagaatgaaaccaggaatggacttggagttcaacaggctgagaggatgcctccaatggaccagagagctgagtgttctaatatcacaataggtgctttctcctaaaagggcaaaaaacaatctcaaaaagattagaaaaagagaaggggggaagggaagagaaaatcgactcttctttttactgtctcttctgcttactttccacatgagatgctttgtaccggggagctgtgagcaggcctcacgatggcttgggagcactcgttctcccaaggtctgagtcttcatccagccctgcctgtctgtcgcagccttcctcactctgttcctcggccagttaacaagaagatggtgtgaggtgttctccaccagtctctcctgtttgagactgttgacgttatcatactgaggtgttagatcaaatatctctaattgaagaacatgtgaggttgaaagagcaccagccagggcaacatagcgtgaccctgtctctacaaaaaattaaaaagagaacatacaaagttgacatatgagaccctgttgtccccgcctgcagctttgccccagtaacagatgcccgttgctcttgggctggtttcccctgaacacctccaagaggctgcctgccttgccagcacccgtgtcctgagctcctgcagcccagtggctgctgaagttgtgatccctcactcaccctgctagctttgcccttgactcgtcttctctgaacctcagcctcgtgcattgcctggaaccttcttctagcataaatgaaggtttttcctcctacacacattccttcctcggttatttcattcagagaatatttatgaaatgcctactgtgtgcaagtcatccatccttgaaaaggccacttctcagtgagggagagatgtagtggattctgtgagacatacctgctggagttgaagcagtaaatagcatgtccttcccctccccgatcttaaggtgtgttttctagaaaagttccctaatggaattcatgagtttgggggtctcagtcacccgcttgcctgtaggattccatttgatgattctggatttttgctgtttgttattgcccttagaggggctctgagtatctacttgtgggtggccatttcctgacatctgcatgtacctcgtggaattcagccagcttcatgttgcaaatcagaaagctgaccccaagactgcaaatcaatgaaggtattggcattgttaaggacgtagcgtagacaacagcagtcataaataattaggcaggaacttaacccaaatctagttctttgaccacctctaccaccagaacccagcagacactcacatctcctgataagagttgctggactcgatgtttttgttttgcattttctcctctccttccccacttactcagagaatttaaagtctgtagagtcagcacagccccatcagtccaggaacttcccaccaccagcccttgactgtcccattaactgacatggtcagatttccagctccccctactccctgctgtgaaacaatccctctccctgtgagaggaaactgtggagcgtttcttatcgaaggttaaatggactctgctcataaacctcttactgagatgcttcctgatagccaggctggccagagaggggtgcaggggttagatagtaagtggtggtcgtttgtggtcagttacctcaattctgttcattgcagtgcccgtaaaccatgtagaaagctcccagcactgaaaggcaggagtgttagcatctcgctttatccaccataacgtaaagaactgcggtgtgataacagccttcacggggccacggtggaaccaagacagcaggcgaggccatgcctaaacaagtggtctggcacgggcactggccagctgctctctccaagcaggtggcccagatcccacccacgtggactttctcatcaggtgcagcgcctgccactctcagccactgggtgtgtcactctcctcttcatctcagcattctccatcacttcccctccagaaaaacggatggaaggaagccctctgtgacactgcttctgagaagaagcatttccgggaccgatatcatctgtctggtctctgtgaacagcaaggaatcttcttgaccgttcttgggcactggaggctggctaggagttcagtaataaacgtggccttcgtgctgtagggcagagtggatgcagtttgtagctttcagagtgtctcattgagtctagatcattgaaccaacacttaaccaaatgtcccactcccatcacactaggacttgtcattccatgcccctctcctagtggtcatggtttcatatgggcatacaactgctactgaagttatatagccttgaaaactcagtgcaggttgcccttaattttccccaaacccctccatcggcaagtctagttgccctttagcacctaaagatctgcaccccaaaccaatgtcaccataaagagggcacgaagaagagtgggtgtgatcccaacggggttttgtaactgaagaagcccagtgtgagcttctcatcttttcatatacctctaacccccggtactcattgaatcattgatgaggtatctcaattgagatttgcaaggactttgataccatttgaaatggaaaaattttgaacgggctttaacatgtttaagaaatatggatggggccggccacagtggctcacgcctgtaatcccagaactctggaaggctgaggcaggcggatcacctgagatcaggagttcgaggccagcctggccaagatggcaaaaaccccgactctactaaaaatacaaaattagccaggcgtggtggcgtacgcctgtaatcccagctactcaggaggcaggagaatcgcttgagcctgggaggcagaggctgcggtgagccgagatcgtgtcactgcactccagcctgggtgacagagactccatttaaaaaaaaaaaaaaaaaatatatatatatatatatatatatatatatggatgggaatcaccaaattcatctcagctctaaccttttaacctttgtccttgcactttacaatctaaagatctacctgtggctctcagacttcctcacacttgggttttagaaataacttgtaaagcagactggacccaaggccgccttcagtgtcaagaagggcattgtgacttgcccctcaatttctgtccattgaagtctggttttccatgaggaacttgcgggctcacccacccccagagtgagagaagaggaaggcgaagtcatcacagacacggtcttagccacctgctgaactaatccctccgctattgagggtcagggttgtgaggcaaccatcatgtgtcaccccaaaatataaatgtttctgagccgcccatccactggcatttggatttgctgccagagtcctgttcctcccagaaccatcccgccctcctgttgaccatgttacttgagtgtaggcccggtgtcaagaccctcagagtctttgaggaaagagccaagcagagaagaccgctgcgtggagtgtgacaccacatggcatttctcaagcccagcggaccctgtgtcagcaaataccagtaatttaacatctgctcctggcctcctcttcacctgcctgggttcggaactgaggaggaaggatgagaagagactgcaatgcagcaggcaccctctgcagagtgaggccgcccgtccatcactgccagccctgggctgctcaggaggggacgtgaaccactcaaaggaatgtcttaaagaggatctggagtttcccccatgcaaattagggaagaattaggcaagaaaagacatacattacagggaaatccttctgaacaaaatggctgtcttcacctactcttcttgcaagaaaagacatacattacagggaaatccttctgaacaaaatggctatcttcacctactcttcagcaaaaaccgtctccagactttttagtgtcaaaaatgtaaccaactgtctcctgattttttccaatgtgtttggcaagtgctgtggccctgttgtaggtacttctcctgactcttgggggagaagtggttttagggattgatttgggggagcgggtttttgtcccatcccacctcctctcttctttctctgcttgtcgatattgtctgtgtgattcagagaattggggcagttacattgtgtctgttgttgagattattaaaagattaaaacgtagttgtagaaatgaaaaattaaacagctgtgttttaaaaatgcaaaccaatatcttgttaataaaggaattcaagctatggggcagccacactcccctcctcccaggctggcataggtggccctgggctggcggcttaggaagcatggagcacacttagggtagtgcctgcctgggcaagagacacctgccgagcaaaaggaacgagaatctggggctcagagcctcgcagttgtgccaggattttcctatacatgttcaggacctctgggtagaggtttcacagtttgtgaccccataaccaccctcacccgacgtgggttctagctcagtgtgcctaatactgcatggtaacctgggcttgaccctgaagcccctgcctggcaggccacaggacctctcctgcccacttggtgctatctcttccagtgaccacccagcacgggtgagcactggccagcctggagcctgcaatccaggtggaacagactgtcctccatgtcagttccttctggcttcaggccctcaattatttccctttgagcttttttagaccctagatctcctaggcccaggctctctcttgaccccagagaagccactgtcaggaaaggaagtgaaccctactgaagccagagaattcaccccggccaaagcaggccctctgggtccagcccctcattccacaccacgccagtattgcatccatctactgcagctacacatcctgagggcagcaccacccactctggcctgctggcccatcgcaggactagcccaggcacctgccgggcattgcaggatatccagtggggcctgtgactgctccctgatgcgtcagaagagaagtgttgcactttagtggaggagctgaggagcacctgcccccttgtagcttgagttccttttggtaacagtagcagcctccatggtggtgtctgggatgcacgtgcacccgctgccttcagctgtatgtgtgtgttcctgctggagttgtgttactgacaggataatgacattacaaagaaattgtgttatattcaactttgccttgataattattgtaaacactttgttcattttttcttttttattcacaaactaaatccaccaggaaattataaagttattt

SEQ ID NO: 3597 - DNA, 716 bp, Homo sapiens
  source 1..716: mol_type = genomic DNA
aaagggtctgtccttcctgggattcctagccgaggccagtctgctgccgtgtgcgtgtgcgtcagggctctccgggcggcaatgggggcttgagagccgggtccccagcgccgggaagggagcgcggtggccgccaccgccaccgccccggagtccggcgccgaagctgcgggcgggcgggcgggcaccagctcggtcaggggctgcttggcgcggcactgtgcggtgcagcggcggcgcggcgcggtgcgggcttttcccaggcgccccggggtcgggtggccaacggcgcggccgcgggcgctgagcgcgaccggttcgcggtagcggtggcggcggcgtgcgtgccaggggctgggggctccgccgcctctcttgcggctcaccgagctccgcgcttccctctctccagggcaggcggcttctcagagttttcaggtggcgaaactgactggtctggttagagcgcgtccaagccaagccgcagtgctgtttggatttttaaatttctccttctgagtgagaaaatagcaatcgagatggaaccatccgcacaacagctccagctggcagcatcacttcccgccaatttatccaacttctgccaaggctctgaaatgccaacaacgtcgaggcctgcacttgatgtcaagggtggcacctcacctgcgaaggaggatgccaaccaagagatgagctccgtggcctactccaac

SEQ ID NO: 3598 - DNA, 7006 bp, Homo sapiens
  source 1..7006: mol_type = genomic DNA
gttttgatgaacacctggctttattcttgcaatgaagaaaggttctcaacaaaaaatattctccaaagcaaagataccatcatcatctcactctcctatcccatcatctatgtccaatatgagatctaggtcactttcacctttgattggatcagagactctaccttttcattctggaggacagtggtgtgagcaagttgagattgcagatgaaaacaatatgcttttggactatcaagaccataaaggagctgattcacatgcaggagttagatatattacagaggccctcattaaaaaacttactaaacaggataatttggctttgataaaatctctgaacctttcactttctaaagacggtggcaagaaatttaagtatattgagaatttggaaaaatgtgttaaacttgaagtactgaatctcagctataatctaatagggaagattgaaaagttggacaagctgttaaaattacgtgaactcaacttatcatataacaaaatcagcaaaattgaaggcatagaaaatatgtgtaatctgcaaaagcttaaccttgcaggaaatgaaattgagcatattccagtatggttagggaagaagttaaaatctttgcgagtcctcaatttgaaaggcaacaagatatcatcgctccaagatataagcaagttgaaaccgcttcaagatttgatttctctgatcctagttgaaaatccagttgtgacccttcctcattacctccagtttaccattttccacctccgttcattggaaagtttggaaggtcagccagtaaccactcaggatagacaggaggcttttgagagattcagtttagaagaggtagaaagactggaaagagacctagaaaaaaagatgatagaaactgaagagcttaagagcaaacaaacaaggttccttgaggaaattaaaaatcaagataaattgaataaatcattaaaagaggaggccatgttacagaaacagagctgtgaggaactcaagagtgacttaaacacaaaaaatgaattgctaaaacagaagaccatagaattaacacgagcatgtcagaagcaatatgagctggaacaggaattggccttttataaaattgatgctaaatttgagccactaaattattatccatcagagtatgctgaaattgataaagccccagatgaaagcccttacattggcaaatccagatacaagagaaatatgtttgccacagagagttatattattgacagtgctcaggcagtacagatcaagaagatggagccagatgaacaacttagaaatgatcacatgaacttgagaggccacacaccactggacacgcaactggaagacaaagaaaaaaaaataagtgcagcacaaactcgactatcagaactgcatgatgaaatagaaaaggcagaacaacaaattttgagagctactgaagaatttaaacaactggaagaagctatacaactaaaaaagatttcagaagcagggaaagaccttctttacaagcagttgagtggtagactacaacttgtaaataaattacgccaggaagctctggatctagaactgcagatggaaaagcaaaagcaggaaattgccggaaagcagaaggagattaaggacctgcaaatagccatagatagcctggattccaaagacccaaaacattcccatatgaaggctcaaaagagcggtaaagaacaacagcttgacattatgaacaagcagtaccaacaacttgaaagtcgtttggatgagatactttctagaattgctaaggaaacggaagagattaaggaccttgaagaacagcttactgaaggccagatagcagcaaatgaagccctgaagaaggatttagaaggtgttatcagtgggttgcaagaatacctggggaccattaaaggccaggcaactcaggcccagaatgagtgcaggaagctgcgggatgagaaagagacattgttgcagagattgacagaagtcgagcaggagagagaccagctggaaatagttgccatggatgcagaaaatatgaggaaggagcttgcagagctagaaagtgccctccaagagcagcatgaggtgaatgcatctttgcagcagacccagggagatctcagtgcctatgaagctgagctagaggctcggctaaacctaagggatgctgaagccaaccagctcaaggaagagttggaaaaagtaacaagacttacccagttagaacaatcagcccttcaagcagaacttgagaaggaaaggcaagccctcaagaatgcccttggaaaagcccagttctcagaagaaaaggagcaagagaacagtgagctccatgcaaaacttaaacacttgcaggatgacaataatctgttaaaacagcaacttaaagatttccagaatcaccttaaccatgtggttgatggtttggttcgtccagaagaagtggcagctcgtgtggatgagctaagaagaaaactgaaattaggaactggggaaatgaacatccatagtccttcagatgtcttagggaaaagtcttgctgatttacagaaacaattcagtgaaattcttgcacgctccaagtgggaaagagatgaagcacaagttagagagagaaaactccaagaagaaatggctctgcagcaagagaaactggcaactggacaagaagagttcaggcaggcctgtgagagagccctggaagcaagaatgaattttgataagaggcaacatgaagcaagaatccagcaaatggagaatgaaattcactatttgcaagaaaatctaaaaagtatggaggaaatccaaggccttacagatctccaacttcaggaagctgatgaagagaaggagagaattctggcccaactccgagagttagagaaaaagaagaaacttgaagatgccaaatctcaggagcaagtttttggtttagataaagaactgaagaaactaaagaaagccgtggccacctctgataagctagccacagctgagctcaccattgccaaagaccagctgaagtcccttcatggaactgttatgaaaattaaccaggagcgagcagaggagttgcaggaagcagagaggttcagcagaaaggcagcacaagcagccagagatctcacccgagcagaagctgagatcgaactcctgcagaatctcctcaggcagaagggggagcagtttcgacttgagatggagaaaacaggtgtaggtactggagcaaactcacaggtcctagaaattgagaaactgaatgagacaatggaacgacaaaggacagagattgcaaggctgcagaatgtactagacctcactggaagtgacaacaaaggaggctttgaaaatgttttagaagaaattgctgaacttcgacgtgaagtttcttatcagaatgattacataagcagcatggcagatcctttcaaaagacgaggctattggtactttatgccaccaccaccatcatcaaaagtttccagccatagttcccaggccaccaaggactctggtgttggccttaagtactcagcctcaactcctgttagaaaaccacgccctgggcagcaggatgggaaggaaggcagtcaacctccccctgcctcaggatactgggtttattctcccatcaggagtgggttacataaactgtttccaagtagagatgcagacagtggaggagatagtcaggaagagagtgagctggatgaccaagaagaacccccatttgtgcctcctcctggatacatgatgtatactgtgcttcctgatggttctcctgtaccccagggcatggccctgtatgcaccacctcctcccttgccaaacaatagccgacctctcacccctggcactgttgtttatggcccacctcctgctggggcccccatggtgtatgggcctccaccccccaacttctccatccccttcatccctatgggtgtgctgcattgcaacgtccctgaacaccataacttagagaatgaagtttctagattagaagacataatgcagcatttaaaatcaaagaagcgggaagaaaggtggatgagagcatccaagcggcagtcggagaaagaaatggaagaactgcatcataatattgatgatcttttgcaagagaagaaaagcttagagtgtgaagtagaagaattacatagaactgtccagaaacgtcaacagcaaaaggacttcattgatggaaatgttgagagtcttatgactgaactagaaatagaaaaatcactcaaacatcatgaagatattgtagatgaaattgagtgcattgagaagactcttctgaaacgtcgctcagagctcagggaagctgaccgactcctggcagaggctgagagtgaactttcatgcactaaagaaaagacaaaaaatgctgttgaaaagttcactgatgccaagagaagtttattgcaaactgagtcagatgctgaggaattagaaaggagagctcaggaaactgctgttaacctcgtcaaagctgatcagcagctaagatcgctccaggctgatgcaaaggatttggagcagcacaaaatcaagcaagaagaaatcttgaaagaaataaacaaaattgtagcagcaaaagactcagacttccaatgtttaagcaagaagaaggaaaaactgacagaagagcttcagaaactacagaaagacatagagatggcagaacgcaatgaggatcaccacctgcaggtccttaaagaatctgaggtgcttcttcaggccaaaagagccgagctggaaaagctgaaaagccaggtgacaagtcagcagcaggagatggctgtcttggacaggcagttagggcataaaaaggaggagctgcatctactccaaggaagcatggtccaggcaaaagctgacctccaggaagctctgagactgggagagactgaagtaactgagaagtgcaatcacattagggaagtaaaatctcttctggaagaactgagttttcagaaaggagaactaaatgttcagattagtgaaagaaaaactcaacttacacttataaagcaggaaattgaaaaagaggaagaaaatcttcaggttgttttaaggcagatgtctaaacataaaaccgaactaaagaatattctggacatgttgcaacttgaaaaccatgagctacaaggtttgaagctacaacatgaccaaagggtatctgaattagagaagactcaggtggcagtgctagaggagaaactggagttagagaatttgcagcagatatcccagcagcagaaaggggaaatagagtggcagaagcagctccttgagagggataaacgagaaatagaacgaatgactgctgagtcccgagctttacaatcgtgtgttgagtgtttgagcaaagaaaaggaagatctccaagagaaatgtgacatttgggaaaaaaagttggcacaaaccaaaagggttttagcagcagcagaagaaaatagcaaaatggagcaatcaaacttagaaaagttggaattgaatgtcagaaaactgcagcaggaactagaccaactaaacagagacaagttgtcactgcataacgacatttcagcaatgcaacagcagctccaagaaaaacgagaagcagtaaactcactgcaggaggaactagctaatgtccaagaccatttgaacctagcaaaacaggacctgcttcacaccaccaagcatcaggatgtgttgctcagtgagcagacccgactccagaaggacatcagtgaatgggcaaataggtttgaagactgtcagaaagaagaggagacaaaacaacaacaacttcaagtgcttcagaatgagattgaagaaaacaagctcaaactagtccaacaagaaatgatgtttcagagactccagaaagagagagaaagtgaagaaagcaaattagaaaccagtaaagtgacactgaaggagcaacagcaccagctggaaaaggaattaacagaccagaaaagcaaactggaccaagtgctctcaaaggtgctggcagctgaagagcgtgttaggactctgcaggaagaggagaggtggtgtgagagcctggagaagacactctcccaaactaaacggcagctttcagaaagggagcagcaattggtggagaaatcaggtgagctgttggccctccagaaagaggcagattctatgagggcagacttcagccttctgcggaaccagttcttgacagaaagaaagaaagctgagaagcaggtggccagcctgaaggaagcacttaagatccagcggagccagctggagaaaaaccttcttgagcaaaaacaggagaacagctgcatacaaaaggaaatggcaacaattgaactggtagcccaggacaaccatgagcgggccaggcgcctgatgaaggagctcaaccagatgcagtatgagtacacggagctcaagaaacagatggcaaaccaaaaagatttggagagaagacaaatggaaatcagtgatgcaatgaggacacttaaatctgaggtgaaggatgaaatcagaaccagcttgaagaatcttaatcagtttcttccagaactaccagcagatctagaagctattttggaaagaaacgaaaacctagaaggagaattggaaagcttgaaagagaaccttccatttaccatgaatgagggaccttttgaagaaaaactgaacttttcccaagttcacataatggatgaacactggcgtggagaagcactccgggagaaactgcgtcaccgggaagaccgactcaaggcccaactccgacactgtatgtccaagcaagcagaagtattaattaaaggaaagcggcagacagagggcactttacacagtttgaggagacaagtagatgctttaggggaattggtcaccagcacctctgcagattcagcgtcatcacccagtctgtctcagctggagtcttccctcacagaggactctcaacttggacaaaatcagaaacaaaacaatagcctgagg

SEQ ID NO: 3599 - DNA, 1268 bp, Homo sapiens
  source 1..1268: mol_type = genomic DNA
ggtgaaaggtgaggggaacagctgatccgtctgttgggaggacagatatctcaaggccaggatggaagaatcaccactaagccgggcaccatcccgtggtggagtcaactttctcaatgtagcccggacctacatccccaacaccaaggtggaatgtcactacacccttcccccaggcaccatgcccagtgccagtgactggattggcatcttcaagccagctacctgcccaaaccaggagctcagctctaccagttccgatatgtgaaccgccagggccaggtgtgtgggcagagcccccctttccagttccgagagccaaggcccatggatgaactggtgaccctggaggaggctgatgggggctctgacatcctgctggttgtccccaaggcaactgtgttacagaaccagctcgatgagagccagcaagaacggaatgacctgatgcagctgaagctacagctggagggacaggtgacagagctgaggagccgagtgcaggagctcgagagggctctggcaactgccaggcaggagcacacggagctgatggaacagtacaaggggatttcccggtcccatggggagatcacagaagagagggacatcctgagccggcaacagggagaccatgtggcacgcatcctggagctagaggatgacatccagaccatcagtgagaaagtgctgacgaaggaagtggagctggacaggcttagagacacagtgaaggccctgactcgggaacaagagaagctccttgggcaactgaaagaagtacaagcagacaaggagcaaagtgaggctgagctccaagtggcacaacaggagaaccatcacttaaatttggacctgaaggaggcgaagagctggcaagaggagcagagtgctcaggctcagcgactgaaagacaaggtggcccagatgaaggacaccctaggccaggcccagcagcgggtgaggccgagctggagcccttgaaggagcagcttcgaggggcccaggagcttgcagcctcaagccagcagaaagccacccttcttggggaggagttggccagtgcagcagcagccagggaccgcaccatagccgaactacaccgcagccgcctggaagtggctgaagttaacggcaggctggctgagctcggtttgcacttgaaggaagaaaaatgccaatggagcaaggagcgggcagggctgctgcagagtgtggaggcagagaaggacaagatcctgaagctgagtgcagagatacttcgattg

SEQ ID NO: 3600 - DNA, 1036 bp, Homo sapiens
  source 1..1036: mol_type = genomic DNA
atgaagaaaccgaggcccgcggctgccgcgccctctccccgccctccagcctgctcgcggggcgcccatcctgggaccgcatccgagctccgggttcccgctctaagacggggaggctgcggcgaccgcaggctcagggaggaagccgctcctgaacaggcggctgcggggccgcgcagatccaccgtgggcgccctgctggcatctgagctgggatggaaattctatgatgctgatgattatcacccggaggaaaatcgaaggaagatgggaaaaggcataccgctcaatgaccaggaccggattccatggctctgtaacttgcatgacattttactaagagatgtagcctcgggacagcgtgtggttctagcctgttcagccctgaagaaaacgtacagagacatattaacacaaggaaaagatggtgtagctctgaagtgtgaggagtcgggaaaggaagcaaagcaggctgagatgcagctcctggtggtccatctgagcgggtcgtttgaggtcatctctggacgcttactcaaaagagagggacattttatgccccctgaattattgcagtcccagtttgagactctggagcccccagcagctccagaaaactttatccaaataagtgtggacaaaaatgtttcagagataattgctacaattatggaaaccctaaaaatgaaatgacaatgattttgtatcagtggtccaaacagaactaagcataaatcattgtgccatcccaaacctcgttccagccgccttgcccatactagattctaaatgtttctaaaggcaaaccccaatgtgtcaagacagacttgtttaggtgtaattttaggaattatgctggttcatcaggaagcagagggggagttttaaaagtcaagcttaaattgaagtttaaattcatctataaccaaatcaaatgatcagaggaaattctgtaatcaatgctggaaatcgttacattgtttagaacattcttgctcatgcctgtatttgcacaaataaatgaaacttcgctgtc

SEQ ID NO: 3601 - DNA, 1910 bp, Homo sapiens
  source 1..1910: mol_type = genomic DNA
ataaccatgaacttccatatctgtcataggaaagaggttggcctcagcagcaatgagggataattctttcaagaaaggaatgaagagagaagttagatggaaaagagatttttaaggtcaaaagaagcagctgaagaacatgtgtaggacagccttaggagttactacacttcaagacctgggtgtctgctggaggaaggaacatgaccctgcggagatgttaagggttgggagagctgagcttggaggctggaagcccagctgggaggctattgttaaagaggttgctgcagcaactggtcacacagtagtgttggtagaccagacagaggacatcctggcaaaatccaaaaagggaattgaggaaagccttaggaaagtggcaaagaagaagtttgcagaaaaccttaaggccggcgatgaatttgtggagaagaccctgagcaccatagcgaccagcacggatgcagcctccgttgtccacagcacagacttggtggtggaagccatcgtggagaatctgaaggtgaaaaacgagctcttcaaaaggctggacaagtttgctgctgaacatacaatctttgccagcaacacttcctccttgcagattacaagcatagctaatgccaccaccagacaagaccgattcgctggcctccatttcttcaacccagtgcctgtcatgaaacttgtggaggtcattaaaacaccaatgaccagccagaagacatttgaatctttggtagactttagcaaagccctaggaaagcatcctgtttcttgcaaggacactcctgggtttattgtgaaccgcctcctggttccatacctcatggaagcaatcaggctgtatgaacgaggtgacgcatccaaagaagacattgacactgctatgaaattaggagccggttaccccatgggcccatttgagcttctagattatgtcggactggatactacgaagttcatcgtggatgggtggcatgaaatggatgcagagaacccattacatcagcccagcccatccttaaataagctggtagcagagaacaagttcggcaagaagactggagaaggattttacaaatacaagtgatgtgcagcttctccggctctgagaagaacacctgagagcgctttccagccagtgccccgagtgcctgtgggaatgctctttggtcagacattccctcacacagtacagtttaataaatgtgcattttgattgtaatctatcgaagtgattattacaccagttacagcagtaatagattctccattaagaaataattcccttttttagtctgttcatttctgtgtattttctaaacagctttacacccttggtgccttggagcaaacatgttttttgaaccttgtcatttttgtgaagaattgcctagattccttctctcatcaacgggaaagtacttcctctgagagtgcgagtgcaccatgctcactgttgctgcgtgggagagtcacaagccactggcaagcaagtggtatagtctgtgaagcactgcagcgagcagcacctggatcttgcctttataagaacattttactacctgcagctttgagtcttgccctacattttgggcatgacataagatgtgtctttattcagctcgtcgtgaagatgctgctgctgaatgggtcagcatatctctgtttgcatggtttgcaggaggtcggttttcatggtcattcagttccacagatctgaatgattactgtctgtctgtgtcttttttccatgagaaatcactgttgcaaattgcctataaattgactctactaaaataacaatgtttcagtctgaaaatttgaattgaaaaaaatgtataatataaaattgtaatacactcaaatgattataaaagtaaaagttggtaatttaggcagaa

SEQ ID NO: 3602 - DNA, 804 bp, Homo sapiens
  source 1..804: mol_type = genomic DNA
cggggccggggccggggccggagccggagccggggccgggcggcgcgcctgtggagcgctgggggcggcctggggctgagcatggagcagcgcggcggaggtcgcctgcgaggccgctggccaggcctgagcctctgccaccatggccattgtgcagactctgccagtgccactggagcctgctcctgaagctgccactgccccacaagctccagtcatgggtagtgtgagcagccttatctcaggccggccctgtcccggggggccagctcctccccgccaccacggccctcctgggcccaccttcttccgccagcaggatggcctgctacggggtggctatgaggcacaggagccgctgtgcccagctgtgccccctaggaaggctgtccctgtcaccagcttcacctacatcaatgaggacttccggacagagtcaccccccagcccaagcagtgatgttgaggatgcccgagagcagcgggcacacaatgcccacctccgcggcccaccaccaaagctcatccctgtctctggaaagctggagaagaacatggagaagatcctgatccgcccaacagccttcaagccagtgctgcccaaacctcgaggggctccgtccctgcctagcttcatgggtcctcgggccaccgggctgtctgggagccagggcagcctgacgcagctgtttgggggccctgcctcctcctcctcctcttcctcctcctcttcagctgctgacaaacccctggcatttagtggctgggccagtggctgcccatcagggacgctatccgactctgg

SEQ ID NO: 3603 - DNA, 1280 bp, Homo sapiens
  source 1..1280: mol_type = genomic DNA
agtaactgactacttttctcccttctctagggtcctagcacagtgtctgatggagctttcctaccagaccctgaaattcacgcatcaggcgcgggaagcggtatatcgatacagcaaatgctttggagcaagaaactaaactggggttacgacggtttgaagtttgtgacaacattgatcttgaaactattttgatggaatatgagagttattattttgtaaaatttcagaaataccccaaaattgtcaaaaagtcatcagacacagcagaaaataatttaccgcaaagaagtagagggaagaccagaaggatgatgaacgacagttgtcaaaatcttcccaagatcaatcagcagaggccccggtccaaaaccacagcggggaagacaggggacaccaaatcgctcaataaggagcatcctaatcaggaggtagttgataacactcgcctggaaagtgccaacttcggcctacatatatcaagaatccgtaaagacagtggagaggaaaatgcccacccacgaagaggccaaatcattgacttccaagggctgctcacagatgccatcaagggagcaaccagtgaacttgccttgaacaccttcgaccataatccagacccctcagaacgactgctgaaacctctgagtgcatttattggcatgaacagtgagatgcgagaattggcagccgtggtgagccgggacatttatctccataatccaaacataaagtggaatgacattattggacttgatgcagccaagcagttagtcaaagaagctgttgtgtatcctataaggtatccacagctatttacaggaattctttctccctggaaaggactactgctgtacggccctccaggtacaggaaagactttactggccaaagctgtggccactgaatgtaaaacaaccttctttaacatttctgcatccaccattgtcagcaaatggagaggggattcagaaaaactcgttcgggtgttatttgagcttgcccgctaccacgccccatccacgatcttcctggacgagctggagtcggtgatgagtcagagaggcacagcttctgggggagaacatgaaggaagcctgcggatgaagacagagttactggtgcagatggatgggctggcacgctcagaagatctcgtatttgtcttagcagcttctaacctgccgtgcttgaaagccattgcactccagcctggcgacagagcaagactccgtctcaaaaaaaaaaaatgtactagtccattttcatgctgctggtga

SEQ ID NO: 3604 - DNA, 850 bp, Homo sapiens
  source 1..850: mol_type = genomic DNA
gtccctcaaggccggaaagaaagtcgggcttctctagcccctggaggactcgactcactggtgcgcgatttaggtccggaggaggcgttgtgagagctgcttggaaagaggaccaaagacgtctaaaaagtcatttggaaatatctctaaatatttgttaccatgtataagctgctaaagagaaattgggcccaacaaaactaattgaataattgaggcagatttgtgtgtatcatcaaattctatccagaagttgaagaatctgaatttaaagattgtgtgcatttaataagaggatgacctttcagtttaatttcactatagaagaccatctggaaaatgaattaacacccattagagatggagctttgaccctggattcctcaaaagagctgtcagtctcagaaagtcaaaaaggagaagagagggacagaaaatgttctgcagaacaatttgacttgcctcaggatcacttgtgggaacataagtcaatggaaaatgcagctccctctcaagacacagacagtccactcagtgcagccagcagttcaaggaacttggagccacatggaaaacagccctccttgagagctgccaaagagcatgctatgcctaaagatttaaagaagatgttagaaaataaagtcatagaaacattaccaggtttccagcatgttaagttatcagtagtgaaaaccatcttgttgaaagagaacttccctggagaaaacatagtttcaaaaagcttttcttctcactctgatctgattacaggtgtttatgagggaggcttaaaaatctgggaatgtacctttgacctcctggcttatttcacaaaggccaaagtgaa

SEQ ID NO: 3605 - DNA, 603 bp, Homo sapiens
  source 1..603: mol_type = genomic DNA
tttgttgtgagctgcggcagagactggtggctggaggagacgccggcgctggagagtgcgctgcgccgcccgccgctgagggaccgcggggttagccactgctggctgcttccagtgttcgccgagaggtgtggaaattaaaagaacacacatattttgactggggctttgatcaaccaaatgctaaaaagccacataaagaagatccctaatagtcatttctcaacaattatatagtcaactgatgtaacaatggtactaatattgggacgcagactaaacagagaggatcttggggtgcgtgattccccagcaactaagcgaaaagtttttgaaatggaccccaaatctctgacaggtcatgagttttttgacttctcttcaggatcatcccatgccgaaaacatactccagatatttaatgaatttcgtgatagccgcttattcacagatgttatcatttgtgtggaaggaaaagaatttccttgccatagagctgtgctctcagcctgtagcagctacttcagagctatgttttgtaatgaccacagggaaagccgagaaatgttggttgagatcaatggtattttagctgaagctatg

SEQ ID NO: 3606 - DNA, 1228 bp, Homo sapiens
  source 1..1228: mol_type = genomic DNA
gccctcatagggcagaatgggactcttgctgatgtagacgccgaagtcgcgggcgctcatggcgggcctggaggtactgttcgcatcggcagcgccggccatcacctgcaggcaggacgcgctcgtctgcttcttgcattgggaagtggtgacacacggttacttcggcttgggtgtcggtgaccagccgggtcccaatgataagaagtcagaactgctgccagctgggtggaacaacaataaagacctgtatgtcctccggtatgagtataaggatgggtccagaaagctccttgtgaaagccatcaccgtggagagcagcatgatcctcaatgtgctggaatatggctcacagcaagtggcagacttgaccctgaacttggatgattatatcgatgcagaacacctgggtgacttccacaggacctacaagaacagtgaggagcttcggtctcgtattgtgtctggaatcatcacacctatccatgagcagtgggaaaaggctaatgtaagcagtccccaccgggagttcccccctgctaccgccagagaggtggacccactccggattcctccacaccacccacacaccagtcggcagcctccctggcctcggagaggtggcatgattgtggatcccctgagatctggcttcccaagagcacttattgacccttcctcaggcctcccgaaccgacttcctccaggcgctgtgcccccaggagctcgctttgacccctttggacccattgggaccagcccacccggacctaacccagaccatctccccccgccgggctacgatgacatgtacctgtgaaggcctcaagaatgtaacatcccaggcttccctccattctcctggagctgccaccgctgtccccatcagcaaccatgttcttgcaggctgggggcaagggattctgctcatgtgtttgcagaccggctgggatagcctccccaccccttatcagagccaagacacctgctgcagctctccacctagctgcagatagctcccaaagagaaatcagtgtgtctctttcaccatcagctcctcccctttcaccaccagctcctctccacttcccaagggagactccggcaaccttcagcaacatatatcctcgaccagatgcagtgctataagaacagaacgcattttggatgttattattaagaaccaaatgtcaatacagaattcatgttgccggtttcccacttttct

SEQ ID NO: 3607 - DNA, 520 bp, Homo sapiens
  source 1..520: mol_type = genomic DNA
gccctgaccttctctctgagagccggggccgcttctgcgcaggatggaaggtgcccctgcggggccaggaggccggacagccgcctgcttcagttgcacatcacgatgcctttctcgtcgcccatggaagcggagctggtccgcaggatcctgtcccgggatgccgcacctctcccccgaccaggggcggttctgaaggacttcaccgtgtccggcaacctactgtttatccgactgactgctgcagaccaccgccaactgcagctctccatcagctcctgtctccagcagctttccctgttgatgtggatcacgcagtgctttctgcccgtgtttttggctcaggctccctcagggcagaggcgctaagcccagcctggcgccccttcctaggtcatgcctcctcccctagggaatggtcccagcacgagtggccagttcattgtgggggcctgattgtttgtcgctggaggaggacggcttacatgtttgtttctgtagaaaataaagctgagctacg

SEQ ID NO: 3608 - DNA, 2593 bp, Homo sapiens
  source 1..2593: mol_type = genomic DNA
gatgattttcagttttgaaaacgtggtgcatttcttttctgcttagttcaaacctaaaggcaattgtttatttagaaatgaagtctattggtgtaaagactgtcaaggtttgtgggtcaaagagctctgtacgcatagaaggtcagccatgttcattaggccagagtagaaggaaagtcaagcttatgggtgaacggtcgtatactctttcaattggcaacggagactacttttgggcaaataaagaaatgctgtgggattatgtgcagactctgtctgatcagggagcagagaaacatgaaggcacaggtcagtcctctgggatcactgatcaagagaaggagttatccaccaatgctttccaagctttcacatctggaaattatgatgcctgtctacaacaccttgcctgtctacaagatataaacaaagatgattataaaataattttgaatacagcagtagctgagttttttaaaagtaaccaaacaacaacagataatttgagacaaacacttaaccagctgaagaatcaggtccactcagctgttgaagaaatggatggattagatgatgttgaaaacagcatgttgtactataatcaagcagtcattctttatcatctgcggcagtatacagaagccatatcagttggtgaaaaactttatcagttcatagagccttttgaagaaaaatttgcccaagcagtgtgttttttgcttgtagacctgtatatattaacctaccaagctgagaaagctttgcatcttcttgctgtcctagaaaaaatgatttcacagggtaacaataacaaaaatggaaagaatgagactggtaataacaacaacaaagatggatctaatcataaagctgaaagtggagctctaatagaagctgcaaaatcaaagatacatcagtacaaagtacgagcttatatccaaatgaagtctctgaaagcatgtaaaagggaaatcaagtcagtcatgaatacagctggaaattccgcaccctctctctttcttaaaagcaattttgagtacttaagaggtaattatcgaaaagccgtgaagctattaaatagttcaaacattgctgagcatccaggattcatgaaaacaggtgaatgcttgagatgcatgttctggaataaccttggttgcatccattttgccatgagcaagcacaatttgggaatattctactttaaaaaggctctgcaagagaatgacaatgtctgtgcacagctcagtgcaggtagcactgatccaggtaaaaaattttcaggaagacccatgtgtacgttactaaccaataagagatatgagttgctgtataactgtggaattcagcttcttcacattggaaggcctcttgctgccttcgaatgtctgattgaagctgttcaggtttatcatgcaaatcctcgcctctggctacggctggctgaatgctgcattgctgccaataaggggacttctgaacaagaaactaaaggccttcccagcaaaaaaggaattgtacagtctattgttggtcaaggctatcatcgtaaaatagttttggcatcacagtctatacagaatactgtttataatgatgggcagtcttcggccattcctgtagccagtatggagtttgcagccatatgtctcagaaatgccttgttgctgctacctgaagaacagcaagatccaaagcaggaaaatggggctaaaaatagtaatcaattaggtgggaacacagagagcagcgaaagcagtgaaacttgcagcagtaaaagccatgatggagataaattcattccagctccaccttcttctccattgagaaaacaggaattagaaaacttaaagtgctccatacttgcttgcagtgcctacgtggctctggctttgggtgataacctcatggctttgaatcatgcagataaacttcttcagcagcccaagctgtcaggatctcttaagtttttgggacatttatatgctgcagaagccctcatctctctcgacagaatatctgatgccattactcacttgaacccggagaatgtcactgatgtctccttagggatctcttcaaatgagcaggaccaaggatcagacaaaggtgaaaatgaagcaatggaatcctctggtaagcgggcccctcagtgctaccccagttccgtcaactctgccaggactgtgatgctgttcaaccttggcagcgcttactgcctgaggagcgaatatgacaaagcccgaaagtgtctccaccaggcggcttcaatgatccatcctaaagaggtgccccctgaggccatcttgctggcagtctaccttgaactgcagaatggtaatactcagctggccttacagatcatcaaaaggaatcagctgctccctgcagtgaaaacacactctgaagtgagaaagaagccagtgtttcagcctgtccacccgatccagcccatccaaatgccggctttcaccactgtgcagagaaagtgatacttcacttttggaaaactgttacctgagacccaggggagaatttactggccattttagttgtatcacagcagaatgaataaaagatggtgaaggctgtt

SEQ ID NO: 3609 - DNA, 3080 bp, Homo sapiens
  source 1..3080: mol_type = genomic DNA
gaagtgagtagtgggggtgccagaccaggtgcgtctgccgctggattgtgataggaagcagagtgttcgtgtgaaagatggatactatgatgctgaatgtgcggaatctgtttgagcagcttgtgcgccgggtggagattctcagtgaaggaaatgaagtccaatttatccagttggcgaaggactttgaggatttccgtaaaaagtggcagaggactgaccatgagctggggaaatacaaggatcttttgatgaaagcagagactgagcgaagtgctctggatgttaagctgaagcatgcacgtaatcaggtggatgtagagatcaaacggagacagagagctgaggctgactgcgaaaagctggaacgacagattcagctgattcgagagatgctcatgtgtgacacatctggcagcattcaactaagcgaggagcaaaaatcagctctggcttttctcaacagaggccaaccatccagcagcaatgctgggaacaaaagactatcaaccattgatgaatctggttccattttatcagatatcagctttgacaagactgatgaatcactggattgggactcttctttggtgaagactttcaaactgaagaagagagaaaagaggcgctctactagccgacagtttgttgatggtccccctggacctgtaaagaaaactcgttccattggctctgcagtagaccaggggaatgaatccatagttgcaaaaactacagtgactgttcccaatgatggcgggcccatcgaagctgtgtccactattgagactgtgccatattggaccaggagccgaaggaaaacaggtactttacaaccttggaacagtgactccaccctgaacagcaggcagctggagccaagaactgagacagacagtgtgggcacgccacagagtaatggagggatgcgcctgcatgactttgtttctaagacggttattaaacctgaatcctgtgttccatgtggaaagcggataaaatttggcaaattatctctgaagtgtcgagactgtcgtgtggtctctcatccagaatgtcgggaccgctgtccccttccctgcattcctaccctgataggaacacctgtcaagattggagagggaatgctggcagactttgtgtcccagacttctccaatgatcccctccattgttgtgcattgtgtaaatgagattgagcaaagaggtctgactgagacaggcctgtataggatctctggctgtgaccgcacagtaaaagagctgaaagagaaattcctcagagtgaaaactgtacccctcctcagcaaagtggatgatatccatgctatctgtagccttctaaaagactttcttcgaaacctcaaagaacctcttctgacctttcgccttaacagagcctttatggaagcagcagaaatcacagatgaagacaacagcatagctgccatgtaccaagctgttggtgaactgccccaggccaacagggacacattagctttcctcatgattcacttgcagagagtggctcagagtccacatactaaaatggatgttgccaatctggctaaagtctttggccctacaatagtggcccatgctgtgcccaatccagacccagtgacaatgttacaggacatcaagcgtcaacccaaggtggttgagcgcctgctttccttgcctctggagtattggagtcagttcatgatggtggagcaagagaacattgaccccctacatgtcattgaaaactcaaatgccttttcaacaccacagacaccagatattaaagtgagtttactgggacctgtgaccactcctgaacatcagcttctcaagactccttcatctagttccctgtcacagagagtccgttccaccctcaccaagaacactcctagatttgggagcaaaagcaagtctgccactaacctaggacgacaaggcaacttttttgcttctccaatgctcaagtgaagtcacatctgcctgttacttcccagcattgactgactataagaaaggacacatctgtactctgctctgcagcctcctgtactcattactacttttagcattctccaggcttttactcaagtttaattgtgcatgagggttttattaaaactatatatatctccccttccttctcctcaagtcacataatatcagcactttgtgctggtcattgttgggagcttttagatgagacatctttccaggggtagaagggttagtatggaattggttgtgattctttttggggaagggggttattgttcctttggcttaaagccaaatgctgctcatagaatgatctttctctagtttcatttagaactgatttccgtgagacaatgacagaaaccctacctatctgataagattagcttgtctcagggtgggaagtgggagggcagggcaaagaaaggattagaccagaggatttaggatgcctccttctaagaaccagaagttctcattccccattatgaactgagctataatatggagctttcataaaaatgggatgcattgaggacagaactagtgatgggagtatgcgtagctttgatttggatgattaggtctttaatagtgttgagtggcacaaccttgtaaatgtgaaagtacaactcgtatttatctctgatgtgctgctggctgaactttgggttcatttggggtcaaagccagtttttcttttaaaattgaattcattctgatgcttggcccccatacccccaaccttgtccagtggagcccaacttctaaaggtcaatatatcatcctttggcatcccaactaacaataaagagtaggctataagggaagattgtcaatattttgtggtaagaaaagctacagtcattttttctttgcactttggatgctgaaatttttcccatggaacatagccacatctagatagatgtgagctttttcttctgttaaaattattcttaatgtctgtaaaaacgattttcttctgtagaatgtttgacttcgtattgacccttatctgtaaaacacctatttgggataatatttggaaaaaaagtaaatagctttttcaaaatg

SEQ ID NO: 3610 - DNA, 810 bp, Homo sapiens
  source 1..810: mol_type = genomic DNA
gcgtgagggcctgcgctggagccggcttgacagggtctgagggggagtggagaactgggcgaggaggttcccgtggtcggcttacccgctggccgcctcctgacaagcgggagggatccgcggtggacccagggaagcggaggagcctggcggccaccccctcttcctcacttccctgtactctcatcgctctcggcctccgacacgaaaaggaagcaaatgagctgatggaagatctgtttgaaactttccaagatgagatgggattctccaacatggaagatgatggcccagaagaggaggagcgtgtggctgagcctcaagctaactttaacacccctcaagctctacggtttgaggaactactggccaacctactaaatgaacaacatcagatagcgaaggaactatttgaacagctgaagatgaagaaaccttcagccaaacagcagaaggaggtagagaaggttaaaccccagtgtaaggaagttcatcagaccctgattctggacccagcacaaaggaagagactccagcagcagatgcagcagcatgttcagctcttgacacaaatccaccttcttgccacctgcaaccccaatctcaatccggaggccagtagcaccaggatatgtcttaaagagctgggaacctttgctcaaagctccatcgcccttcaccatcagtacaaccccaagtttcagaccctgttccaaccctgtaacttgatgggagctatgcagctgattgaagacttcagcacacatgtcagcattgactgcagccctcataaaactgtcaagaagactg

SEQ ID NO: 3611 - DNA, 3848 bp, Homo sapiens
  source 1..3848: mol_type = genomic DNA
gttgtgagctgcggcagagactggtggctggaggagacgccggcgctggagagtgcgctgcgccgcccgccgctgagggaccgcggggttagccactgctggctgcttccagtgttcgccgagaggtaccgggggtgacagctccgggaccggccgaaaggcgaggaaccggaagcccgggggagtgcgaccgcctcaaatccagccttcttgtttggtgggacgaccgtcggttctgtccgggaggaatgacggggtcaaggtgtggaaattaaaagaacacacatattttgactggggctttgatcaaccaaatgctaaaaagccacataaagaagatccctaatagtcatttctcaacaattatatagtcaactgatgtaacaatggtactaatattgggacgcagactaaacagagaggatcttggggtgcgtgattccccagcaactaagcgaaaagtttttgaaatggaccccaaatctctgacaggtcatgagttttttgacttctcttcaggatcatcccatgccgaaaacatactccagatatttaatgaatttcgtgatagccgcttattcacagatgttatcatttgtgtggaaggaaaagaatttccttgccatagagctgtgctctcagcctgtagcagctacttcagagctatgttttgtaatgaccacagggaaagccgagaaatgttggttgagatcaatggtattttagctgaagctatggaatgttttttgcagtatgtttatactggaaaggtgaagatcactacagagaatgtacagtatctctttgagacatcaagcctctttcagattagtgttctccgtgatgcatgtgccaagttcttggaggagcaacttgatccttgtaattgcttaggaatccagcgctttgctgatacccattcactcaaaacactcttcacaaaatgcaaaaattttgcgttacagacttttgaggatgtatcccagcacgaagaatttcttgagcttgacaaagatgaacttattgattatatttgtagtgatgaacttgttattggtaaagaggagatggtttttgaagccgtcatgcgttgggtctatcgtgccgttgatctgagaagaccactgttacacgagctcctgacacatgtgagactccctctgttgcatcccaactactttgttcaaacagttgaagtggaccaattgatccagaattctcctgagtgttatcagttgttgcatgaagcaagacggtaccacatacttgggaatgaaatgatgtccccaaggactaggccacgcaggtccactggctattctgaggtgatagttgtcgttggaggatgtgagcgagttggaggatttaatcttccatacactgagtgctacgatcctgtaacaggagaatggaagtctttggctaagcttccagaatttaccaaatcagagtatgcagtctgtgctctaaggaatgacattcttgtttcaggtggaagaatcaacagccgtgatgtctggatttataactcacagttaaatatttggatcagagttgcctctctcaataaaggcagatggcgtcacaaaatggctgtcctccttggtaaagtatatgttgtcggtggctatgatgggcaaaacagacttagcagcgtagaatgttatgattccttttcaaatcgatggactgaagttgctccccttaaggaagccgtgagttctcctgcagtgactagctgtgtaggcaaactgtttgtgattggtggaggacctgatgataatacttgttctgataaggttcaatcttatgatccagaaaccaattcttggctacttcgtgcagctatcccaattgccaaaaggtgtataacagctgtatccctaaacaacctgatctatgttgccggtggactgaccaaggcaatatactgttacgatccagttgaagattactggatgcacgtacagaatacattcagccgtcaggaaaactgtggtatgtctgtgtgtaatggtaaaatatatatcctgggcggaagacgggaaaatggagaagccacagacactattctctgttatgatcctgcaacaagtatcatcacaggggtagctgcaatgcccaggccagtgtcctatcatggctgtgtgactattcatagatacaatgagaaatgctttaaactctgaagacaggatacctcaccgaagaagccacactgatccaagatgggaggttttaaaaactctacagtgggaacttcacatatctcctttgtgccatatgcaaaaaatagtaaaaataataatttggtgcctttctcctcaaaatatcaatctttcaaactataataaagcctttcctataattgaaaaaaaaaacttttttgttaaaggtaatggtggttgttacttggcctttgaagagtgtacctttgtaagtatttgtaagaagtctatgtgaattaggaaatgtctgtctgcataccttttaggagcgtgtgaatggtgtcttcacttattatgtatgtttatctgtatgtatattccttattttgtcatatatgtagagaaaattgcatgacttgaggcatcatttaggttgaagaagttaatgcttaggatgcattctaggagaaaaaatcagttttaaaaacctttgttgttaacaaagtatatccagattggttaattttattgaagggtttttttctgtaattgataaaaatgtaatgacaacaattcaggcatcataaaatactgaactattgtgactttattcttagaattgctgtcttacattaaacatgtttttagggggaagttaggtaggagatagaaaaataagtgcccctacaagggggattaaaattacaagttaattcctaagagaaaaatggaatggcctttgaaggaaaaatgacccactatggctctcaaagtttttatgcatcatctcttcaatcctctaagaaagcctcttttcttaacttgataaagcagtggaaacccattttgcaatattgttttgtgaaaaacagggacagacagccaggtacagagactcacacctgtactcccaactactcagcaggctggggcaggaggattgcttgagcccaggagtctgaggctacagtgagctatgaacgcacacggcaccctagcctgggcaacaggttgcgacactgtctcaagagaaaagaaaaagaaaaatagggataggttttccttcctagcccagtagagtttgacctcattagtatggtgctttgggtgaggacctcttccttgattatcccactttctagtgaacagctaaaattcctgagagtctctactgttaaggtacctttaataggataaagcagggaccacctatctcagtgggtccatttttcttttaaaattagttatctgaaaaaacttagcagtagttcccatctttaaggtaagtctttcatttggtccccattgtgtaaaatactaatcaacattttcaagcttctgtacaacagactgcttttgtctagatttctcaactccactttataaagcttatcagttttcagagaggaatgtgaattttttttctaatgcaaataaatggatatggcaggaactacagcataagtgattattgtgattctgggtggacggatataatttacaacatttagggatgttctaggtagcctgctgtagtttgacttccagtcactgttgtctttcacattataatttgtatatttcttgtgatagaagggatgatgcaaatatgtaattaaagtgtcaccagatttctgttaaaaccaaggttgaaataaaaagcctaacattggtaagcta

SEQ ID NO: 3612 - DNA, 3478 bp, Homo sapiens
  source 1..3478: mol_type = genomic DNA
aacagaccgccgtgagagaggaggggtgccggccgggattcgcggcccggagctcgggaccggagtcaggaatggagagaagggtaatggttttacctcttattgtggaaacctgttgagatcacagagaatatactgacggcataaaagggcagaaccatagcagggtgcggttgcttcattccagcctcgcagtcacctctgtgccctgctggttgtcttcccagcgctgctgtagttgccttccatggatctataggagagcaagtcctccaggagctggtggtgtctgtcgattgactgagtgctggagctggcagccctgtgcaggctgccacctttgcccctttactgtgcttgctcctgactctatgtcgcgtctccaaggagaagaagtcctcaccagtgaacggagacctctctgaactaaggataccatggccacgtcagccccactacggagcctggaagaggaggtgacctgctccatctgtcttgattacctgcgggaccctgtgaccattgactgtggccacgtcttctgccgcagctgcaccacagacgtccgccccatctcagggagccgccccgtctgcccactctgcaagaagccttttaagaaggagaacatccgacccgtgtggcaactggccagcctggtggagaacattgagcggctgaaggtggacaagggcaggcagccgggagaggtgacccgggagcagcaggatgcaaagttgtgcgagcgacaccgagagaagctgcactactactgtgaggacgacgggaagctgctgtgcgtgatgtgccgggagtcccgggagcacaggccccacacggccgtcctcatggagaaggccgcccagccccacagggaaaaaatcctgaaccacctgagtaccctaaggagggacagagacaaaattcagggcttccaggcaaagggagaagctgatatcctggccgcgctgaagaagctccaggaccagaggcagtacattgtggctgagtttgagcagggtcatcagttcctgagggagcgggaggaacacctgctggaacagctggcgaagctggagcaggagctcacggagggcagggagaagttcaagagccggggcgtcggggagcttgcccggctggccctggtcatctccgaactggagggcaaggcgcagcagccagctgcagagctcatgcaggacacgagagacttcctaaacaggtatccacggaagaagttctgggttgggaaacccattgctcgagtggttaaaaaaaagaccggagaattctcagataaactcctctctctgcaacgaggcctgagggaattccaggggaagctgctgagagacttggaatataagacagtgagcgtcaccctggacccacagtcggccagtgggtacctgcagctgtcagaggactggaagtgcgtgacctacaccagcctgtacaagagtgcctacctgcacccccagcagtttgactgtgagcctggggtgctaggcagcaagggcttcacctggggcaaggtctactgggaagtggaagtggagagggagggctggtctgaggatgaagaagagggggatgaggaggaagagggagaagaggaggaggaggaagaggaggccggctatggggatggatatgacgactgggaaacggacgaagatgaggaatcgttgggcgatgaagaggaagaagaggaggaggaagaggaggaagttctggaaagctgcatggtgggggtggctagagactctgtgaagaggaagggagacctctccctgcggccagaggatggcgtgtgggcgctgcgcctctcctcctccggcatctgggccaacaccagccccgaggctgagcttttcccagcactgcggccccggagagtgggcatcgccctggattatgaagggggcaccgtgactttcaccaacgcagagtcacaggaactcatctacaccttcactgccaccttcacccggcgcctggtccccttcctgtggctcaagtggccaggaacacgcctcctgctaagaccctgagccctgacatctgcccccagccccaaccctcagatgcttcacttctttggaattccaggactctcaatggggggacgggatgcctggcctaagcacctggagcaggggaccccatatccactggtagccacctccccattgctgtggccccctgaaatctcactcagtgctgttgctccatctactgccctaatggggctcttttcccacctcctgctggtttcccgagggaacttctgaccctggagtccatgagggctcctttcctttttgaccacgaccttggccccagctctgcactctctggaataagggcccgatgcagcattttcttgcccagtgtggcaagacctcagaaaaaccagtcaattacgcctaagatcattttgctgtccttaaaccccccaggttccttcttgcacaaatccactctgctgcccaccttccctggcattttaaacagacctaccccaccccaactcagagttaagcatacatggcaatgctgaaaataaacaaaatccactgaggcttcccaggccatttaaagcctggagtaccagcgcatatcatctcatggggtccagagtggagtccaggcttctctgaaaccagggctgagcatatttccatagccaaggaggtgggactccctggagctatctgtggtcttagggaaggatccagacatacacggctttggggtacaagctgtgatcactgatcaataaattatctctagattggtccttgtgaggggagttttaagaatccagaacatcttgctcttgatcagcacatccaaaaacaccaagacaaacatccagtggagcagaacctctcctgcctcgggagttctgaccgggttccccagcagggtgttaagcctctgtctctggccctaccagcatccaggttccactttcctaggagagagtggagatgggaagacagggaaaggaaggcagcaggaggccacaagcccaccaggtcttcatgtcaagagagggagtaacatgtcttctcattgcccacggacccaacctctgtccaggtgcccctcatcatcacagtttaacacaagctcccctgctccagccaaattgatctcccagtcttgtccttacccattccaagtgctctgccagcccctgttcatccaagttttaagtcctccaccctgttctaagagactgttccaacggctctgggcctcagtggtcacttgaccaccattgtctcagagctgcccactttgtgtgtgtcacatgctgcctgagtcacatgtacatcttatttctgcctctagttttgtaagctcctggagggcggataacatcttatactactcttgtattctcatggcacctagtgcagtgctgggcacagagtaggtgctcaataaagacttgttgaatgaa

SEQ ID NO: 3613 - DNA, 923 bp, Homo sapiens
  source 1..923: mol_type = genomic DNA
cttatgtcaatgctgttgattcaaggtggagttcatatggcaacgaggccacatcatcagcacactatgttgaaagggacagattcattgttactgatttatctggtcatagaaagcattccagtactggggaccttttgagccttgaacttcagcaggccaagagcaactcattacttcttcagagagaggccaatgctttggccatgcaacagaagtggaattccctggatgaaggccgtcaccttaccttaaaccttttaagcaaggaaattgaactaagaaatggagagttacagagtgattatacagaagatgcaacagatactaaacctgatagggatatcgagttagagctttcagcacttgatactgatgaacctgatggacaaagtgaaccaattgaagagatcttggacatacagcttggtatcagttctcaaaatgatcagttgctaaatggaatggcagtggaaaatgggcatccagtacagcagcaccaaaaggagccaccaaagcagaagaaacagagtttagggaggagcaaaaaacaattctgccggtaacttcttgctttagccagccactcccagtgtctattagcaatgcaagttgcctccccatcaccacatctgtcagtgctggcaacctcattctgaaaactcatgttatgtctgaagataaaaacgactttttaaaacctgttgcaaatgggaagatggttaacagctgaaaggaggttcatctttcaaatttgtgaccacaccatggaagcatttacactagctttttatatatataatatatattatataatgtatattttttttaaaaaaaagatattactgggggcatccatttcctgtggactctttgatacttcaagccctcttgcattagcattatgaaaaaaaaaaagaaaa

SEQ ID NO: 3614 - DNA, 2107 bp, Homo sapiens
  source 1..2107: mol_type = genomic DNA
aaaatgctcccgccgacgcacagcagtgacgacacacaaggtttcggggactgagtgggtttcagactttctctcaggatttccgctggcttcaggttccggtcaggcgtcgggacagagcctgatccaggcttcggcggccggtggcagctctcgatcagctctcgcagtcggagaggcggctaaggaaaggtgccacagcagagacgcgaaggagaggccctagaaccttttcaaagaagaatggaagaaaccatgaagcttgctacgatggaagacacagtggagtactgcctgttcctgataccagatgagtcaagggactcagataaacataaagagattcttcagaagtacattgagagaataatcactcggtttgcacctatgctggtcccctacatctggcagaatcagcctttcaatcttaaatataaacctgggaaaggaggtgttcctgctcatatgtttggcgtgacaaagtttggggataacattgaggatgaatggtttattgtttatgtaataaagcagatcacaaaggaatttccagagttagtagcaaggattgaagacaatgatggtgaattcttgttaatagaagctgctgactttctccctaaatggctggatcctgaaaatagcaccaatagggtatttttctgccatggggaattgtgtattatccctgcaccaagaaaatctggagcagaatcttggttacccaccacacccccaacaattccacaagcattgaatataatcacagcacattcagaaaaaatacttgcttcagaatctatacgagctgctgtgaataggcgcatcagagggtacccagaaaaaattcaggcctcacttcatcgagcacactgcttccttccagctggcattgtggcagtgctaaagcagcgccccagattggtggctgcagcagtccaggcattttacctacgagaccctattgacctgcgagcttgtcgtgttttcaagacattcttgcctgaaacacgaataatgacatcggctcatggatttgagatcttatgctccaaatgtagcccacatttttctgactgcaagaaatcccttgtgactgcctcaccactctgggccagtttccttgaaagtctgaaaaagaatgattactttaagggactgatagaaggttctgctcagtaccgggaaaggctagaaatggcagagaattacttccagctctcagtagactggccagaaagttctcttgctatgagccctggtgaagaaatcttaaccttattacagacaataccatttgatatagaagaccttaagaaagaagcagctaatcttcccccagaggatgatgaccagtggttagatctctcaccagatcagctggaccagctgctgcaggaagctgttggcaaaaaagaatccgagtctgtttccaaggaggagaaggagcagaactatgacttaactgaagtctcagagagcatgaaagctttcatatccaaagtctcaacccacaagggagcagagctgcctcgagaaccttctgaggctccaatcacttttgatgcagattcttttcttaattattttgataagattttagggccaaggcctaatgagtcagattctgatgatctggatgatgaagactttgaatgtttagatagtgatgatgacttggactttgaaacacacgaacctggcgaagaggcttccctgaaaggaacacttgataatctcaagtcatacatggcccagatggaccaggaactagcacacacctgcatcagcaaaagtttcaccactaggaaccaagtggaacctgtatcccagactaccgataacaattcagatgaggaagattctggtacgggagaatctgttatggcaccagtagatgtagacctgaacctggtttcaaatatattggaatcctatagctcccaagctggactggcaggacctgcttccaatcttttacaaagcatgggagtgcagctgcctgacaacaccgatcacagaccaacaagtaagccaacaaaaaattaaccagcacatttagcttctcttttttctttttaaataaatattgaatatgattctgttc

SEQ ID NO: 3615 - DNA, 2108 bp, Homo sapiens
  source 1..2108: mol_type = genomic DNA
ggggccgcaccgtaaatgggtgtcgcctttcctccagtccactctgcacccaacctcagcgggcgcacttttctgagttgcgcataccctctcaattattaaaggttgcagacggaaaagttagtagttttcggaattgtagaatacgctcgtgcagcgccaggacggctaatgcttacccgaaaatgtggaaccctgatctccccatgcgtggagcgaggttggaggtagcgtagtaagaatactggagttgcttaaacgcatttgctcgaaagtcactaccctggatatacattctggccaaaagaaagggggaaaaactccacatttttctcaaatactgagtttcatgaagagaacctccaacaaatggtatataaaggaaaacaaagcaaacaaaagagggaaactttgcaatttattaactcaagcatgaaaatacagaaaataaagagggctcaacatacttggaaaaggaaaaaacatgaagaaaaaacatgatggcattgtttatgaaactaaagaagttctcaatccatctcccaaagtaacacattgttgcaaatcactgtggttaaaatacagttttcagaaggcatacatgacccaacttgtcagctcccagccagttccagccatgtcaaggaacccagatcataatctactttctcagcccaaggagcatagcattgttcagaagcatcaccaggaggaaataattcacaagttggccatgcagctgagacacattggggacaacattgatcataggatggttcgagaggatcttcaacaggatggcagagatgcactagatcattttgtcttctttttctttagaagagttcaggtgttgctgcattttttctggaacaaccatttgctgtaaaaggaaagtaaaggtcaagtggtcaagttctgttttctttttaccctctgagaaacatgaatcccactgggacagatgggaagaacacccttctccgtctccctctttttgtacccatcactgttggtctacacccagtttgttgaagaactgcgggttcacgagccatttgtctcttcggaggagctagctatgagatgtctgcgatcacatcacggtaaagcccaaggagtaattaggaccccaggaagccttgctgcccagaaaacaccagcgctgtggatggtcccagggctccttgtgaggaaaccttgaacatttccttccaggaatgaaagagaacctcgtcctcaaactaaaggccacagaaatgggcactacctcctggcccactccctgggcaccatgccctctggtgacctgttggctccactcttgtcactcatgtccagatctgcagtgccagcttctccttctcggtgacatgtcacctccctgccccaatcctggctccaaccctctctggaaaatcgaagtgaaacatttgtctctaatactcaaattcaacatatggctcatctcatctaccttcccatttccatgcctagaggccccactactaccactagcaccgttgggtgtttccttctcaggctctgattctacaacatttacgttcttttctcacctttgatcccctcactcctctgtgacccccttcaagtcttccttcaccactccagtgttttcccataccactcgaccctgctcgaaggtatctttccctgctctgtcatcctcttttaggcatgcctgcttaaaatcgggagtgcttagtccttggccaacagtcctgccttctagaagaatgtaagacctgaaagagttatgaatctatcactaggcaaaaacttctcttttcctattgctggatggttttgctattattggttggtgggccctttgcctgtggaatgtatttcactcattctctcctgcacgctgttaggcagttctttcacctgcatgcttcttcttttacctttttgtctacctcatagtccctctctcccctcctttaaaagaattataaatattaggaaagcttgttgttataaattaaaagtttacatatgtatcttgagttcttcataggggaagtgttattttaaaaaattctaaaaatgaaataaatattgttattttattgagcatgaaa

SEQ ID NO: 3616 - DNA, 2359 bp, Homo sapiens
  source 1..2359: mol_type = genomic DNA
gcgagtggggaagctgctaacccgacccggattggcgctgaggtggcccgtggggcagggcagatgattctggaccagatgaagcctgaggagccttccagctctaagatagcaggataggagacttctaagattggagctgcagaagacttgccagcccaccagcacaatgtcagaaggaagagtcagcagagcaaccagagttctactacgatgagtttggtttccgtgtgtacaaggaagaaggtgatgagcctggctccagtctgctggcgaactcccctctgatggaggatgctccacagaggctgcggtggcaggcccacctggagttcacccataaccacgatgtgggggatctcacctgggacaagattgccgtctccctaccccgctctgagaagctccgctccctggtgctggccggcatcccacatggcatgaggccacagctgtggatgcggctctctggggccctgcagaagaagaggaactctgagctgtcctaccgcgagattgtgaagaacagctccaacgatgagaccatcgctgccaagcagatcgagaaggacctgctccgcaccatgcccagcaacgcctgcttcgccagcatgggtagcatcggggtgccccgcctgcgcagggtgctccgggccctggcctggctctacccagagatcggctactgccagggcaccggcatggtggccgcctgcctcctgctgttcctggaggaggaggacgccttctggatgatgtctgccatcatcgaggacctgctccccgcctcctacttcagcaccaccctgctgggtgtccagactgaccagcgggtcctgcgccacctcattgtccagtacctgcctcgcctggacaagctgctccaggagcatgacattgagctgtccctgatcacactgcactggttcctcacggccttcgccagcgtggtggacatcaagctgctcctgcgcatctgggacctgtttttctacgagggctcccgggtgctgttccagctcacgctgggcatgctgcacctcaaggaggaagagctgatccagtcagagaactcggcctccatcttcaacacgctatcggatatcccgtcgcagatggaggacgcggagctgcttctgggggtggccatgcggctggccggctccctcaccgatgtggccgtggagactcagcgccgcaagcacctggcctatctcattgcagaccagggccagctcctgggggccggcaccctcaccaacctctctcaggttgttcgccgcaggacccagcggaggaagtccaccatcactgctctgctcttcggggaggatgacctggaggcactcaaggccaagaacatcaagcagacggaactggtggctgacctccgggaagccatcctgcgcgtggcacgccacttccagtgcacagaccccaaaaactgcagcgtggagctgactccagactatagcatggagagccaccagcgggaccacgagaactacgtggcgtgctcacgcagccaccggcgccgagccaaggccctgctggactttgagcggcacgacgacgacgagctgggcttccgcaagaacgacatcatcacaatcgtgtctcagaaggacgagcactgctgggtgggggagctcaacggcctgcgaggctggtttccagccaagttcgtggaagtcctggatgagcgcagcaaagagtactccatcgcgggggatgactcggtgacggagggggtcacagacctcgtgcgagggaccctctgcccggcccttaaggccctgttcgaacatggactgaagaagccatccctgcttgggggcgcctgccacccctggctgtttatcgaggaggctgcaggccgggaggtcgagagagactttgcctccgtgtattcccgtctggtgctctgtaagaccttcaggttggatgaagatggcaaagtcctgaccccggaggagctgctctaccgggctgtgcagtctgtgaacgtgacccacgatgcagtgcatgcacaaatggatgtgaagctccgctcactgatctgcgtggggctcaagtgagtgtggaaaaggggttggaggagagccctggagtggggggacccagcccagcatcagggggggtccttacagggaaccctaaaggacaaagaacctcaggggctcaggtccttccccaaagagggtggtctgggagctgctgagagacaggtcagaggcttccaccgtggctgcagccagaagggcctggagctgcccctgctccccactcctggccatgtccccagtgagcaggtgctgcacctgtggctggaggtgctctgctccagcctgcccaccgt

SEQ ID NO: 3617 - DNA, 452 bp, Homo sapiens
  source 1..452: mol_type = genomic DNA
ctggcaggggacgagctgcggcggtggcacctccgggtgtggaaggctccagtgagatggagtcgcgagtcgcggacgctgggaccggcgagaccgcgcgagcagcgggcgggagtccggcagttggctgcaccactcgggggcccgtagtctcggcgcccctgggagccgcccggtggaagctcctgcggcaggttctgaagcaaaaacacctggatgattgcctgcgacatgtatctgtaagaagatttgaatcatttaatctgttttcagtaacagaaggcaaagaaagggaaactgaagaggaggttggtgcatgggtccaatatacaagcatcttctgtcctgaatacagtatctccttaaggcataatagtggatccttgaatgttgaagatgtccttaccagctttgacaatacaggaaatgtgtggagtttttctagaggaaaa

SEQ ID NO: 3618 - DNA, 3478 bp, Homo sapiens
  source 1..3478: mol_type = genomic DNA
aacagaccgccgtgagagaggaggggcgccggccgggattcgcggcccggagctcgggaccggagtcaggaatggagagaagggtaatggtgttacctcttattgtggaaacctgttgagatcacagagaatatactgacggcataaaagggcagaaccatagcagggtgcggttgcttcattccagcctcgcagtcacctctgtgccctgctggttgtcttcccagcgctgctgtagttgccttccatggatctataggagagcaagtcctccaggagctggtggtgtctgtcgattgactgagtgctggagctggcagccctgtgcaggctgccacctttgcccctttactgtgcttgctcctgactctatgtcgcgtctccaaggagaagaagtcctcaccagtgaacggagacctctctgaactaagaataccatggccacgtcagccccactacggagcctggaagaggaggtgacctgctccatctgtcttgattacctgcgggaccctgtgaccattgactgtggccacgtcttctgccgcagctgcaccacagacgtccgccccatctcagggagccgccccgtctgcccactctgcaagaagccttttaagaaggagaacatccgacccgtgtggcaactggccagcctggtggagaacattgagcggctgaaggtggacaagggcaggcagccgggagaggtgacccgggagcagcaggatgcaaagttgtgcgagcgacaccgagagaagctgcactactactgtgaggacgacgggaagctgctgtgcgtgatgtgccgggagtcccgggagcacaggccccacacggccgtcctcatggagaaggccgcccagccccacagggaaaaaatcctgaaccacctgagtaccctaaggagagacagagacaaaattcagggcttccaggcaaagggagaagctgatatcctggccgcgctgaagaagctccaggaccagaggcagtacattgtggctgagtttgagcagggtcatcagttcctgagggagcgggaggaacacctgctggaacagctggcgaagctggagcaggagctcacggagggcagggagaagttcaagagccggggcgtcggggagcttgcccggctggccctggtcatctccgaactggagggcaaggcgcagcagccagctgcagagctcatgcaggacacgagagacttcctaaacaggtatccacggaagaagttctgggttgggaaacccattgctcgagtggttaaaaaaaagaccggagaattctcagataaactcctctctctgcaacgaggcctgagggaattccaggggaagctgctgagagacttggaatataagacagtgagcgtcaccctggacccacagtcggccagtgggtacctgcagctgtcagaggactggaagtgcgtgacctacaccagcctgtacaagagtgcctacctgcacccccagcagtttgactgtgagcctggggtgctgggcagcaagggcttcacctggggcaaggtctactgggaagtggaagtggagagggagggctggtctgaggatgaagaagagggggatgaggaggaagagggagaagaggaggaggaggaagaggaggccggctatggggatggatatgacgactgggaaacggacgaagatgaggaatcgttgggcgatgaagaggaagaagaggaggaggaagaggaggaagttctggaaagctgcatggtgggggtggctagagactctgtgaagaggaagggagacctctccctgcggccagaggatggcgtgtgggcgctgcgcctctcctcctccggcatctgggccaacaccagccccgaggctgagcttttcccagcactgcggccccggagagtgggcatcgccctggattatgaagggggcaccgtgactttcaccaacgcagagtcacaggaactcatctacaccttcactgccaccttcacccggcgcctggtccccttcctgtggctcaagtggccaggaacacgcctcctgctaagaccctgagccctgacatctgcccccagccccaaccctcagatgcttcacttctttggaattccaggactctcaatggggggacgggatgcctggcctaagcacctggagcaggggaccccatatccactggtagccacctccccattgctgtggccccctgaaatctcactcagtgctgttgctccatctactgccctaatggggctcttttcccacctcctgctggtttcccgagggaacttctgaccctggagtccatgagggctcctttcctttttgaccacgaccttggccctagctctgcactctctggaataagggcccgatgcagcattttcttgcccagtgtggcaagacctcagaaaaaccagtcaattacgcctaagatcattttgctgtccttaaaccccccaggttccttcttgcacaaatccactctgctgcccaccttccctggcattttaaacagacctaccccaccccaactcagagttaagcatacatggcaatgctgaaaataaacaaaatccactgaggcttcccaggccatttaaagcctggagtaccagcgcatatcatctcatggggtccagagtggagtccaggcttctctgaaaccagggctgagcatatttccatagccaaggaggtgggactccctggagctatctgtggtcttagggaaggatccagacatacacggctttggggtacaagctgtgatcactgatcaataaattatctctagattggtccttgtgaggggagttttaagaatccagaacatcttgctcttgatcagcacatccaaaaacaccaagacaaacatccagtggagcagaacctctcctgcctcgggagttctgaccgggttccccagcagggtgttaagcctctgtctctggccctaccagcatccaggttccactttcctaggagagagtggagatgggaagacagggaaaggaaggcagcaggaggccacaagcccaccaggtcttcatgtcaagagagggagtaacatgtcttctcattgcccacggacccaacctctgtccaggtgcccctcatcatcacagtttaacacaagctcccctgctccagccaaattgatctcccagtcttgtccttacccattccaagtgctctgccagcccctgttcatccaagttttaagtcctccaccctgttataagagactgttccaacggctctgggcctcagtggtcacttgaccaccattgtctcagagctgcccactttgtgtgtgtcacatgctgcctgagtcacatgtacatcttatttctgcctctagttttgtaagctcctggagggcggataacatcttatactactcttgtattctcatggcacctagtgcagtgctgggcacagagtaggtgctcaataaagacttgttgaatgaa

SEQ ID NO: 3619 - DNA, 2952 bp, Homo sapiens
  source 1..2952: mol_type = genomic DNA
cgccaaggaaagatgggacctcccggcccagtacttaaattcacatagctgcagagtggatatttgtcccagattaacaaagaagcatcagaaacctatggcctcccccctgcacctccaagaaacccaaactctagaggttctagccattaagtattagagttggagaagatctcagtggacagtgtgtggtgaacctccacccctgtgacaggctcaagacttctttggatataggaaatgttctcttgaaggtttcttgagcaagaattttgttccagcactgccagccacaatgaataactcttcttcagagacgcgaggacacccccacagtgcctcctctccttcagagcgtgtgttcccgatgcccctgcccaggaaggcgcctctcaatattcctggcaccccagtcctcgaagactttcctcagaatgacgatgagaaggagcggctgcagcggaggcgctcgagggtctttgatctgcagttcagcactgactcacctcgcttattggcctccccctccagcaggagtattgacatttcagctactatccccaagtttacaaacacgcagattacggaacattactccacctgtatcaaactgtccactgaaaataaaatcactaccaagaatgcttttggtttgcacttgattgattttatgtcagagattcttaaacagaaagacaccgaaccaaccaactttaaagtggctgcgggtactctggatgccagcaccaagatctatgctgtgcgcgtggatgccgtccatgccgatgtatacagagtccttggggggctgggcaaagatgcaccgtctttggaagaagtagaaggccatgttgctgatggaagtgctactgaaatgggaacaaccaaaaaggctgtaaagccaaagaagaagcacttacacagaactattgagcagaacataaacaacctcaatgtctccgaagcagatcggaagtgtgagattgatcccatgtttcagaagacagcagcctcatttgatgagtgcagcacagcaggggtgtttctgtccactctccactgccaggactacagaagtgaactgctgtttccctctgatgtccagactctctccacgggagaacctctcgagttgccagagttaggttgtgtagaaatgacagatttaaaagcgcccttgcagcagtgtgcagaagatcgccagatctgcccttccctggccgggttccagtttacacagtgggacagtgaaacacataatgagtctgtgtcggccctggtagacaagtttaagaagaatgaccaggtatttgacatcaatgctgaagttgacgagagtgactgtggagacttccccgatgggtccctgggggatgactttgatgccaacgatgaacctgaccacaccgcagttggggatcatgaagagttcaggagctggaaggagccctgccaggttcagagctgccaggaagaaatgatttcccttggggatggagacatcaggaccatgtgcccccttctgtctatgaaacctggagaatattcttatttcagtcctcggaccatgtcgatgtgggctggcccggatcactggcgctttaggcctcgacgcaaacaagatgctccttcccaatcagaaaacaaaaagaagagtacaaaaaaagattttgaaattgactttgaagatgatattgactttgatgtatattttagaaaaacaaaggctgctactattctgaccaagtccactttggagaaccagaattggagagctaccacccttcctacagatttcaactacaatgttgacactctggtccagcttcacctcaaaccaggcaccaggttacttaagatggcccagggccatagggtagagactgagcattatgaagaaattgaagactatgattacaacaaccctaacgacacctccaacttttgccctggattacaggctgctgacagtgatgatgaagatttggatgacttatttgtgggacctgttgggaactctgacctctcaccttatccttgccatccacctaagacagcacaacagaatggtgacactccagaagcccaaggattagacatcacaacatatggggagtcaaacttggtagctgagcctcagaaggtaaataaaattgaaattcactatgccaagactgccaaaaagatggacatgaagaaactgaagcagagcatgtggagtctgctgacagcgctctccggaaaggaggcagatgcagaggcaaaccacagggaagctggaaaagaagcggccctggcagaagtggctgacgagaagatgcttagcgggctcacgaaggacctgcagaggagcctgccccctgtcatggctcagaacctctccatacctctggcttttgcctgtctcctacatttagccaatgaaaagaatctaaaactggaaggaacagaggacctctctgatgttcttgtgaggcaaggagattgagttcactatggagaagtcagcagcaggaggcccatcccttactcagttgccgggacatccccagtctcgggggaagaagatgccatgggcttatacccaggctgtagccaactaccaacgtgcctgtttgtttgttgctctttccttctctccatcatagtctgggtgccagcgccctgaagctccgtgctcaactgattaaactttactgccctatggtgaccatctaggagaggggagggcagagggggtgagggtactattctggattgagaaaacctatatccattctttatatcaatgtatagttttagtctcctaaattgatctgttattttccaaactattctcttgtagaaaattttccagtgggcacttaatggtgcccttgaagaacttcctaatccatgtacataaaatacatcatatgtacacttataaatgtatatagaatgctcaaaaat

SEQ ID NO: 3620 - DNA, 1804 bp, Homo sapiens
  source 1..1804: mol_type = genomic DNA
atccgttagaaggagcattgaggagtagatacccacttgccatggcctgtgggccgggggatcttcaaagccttacatctccgctttcctctgccagattagattatcagccgtctattgaagggccctggctccgggcctgcggtcagaccaacgtgtcctgcagggtggtgaaggggaagctggtagaggtaggcaagtggccatggcagagattcaaggacctcagcctgtactccgtgatggtgggagtccaccagcgcccagaaaatagcactcagctcccgctcactcgcatggtgattcataaggatttcagcaatctcatgtctcaggacattgccctcctaaagctcagggactccatctcgtggtcccccttcgtccagcctgtctgcctccctaacatcaaattcaagccatccattggaagcatgtgctgggtaatcggctggggaactacagggaaaaaaggttgactctggaagctcccttgtctgccaaatggacaagacctggattcagataggagtggtaagctggagctttagttgtggccagcgccacttcccagttccttgggcaaagccccactggaggggctggagggaaagtagggtcacttggagatcctggatgccagcccctgaggtttggtcttcatctcactgcgggaggggtgacaccatgagccagtccagggcaatgggctgcgaggccggcctcgccttctctggcagaccccgaccacccagacactgccctcgaccaccatggagacccaattcccagtttctgaaggcaaagtcgacccataccgctcctgtggcttttcctacgagcaggaccccaccctcagggacccagaagccgtggctcggcggtggccctggatggtcagcgtgcgggccaatggcacacacatctgtgccggcaccatcattgcctcccagtgggtgctgactgtggcccactgcctgatctggcgtgatgttatctactcagtgagggtggggagtccgtggattgaccagatgacgcagaccgcctccgatgtcccggtgctccaggtcatcatgcatagcaggtaccgggcccagcggttctggtcctgggtgggccaggccaacgacatcggcctcctcaagctcaagcaggaactcaagtacagcaattacgtgcggcccatctgcctgcctggcacggactatgtgttgaaggaccattcccgctgcactgtgacgggctggggactttccaaggctgacggcatgtggcctcagttccggaccattcaggagaaggaagtcatcatcctgaacaacaaagagtgtgacaatttctaccacaacttcaccaaaatccccactctggttcagatcatcaagtcccagatgatgtgtgcggaggacacccacagggagaagttctgctatgagctaactggagagcccttggtctgctccatggagggcacgtggtacctggtgggattggtgagctggggtgcaggctgccagaagagcgaggccccacccatctacctacaggtctcctcctaccaacactggatctgggactgcctcaacgggcaggccctggccctgccagccccatccaggaccctgctcctggcactcccactgcccctcagcctccttgctgccctctgactctgtgtgccctccctcacttgtgggccccccttgcctccgtgcccaggttgctgtgggtgcagctgtcacagccctgagagtcagggtggagatgaggtgctcaattaaacattactgttttccatgcc

SEQ ID NO: 3621 - DNA, 2903 bp, Homo sapiens
  source 1..2903: mol_type = genomic DNA
ggggtgtggctctgccggcccaggcgcgatgaggcggctgcccgctgggtggcgccgatttcccggggaggtcccttctgggcccccggcggaggtgggagagagtcaggcaggagccgaggccggggagccctcttcgtcagctggtgctcactgcgccgcgccagcgccagccgggactcacccgcagctccatgcttgtgcccggttcgactcgtccatactccaagaagaggcagaattctaagagtgcccagggtctggctggtcttcgaaaccttgggaacacgtgcttcatgaactcaattctgcagtgcctgagcaacactcgggagttgagagattactgcctccagaggctctacatgcgggacctgcaccacggcagcaatgcacacacagccctcgtggaagagtttgcaaaactaattcagaccatatggacttcatcccccaatgatgtggtgagcccatctgagttcaagacccagatccagagatacgcaccgcgctttgttggctataatcagcaggatgctcaggagttccttcgctttcttctggatgggctccataacgaggtgaaccgagtgacactgagacctaagtccaaccctgagaacctcgatcatcttcctgatgacgagaaaggccgacagatgtggagaaaatatctagaacgggaagacagtaggatcggggatctctttgttgggcagctaaagagctcgctgacgtgtacagattgtggttactgttctacggtcttcgaccccttctgggacctctcactgcccattgctaagcgaggttatcctgaggtgacattaatggactgcatgaggctcttcaccaaagaggatgtgcttgatggagatgaaaagccaacatgctgtcgctgccgaggcagaaaacggtgtataaagaagttctccatccagaggttcccaaagatcttggtgctccatctgaagcggttctcagaatccaggatccgaaccagcaagctcacaacatttgtgaacttccccctaagagacctggacttaagagaatttgcctcagaaaacaccaaccatgctgtttacaacctgtacgctgtgtccaatcactccggaaccaccatgggtggccactatacagcctactgtcgcagtccagggacaggagaatggcacactttcaacgactccagcgtcactcccatgtcctccagccaagtgcgcaccagcgacgcctacctgctcttctacgaactggccagcccgccctcccgaatgtagcgccaggagccacgtcccttctcccttccccgtggtggccccgctccctaaattttttaaaaagacaaaaacaaaacaacaacaacaacacacaaacctgacaagagaaaaacaaacctgaagctgccgagcaggagtggatgcagcctgatcagggtctggagcaaggagccgggctttcctgagctgtggcccggcagggaagatcgcctggacgtggagccagcatcgccccgtgccctcggcgtttgcatttgtaaacttgtggtcttcctatgtgtcagaaacaactgtgtcttgggggggaagaccctcgctgcgccgcttcccgccgcagcgcccgcgcctccgaggggacagcgccctctggagctcgctgggagcatcaccgcctggacgcccgcgccgcggaggagccggcgcccatctccacccgcacggctcgccggtccagagccatgagccaagagccctcttcacgctgctaactccaggggacagacgaagggacatctttggaaaacgctggttttggtttttaaaaagcccaactttttttttttaatttccataactaaagtgttcagactggagtgctctccttcaggcctcttcatagctgggacgttgcactggtccttttattgcttttccaagtacaactttctaatgctagccctccgtggtgctaggtgggcgttggccaggccccaagcacagccacagtagacctgggatctaaaacaagtttctgttttgggggtttgggttttttttttttttttttaatgttttgaatggaatttagttgcctccaagaattgtgccttatagcatttggggaccagggggtaactgcccctcctgaaatatccctcagcctcttcccttttccccagtgctctgttcaaacccgcctgggaaagggatcctgcccttagccctggctcgttgtgcattgcagtgaggcaaagaagaaagcaggtagattccttccgacagggcatcaagttcttcccgcccacgtcctctagcccacccctggtctgctccccagctgtttgaaggatagcacaagcccctcgtccctagagcttctctcccttttatttattctcttaacatccctttccccctggccttcctgcccccgcccccttctcagagcctcctagacaataggccctttggaccgagtttctcagggatgcccaggccacccctcagctcttcttagcgctggtctccagtcctgccctgggagctggagcctgggtatttggggacatcttgcctcagttgtatggttctttcctgtgggctcaattttgccctacatagttggataaaactctgtgctgtcctggagagtaaagctgttcacccacacagctgggcccggcttgtgccccgtggagcctggcacattccaggctcctaggaggaggcatcagagaaagacaccctgagttttactggcctgacacccttctccagagaagacctgtgaacctgagcccaagggcaagtgtacacttgtttactgtgtaagcaagagtagaagaatgtctaatgtacagtggaaccttgtacagaataaataatagctttgagaaatca

SEQ ID NO: 3622 - DNA, 3045 bp, Homo sapiens
  source 1..3045: mol_type = genomic DNA
gatggaccccggcgacgccgccattttggagtcttccctaaggatcctctaccggcttttcgagtcagtgctgccgccgctgcccgcggctttgcagagcaggatgaatgtgatagaccacgtgcgggacatggcggccgcggggctgcactccaacgtgcggctcctcagcagcttgttacttacaatgagtaataacaaccctgagttattctccccacctcagaagtaccagcttttggtgtatcatgcagattctctctttcatgataaggaatatcggaatgctgtgagtaagtataccatggctttacagcagaagaaagcgctaagtaaaacttcaaaagtgagaccttcaactggaaattctgcatctactccacaaagtcagtgtcttccatctgaaattgaagtgaaatacaaaatggctgaatgttatacaatgctaaaacaagataaagatgccattgctatacttgatgggatcccttcaagacaaagaactcccaaaataaacatgatgctggcaaacctgtacaagaaggctggtcaggagcgcccttcagtcaccagctataaggaggtgctgaggcagtgcccattagcccttgatgccattctaggcttgttgtccctttctgtaaaaggggcagaggtggcatccatgacaatgaatgtgatccaaaccgtgcctaacttggactggctctctgtgtggatcaaagcgtatgcttttgtgcacactggtgacaactcaagagcaatcagtaccatctgttcactagagaaaaaatccttattgcgagataacgtggacctattgggaagcttggcagatctgtacttcagagctggagacaataaaaactctgtcctcaagtttgaacaggcacagatgttggatccttatctgataaaaggaatggatgtatatggctacctactggcacgagaagggcggctagaggatgttgagaaccttggatgccgccttttcaatatctctgatcagcatgcagaaccgtgggtggtttctggctgtcacagcttctatagcaaacgctactcccgggccctctatttaggagccaaggccattcagctgaacagtaatagtgttcaagctctgctacttaagggagcagcacttaggaacatgggcagagtccaagaagcaataatccactttcgggaggccatacggctcgcaccttgtcgcttagattgttatgaaggtcttatcgaatgttacttagcctccaacagtattcgagaagcaatggtaatggctaacaacgtttacaaaactctgggagcaaatgcacagacccttacccttttagccaccgtttgtcttgaagacccagtgacacaggagaaagccaaaacattattagataaagccctgacccaaaggccagattacattaaggctgtggtgaaaaaagcagaactacttagcagagaacagaaatatgaagatggaattgctttgctgaggaacgcactggctaatcagagtgactgtgtcctgcatcggatcctaggagatttccttgtagctgtcaatgagtatcaggaggcaatggaccagtatagtatagcactaagtttggaccccaatgaccagaagtctctagaggggatgcagaagatggagaaggaggagagtcccacggatgccactcaggaggaggatgtggacgacatggaagggagtggggaagaaggggacctggagggcagcgacagtgaggcggcccagtgggctgaccaggagcagtggttcggcatgcagtgagggggcggcagctccatggccgcagtggcctgccctgctctgagcacttccgtggactgaaggaaccgtaggagcctgctctcagaaggacaatgattcagcatgtgattgcagcaggggtctctgccccctcgctcccaattcctagtcgtgacttcatttctaaaacagagcctgaccaaccttccatgtatctccatcctcccctgctccagccagggaggactgagggagtgccccgagacccacgcacatgttggggcttctgggccaagagtactttttatataactaatttctaaatccaaaagctcaaggaatagacagtgttctgtgacatggattggtttgaaggagttacccaccatcccagcacgataatgtcatctcccaagttggatggcagcacgatctggccctagggagcttcctgttcccagaagtcattgtcctgggctatccagatgtccctagtaaatcttgcttccttctgcaatgttagtaatgccttaagctgacagttgctattttgcagaacagttttcctctttgcttagctagtaacttgcctctgagcctgggctgatctgagaaacaggtgtgacaagagcatgaaccagaggtgcacctggggcagttccctaataaaactggtttgtacagtcatggtgttggggtgatcagaatggaagcccttttcaaaatagactcttagtatttttgtcttattcgcaatgcattgattcagccccagaattatttgccagaaatagactttcttcccctggtgttgggagccaggagggttggaaagctcaggaaccctgagctggttcatctgtttgcatattgggtaggttaatttccctggagcctgagagtctttggccagatttcagctgcgtctgcctggctcttttgctgcagctgtgagattggggtctggttccagcagtctgtcactggtcagcctgagtatcacaccctgagctctggggctgggagtttcttcccacaccctctcccttgtgccttaagttgcgatggctctgagtatacaattaatcggaggtgaggggtgggtgtcacagctaatcccaaattcaaaaattagtccaaggtgctgcaaaatataaatttgatgtcagtagaaagtcgtatcctaaaatgtaaaaactgtaagtgtacagtagttaatgagctcagaacatctgataactgcaatttaaaatgggcaaaaagtt

SEQ ID NO: 3623 - DNA, 768 bp, Homo sapiens
  source 1..768: mol_type = genomic DNA
agtggcggaggctcggtcacccgggtgagtccccactccggctgcccgcgtccaccaaggagatgcgtgttccctttccggcttattgtctgacagaccctctgccttatcccgctggtgtcactcgggtgggggaaaccgggctgcggagaacgggccctagaggagactaagctctcttcctatccctagcctcgctgcttttctcttttgaaataataagactggcttttataaaacattttcagataggtaaaggaaaacatgcctgccacacggaagccaatgagatatgggcatacagagggacacacggaggtctgttttgatgattctgggagttttattgtgacttgtggaagtgatggtgatgtgaggatttgggaagacttggatgatgatgatcctaagttcattaatgttggagaaaaggcatattcatgtgctttgaagagtggaaaactggtcactgcagtttctaataatactattcaagtccacacatttcctgaaggagttccagatggtatattgactcgcttcactacaaatgcaaaccatgtggtctttaatggggatggtactaaaattgctgctggatctagtgattttctagtcaaaattgtggatgtgatggatagcagccaacagaaaacatttcgaggacatgatgcccctgttttaagtctttcctttgatcctaaggacatctttctggcatcagctagttgtgatggatctgtcagagtgtggcaaatttcagatcag

SEQ ID NO: 3624 - DNA, 473 bp, Homo sapiens
  source 1..473: mol_type = genomic DNA
cctggaaacccaccgagaacctccaccctctgacaccatggtcaactcctgttgtggctctgtgtgctctgaccagggctgtggcctggagaactgctgccgccccagctgctgccagaccacctgctgcaggaccacctgctgccgccccttgtgctgtgcctcctcttgctgctaaatctctgctgtgaacacaccacttccttattacgtcctttcctacagatgaaggctctcattgcaaacatgcggactgttcaagagaattgatctgggtcccataagcaaacctcatccttagaaattctgtatttgcattctaccttttgtccaaactcccttccttccaaaggaattcattgacaatctcctaataaattgacaaattgtcctccaacatcctcccacctctttgacttcaggacatttattcatcatgcctaaggaatttgaagattgcctccatcatttgt

SEQ ID NO: 3625 - DNA, 697 bp, Homo sapiens
  source 1..697: mol_type = genomic DNA
tggtcggcccgagcggaccctcgcggcggccatggcgtcggtggtggaatacaagggcctcagggccggctaccactgcggctactgcgattccaaggagggcaaagcgtcctgcggcatgtgggcacattccatgacagtacaggattatcaggatctcatagaccgaggatggcgaagaagtggaaaatatgtgtacaaacctgtcatgaatcaaacatgttgtcctcagtacacaataaggtgccgacctttacaatttcagccttcaaaatctcacaagaaggttttgaaaaaaatgttgaaatttctagctaaaggggaggttcccaaaggaagttgtgaggatgagcccatggattccacaatggatgatgctgttgcgggtgactttgcattgataaataaactggatatacagtgtgatcttaaaacactcagtgatgacatcaaagagagtttagagagtgaaggaaaaaattcaaagaaagaagaacctcaggaattacttcagtcacaagatttcgtaggagagaagttgggctctggtgaaccgtcacattcagttaaagttcacacagttcctaagccaggcaaaggggctgatttgagtaagcctccatgtcgaaaagcaaaggaaatccggaaagaaaggaaaaggttaaaactaatgcagcagaacccagctggagaactt

SEQ ID NO: 3626 - DNA, 859 bp, Homo sapiens
  source 1..859: mol_type = genomic DNA
gggcggcagagctggagtgaagggagctagtggtaaagggagctggtggaggggtggcggcaggggtaaggggcaggggacaccctctagacggagagcgggctccgaggtcctggctggccctcggtgcgcccgcccctgtgttggtcccacaatccctggcaatgagaggccagggtttattggacagagtcagttgtggggttcagagggtcagcaatcaatcaatcctccgaatccagagatttagacccagtcgtccgtattaggactggaggggggtcaataggttcagtgtttgagatgccaagggaacctgtcttttgatttggggttcaacatacagagtttaggtagcagtcaccattatgctcaaagcggtgatcctgattggaggccctcaaaagggaactcgcttcagacctttgtcttttgaggtgcccaaaccattgtttcctgtggcaggggtccctatgatccaacaccatattgaagcctgtgcccaggtccctggaatgcaggagattctgctcattggcttctaccaacctgatgagcccctcacccagttcctagaagccgcccagcaggagtttaaccttccagtcaggtacctgcaggaatttgcccccctaggcacagggggtggtctttaccattttcgagaccagatcctggctgggagccccgaggcattcttcgtgctcaatgctgatgtctgctccgacttccccttgagtgctatgttggaagcccaccgacgccagcgtcaccctttcttactccttggcactacggctaacaggacgcaatccctcaactacggctgcatcgttgagaatccacagacacacgaggt

SEQ ID NO: 3627 - DNA, 568 bp, Homo sapiens
  source 1..568: mol_type = genomic DNA
agaggtgacgcttctttgggggcgggctggagttttctggccgtgaatggcagagcgctaatggccgcctccaatgtggcccaatcagaaagaaaggaaggctgggaactaagaagctattggttggtgatccctggaccaatcggaggagccgtgatttggcgggagtcttgaccgccgccgggctcttggtacctcagcgcgagcgccaggcgtccggccgccgtggctatgttcgtgtccgatttccgcaaagagttctacgaggtggtccagagccagagggtccttctcttcgtggcctcggacgtggatgctctgtgtgcgtgcaagatccttcaggccttgttccagtgtgaccacgtgcaatatacgctggttccagtttctgggtggcaagaacttgaaactgcatttcttgagcataaagaacagtttcattattttattctcataaactgtggagctaatgtagacctattggatattcttcaacctgatgaagacactatattctttgtgtgtgacacccataggccagtcaatgtcgtcaatgtatacaacgata

SEQ ID NO: 3628 - DNA, 991 bp, Homo sapiens
  source 1..991: mol_type = genomic DNA
actctggtggtttcaggaagggatgatccaccaacacattctcagccagacagtgatgatgaagcagaagaaatacagtggtctgatgatgagaacacagccacgcttacggcaccagaatttcctgagtttgccactaaagtccaggaagctatcaattccctcgggggcagtgtctttcctaagcttaattggagtgccccaagggatgcgtattggatagcaatgaatagttctctgaaatgtaaaaccctcagcgacatctttctgcttttcaagagttccgatttcatcactcgtgacttcactcagccgtttattcattgtactgatgattctccagatccatgtatagaatatgagctcgttctccgaaaatggtgtgaattgattcctggggctgagtttcgatgttttgtcaaggaaaacaagcttattggtatttctcaaagagactacacacaatactatgatcatatttctaaacaaaaggaagaaattcgcagatgcatacaagactttttcaagaaacacatacagtacaaattcttagatgaagactttgtgttcgatatatacagagacagtagggattccccagctttccgttgcacaaacagtgaagtgacagtccagcccagcccctatttgagttaccggctacccaaggactttgtagacctctctactggggaggacgctcacaagctaatagacaaatcagcaggaggacgactgatgagcgtactggaactggagaagaggaggccccgccccaccgctccgggagctgctcatcagccgcaacttcctgccgaccctgatgcgggtgggccgagcagtgtggacatcagccactttttatattcatgtacattcacctggggaaaaaaacggagggactttgctacttgtaaaaataacataataaatagatcttaaacataggaaaaccatactgttctgataataaaatgctttctatgaaata

SEQ ID NO: 3629 - DNA, 1499 bp, Homo sapiens
  source 1..1499: mol_type = genomic DNA
cgcgacgggccacgcacgtccgggcgtccagttcggggcagcttctccggctgggtggcaaccaactatatctgaggaccagagccattttggggcaccagagcttgtgacctctccatctccacccagctgggtccaggggccactctcagcactcacctcagcagctgacatcataaagcagacttgggaacctggaagcactctggagaacctttccctgagacatggagctttggggccgaatgctgtgggccctcctgtctggcccagggaggaggggaagtacccggggctgggccttcagctcatggcaaccccaaccacctctggctgggttatccagtgccatagaactggtcagccactggactggggtctttgagaagaggggtatccctgaggcccgggaatccagtgagtacatcgtggctcatgtccttggagccaaaacatttcagagcctgaggccggcactttggacccagcccttgacctctcagcaactacagtgtatccgggagctgagtagccgtcgattgcagaggatgccggtgcagtacatccttggagagtgggacttccaggggctcagcctaaggatggtgcccccagtgtttattcctcggccagaaacagaggaactggttgagtgggtgctggaagaggtggcccagaggtcccatgctgtgggatccccaggcagccccctcattctggaggtgggctgcggatcaggagccatctccctcagcctgctgagccagctcccccagagccgagtcattgctgtggataagcgggaagctgctatctctctgacccatgagaatgctcagaggcttcggttgcaggacaggatttggatcatccacctcgacatgacctcagaaaggagctggacacacctgccctggggccccatggacctgattgtcagcaaccctccctacgtcttccaccaggacatggagcagctggcccctgagatccgcagctatgaagaccccgcggccctggatggtggggaggagggcatggacatcattacccacattctggccttggcaccccggctcctgaaagactctggtagtatcttcttagaagtggacccaaggcacccggagcttgtcagcagctggcttcagagccggcctgacctgtaccttaatcttgtggctgtgcgcagggacttctgtgggaggccccggttcctgcatatccggaggtctgggccatagcatggctgccctgtggatgccttgtcagtgccgccagcctgaccagaggggaggtggatggcactttccagagcccaggttcttatggcatttcccagggttctgtgatttccccatgctctgcatttctaggatatttctaggacacctggattggctccatcacatcagagtggctgagggcagttgctctgtgttggtgaaattgctgtgggggtatcgggggatatggccagtaaagtattgagagactaa

SEQ ID NO: 3630 - DNA, 1280 bp, Homo sapiens
  source 1..1280: mol_type = genomic DNA
cgcagtactggacccgagcgcgacggtgcggctggcggacccgggctggcttgtggggaaacgaaactgagggaggaggcggcggctctggcagcggcggcgacagtgtcggcctgaccccccctccgctccccggcagctcgctctctcccctcagcttaacgatgaagaggagaactgacccagaatgcactgcccccatcaagaaacagaaaaaaagagttgcagagcttgccctgagcctcagctccacgtccgatgatgaacctccctcctctgtcagtcatggagcaaaagcatctactacaagccttagtgggtctgatagtgagaccgaggggaaacaacacagctctgactcttttgacgatgcattcaaagcagactctcttgtggaaggaacttcttctcgctattccatgtataatagcgtctcccagaagcttatggccaagatgggcttcagggaaggtgaaggattgggtaaatacagccagggtcggaaggacatcgttgaggcttccagtcagaaaggtcgaagaggcttgggtctgacactccggggctttgaccaggagctgaacgtggactggcgagatgagccagagcccagtgcttgtgagcaggtgtcatggtttccagaatgtaccactgaaattcctgacactcaggaaatgagcgattggatggtggtgggaaagagaaagatgattattgaagatgaaacagagttttgtggggaagagctgcttcacagtgtgttgcagtgtaagaagccactggtgaaggaccgggaagctgagcttctgtactttgctgatgtctgcgcaggcccaggtggcttctcagagtatgtgctgtggaggaagaagtggcatgcaaagggctttggaatgactttgaagggccctaatgacttcaagctggaggacttctactctgcttccagtgaactcttcgaaccctactatggtgagggtgggattgatggagatggagatatcacccgcccagagaacatctctgcttttcggaattttgtcctggataacacagatcgcaagggtgtccattttctgatggctgatgggggtttctcggtggaggggcaggagaacctgcaggagatcctcagcaagcagctgcttctgtgtcagttcctcatggcgctgtccattgtccggacaggaggccacttcatctgtaaaacctttgacctgttcacaccgtttagtgtggggcttgtctacctgctgtactgctgctttgaacgagtttgt

SEQ ID NO: 3631 - DNA, 757 bp, Homo sapiens
  source 1..757: mol_type = genomic DNA
cacagcttgcatcaatggtgtggaataacccaagtcagcaacaatttatgcaatttggaggaagctctggatcacagttgcctcaaatccagacagatgttgtacttccatcatgcaaaaaaaaagctcctgctgaaactcctgtgaaagaaagactttttattgtgtttaatcctcatcctttacctttagacgtattagaagatatattctgtcgttttggtaacctgatcgaagtttaccttgtgtcaggaaaaaatgtggggtatgccaagtatgccgatagaataagtgctaatgatgccattgccactctacatggaaagattctgaatggggtgagacttaaagttatgctggcagattcgccaagagaagaatctaacaaacggcaaagaacttactgattcttgagtggccctgaagctgcactatgttggaggtttccttgactaagagaaccacatgcggcattcagctcagtaggggagtcataaaagatctcgcctctgaccagaagagtatgaatgacaaaggtgacataaccagcacagaaagatgtcttagcctctgcacatcagctgatttagaatacttatgtagatagcggttggggtcgggggggtgcggaatgttcttttcagcttctttgccctgagaactttgatcttattgcaaggaagtcccttaccctcttctaccctagatctgatggacctcctgggatttcctggggaaatgaaatgagtctaacacc

SEQ ID NO: 3632 - DNA, 4222 bp, Homo sapiens
  source 1..4222: mol_type = genomic DNA
ccctgtctctactaaaaatacaaaaaaattagctggacatggtggtgggtgcctgtaatcccagctactcaggaggctgaggcaggagaatgacatgaaccttggaggcggagcttgcagtgagcccagatggcgccactgtgctccagcctgggcgactgagcgagactccgtctcaaaaaaaaaaaattctttcatttatttagttacttttagagatagagcctcccgctgttgcccaggctggagtgcagtggcagtcatagcttactgcagctttgaactcctgggctcaaatgatcctcctgcctcagcctctccagtagctgggactgactacaggcacgtgccaccacacccagctaatttttatttttatttttatttttttgagacagggttttactctgtcacccaggctagagtgcagtggtgagatcatggctcactgtagcctctgtctccggggctcaatcaatcctcccacctcagcctccccagtggctgggattactggtgcacaccaccataccctgctaattgtatttatttttagtagagatgggattttgccatgttgcccagactggtcttgagctgctgggctcaagcgatcttcccatcacagcttcccaatgtgctgggattacaggtgtgagccactgtacctggccagctttacttcttttaccagcactcctgattttataaatagtgaggcttatcaaccccatttctacccaaatcttctggtagacttgagtatagtagggcttcataggtagcagccctgtccctgtcctattatgatggtagctgttgtgatgtggcgatctctgatctagaaacccctgaggggccattgtggcctgcccagtctcccggccacggttgaaaccagacgtgcagtggggctgacccctgtgccccaccccagagtcatgccagcgtgggtggtggggcattctctgggatgaatgatctggatcccatagccatctgtgtcctgtttgaggaatgggaccctcaaacagagaacagccaagatgctcaagcaggtgtgtgcttgggccagactctgcagcctttggtttgggacttgactgccattcactgaaggggcccaggaaatgggcagctcacatggtgttgctgggtgtccagctgcggcagtttagcagaggaggacttgtaatgagatggtagcttcttataggctaagacatgatttttctgttcttttactacctcctgcaccttctagaactgttccttctctgatgctgttttcctttcttccagtgatttatctctagggtctccatagcaggggaggtagggtcagactcctgagatggctgatgtcctaccctgcccccaaccaggggccccaggagactcctttttcttactgcaactttggcctcctcagtctgcagatctccaggggagcccaccagcctagtcaacatggcctcggaagacattgccaagctggcagagacacttgccaagactcaggtggccgggggacagctgagtttcaaaggcaagagcctcaaactcaacactgcagaagatgctaaagatgtgattaaagagattgaagactttgacagcttggaggctctgcgtctggaaggcaacacagtgggcgtggaagcagccagggtcatcgccaaggccttagagaagaagtcggagttgaagcgctgccactggagtgacatgttcacgggaaggctgcggaccgagatcccaccagccctgatctcactaggggaaggactcatcacagctggggctcagctggtggagctggacttaagcgacaacgcattcgggcccgacggtgtgcaaggcttcgaggccctgctcaagagctcagcctgcttcaccctgcaggaactcaagctcaacaactgtggcatgggcattggcggcggcaagatcctggctgcagctctgaccgaatgtcaccggaaatccagtgcccaaggcaagcctctggccctgaaggtctttgtggctggcagaaaccgtctggagaatgatggcgccactgccttggcagaagcttttagggtcatcgggaccctggaggaggtccacatgccacagaatgggatcaaccaccctggcatcactgccctggcccaggctttcgctgtcaaccccctgctgcgggtcatcaacctgaatgacaacaccttcactgagaagggcgccgtggccatggccgagaccttgaagaccttgcggcaggtggaggtgattaattttggggactgcctggtgcgctccaagggtgcagttgccattgcagatgccatccgcggcggcctgcccaagctaaaggagctgaacttgtcattctgtgaaatcaagagggatgctgccctggctgttgctgaggccatggcagacaaagctgagctggagaagctggacctgaatggcaacaccctgggagaagaaggctgtgaacagcttcaggaggtgctggagggcttcaacatggccaaggtgctggcgtccctcagtgatgacgaggacgaggaggaggaggaggaaggagaagaggaagaagaggaagcagaagaagaggaggaggaagatgaggaagaggaggaagaagaggaggaggaggaggaagaagagcctcagcagcgagggcagggagagaagtcagccacgccctcacggaagattctggaccctaacactggggagccagctcccgtgctgtcctccccacctcctgcagacgtctccaccttcctggcttttccctctccagagaagctgctgcgcctagggcccaagagctccgtgctgatagcccagcagactgacacgtctgaccccgagaaggtggtctctgccttcctaaaggtgtcatctgtgttcaaggacgaagctactgtgaggatggcagtgcaggatgcagtagatgccctgatgcagaaggctttcaactcctcgtccttcaactccaacaccttcctcaccaggctgctcgtgcacatgggtctgctcaagagtgaagacaaggtcaaggccattgccaacctgtacggccccctgatggcgctgaaccacatggtgcagcaggactatttccccaaggcccttgcacccctgctgctggcgttcgtgaccaagcccaacagcgccctggaatcctgctccttcgcccgccacagtctgctgcagacgctgtacaaggtctagactcaaagcctctcccatcccttggcctggaccagtgagctggggagggactcggatgaactgaggcgcagcctacgccattgccttggacaggactctggccacaggcagggcgggtctgtgtcccatgtgtcctgtcagtcccctgagtatgtgtgtgggtgtggcgcatgtgcaggtctgtgcctcctgtcgggatttgggttttaacgtcttctgctggcccagccctgctctgttgtggggagttggcccccaggggaaagggctgtgagctgctccgccattaaactcacctccacctgagggcgctctgctgatctccgcctgggccctgatggccgtccccacccacctgccttccggcccggctccctggcggagccagaacccagggagttgcccgcgtgctgtccttcccctctgtgttgtgattgggttgtttcctgccctgcctggggctgcttctcgtcaccaagccctggtcctgcggcagctgtcacccctaccatccataccactgtgctgaccgctcagcctgaagagcagagaatgccatgggtgggactgtgggggtcggatcgtggggttgttggcagagggcaaccctgggccccacaccgtgtggacaggcagacaccagattgtccaggagcaggagctgctgggactgcgctggccccggacctagtgggccttctcctggctgctgagatgtcgtctgtgactggcctggctggagggggagtgttgacaacccaaagctgttctccagtctggggagggagaggcagggtccccaatgtccgagctgcatctggacgctgctcttaaaggacctcctggggcaggggagcggtagggtctggactgggcagatgctgtatgacctccctgagcacccgtgactgccccatgctttcccctttgtgctctgtgtgtgtctgggctgtgcccgggggcttcacaaataaagtcgtgtggcagc

SEQ ID NO: 3633 - DNA, 4599 bp, Homo sapiens; identical to SEQ ID NO: 3264
  source 1..4599: mol_type = genomic DNA

SEQ ID NO: 3634 - DNA, 477 bp, Homo sapiens
  source 1..477: mol_type = genomic DNA
atgacccactgttgctccccttgctgtcagcctacctgctgcaggaccacctgctgcaggaccacctgctggaagcccaccactgtgaccacctgcagcagcacaccctgctgccagcccgcctgctgtgtgtccagctgctgccagccttgctgccgcccaacttgctgtcaaaacacctgctgtaggaccacctgctgccagcccacctgtcccacctgctgtgggtccagctgctgtggccaaaccagctgtgggtccagctgtggccagagcagctcctgtgcacctgtgtactgcagaagaacctgctactaccccacgactgtctgcctgcctggttgcctaaaccagagctgtggctccaactgctgccagccctgctgccgcccagcctgctgtgagaccacctgctgcaggaccacttgcttccagcccacctgtgtgtccagctgctgccagccttcttgctgctga

SEQ ID NO: 3635 - DNA, 3318 bp, Homo sapiens; identical to SEQ ID NO: 2439
  source 1..3318: mol_type = genomic DNA

SEQ ID NO: 3636 - DNA, 9497 bp, Homo sapiens
  source 1..9497: mol_type = genomic DNA
agaatgcagcgcatggcgcgtcattgaagagagaccatgatggcggcggcgctggggcccccagaagtgatcgctcagctggagaacgcggctaaagttctgatgcaaactctggcctgttctattctgactgcgctattgagtgaattttcaagttcaagtaaaactagcaacattggattgagcatggaattccatggtaactgcaaaagagtttttcaggaagaagaccttcgtcagatcttcatgttaactgttgaagttctgcaggagttcagcaggcgggaaaacctcaatgctcagatgtcttcagtatttcagcgttaccttgcactcgccaatcaagtcttgagctggaactttcttcctccaaaactgggcagacattatatagctatgtttgaatcctcgcaaaatgtgctgttgaagccaacagagtcctggcgggagactcttctggacagcagagttatggagcttttcttcacagtacatcgaaaaatcagagaagattcagatatggcacaagattctctgcagtgccttgcccagttagcttctcttcatggacccatcttcccagatgaaggatcacaagttgattatctagcacacttcattgagggattactgaatactatcaatggaattgaaatagaagattctgaagctgtggggatctccagcattatcagcaacctgataaccgtgttcccacgaaatgttttaactgccattccaagtgaacttttctcctcctttgttaactgcctcacacacctcacttgttcttttgggcgaagtgctgcattggaagaagtgcttgataaagatgacatggtatacatggaagcatatgataaattgttggagtcctggttaactttggttcaagatgacaaacatttccataaaggcttttttacccaacatgcagttcaagttttcaattcctatattcagtgccacctagctgctccagatggcacaagaaatttgactgccaatggtgtggcctctcgtgaggaggaagaaataagtgaacttcaagaggatgatcgagaccagttttctgatcaactggccagtgtaggaatgctaggaagaattgctgcagaacactgtatacctcttctgacaagtttattagaagaaagagtaacaagactccatggtcagttacaacgacatcagcaacagttacttgcttcaccgggttcaagcactgttgacaacaaaatgcttgatgatctctatgaagatattcactggcttattttagttacaggctacctcttagctgatgatactcagggagagactccgctaatacctccagaaataatggaatattccattaagcattcatctgaagttgacattaatacaacacttcaaattttgggatctccaggagaaaaggcttcttccatcccagggtacaacagaacagattctgtgattaggctgttgtctgccattctcagagtttcagaagttgaatctcgagcaataagagcagatctcactcatctactaagtccccagatgggcaaagatattgtttggtttttaaaacgctgggcaaagacttatctcctggtggatgaaaaactgtatgatcagataagtctgccattcagtacagcgttcggagcagatacagagggttctcagtggataattggctacctcttacaaaaagtcatcagtaacctctcagtctggagtagtgagcaggaccttgcaaatgacactgtgcagctccttgtcactttggtggaaagaagagaaagggcaaacttagtaattcaatgtgagaactggtggaatttagctaagcagtttgcaagccgaagcccacctcttaatttcttgtcaagtcctgtgcagaggacattgatgaaggctctagtcttaggaggttttgcacatatggacacagaaaccaaacagcagtattggacagaggttcttcagccacttcagcagcgattcttaagagtgataaaccaagaaaacttccagcagatgtgtcagcaagaggaagtcaagcaggaaatcactgccacactagaggccctgtgtggcattgctgaggctacccagattgacaacgtagcaatcctgtttaattttttaatggacttccttaccaattgcattggattgatggaagtttacaagaataccccagagactgtcaatctcattatagaagtttttgttgaagttgcacataaacagatatgctatcttggagagtccaaagctatgaacttatatgaagcctgccttactttgttgcaagtgtattctaagaataatttagggcggcaaagaatagatgttacagcagaagaagagcaataccaagacctgcttctcattatggaacttcttactaacctgctgtcaaaagaattcatagatttcagtgatacagatgaagtgtttagaggacatgagccaggtcaagcagcaaacagatctgtgtcagcagcggatgttgtgttgtatggagtaaacctaattctgcccttgatgtcacaggatctcttgaagtttccaaccctttgtaatcagtactacaaattaatcacatttatctgtgagatttttcctgaaaaaataccacagcttcctgaggatctgtttaaaagtctgatgtactccctagaattaggaatgacatcaatgagttcggaggtttgccagctttgcctggaggccttgacaccgttagctgaacagtgtgcaaaagcacaagaaacagactcaccactttttctagcaacacggcactttcttaagctggtttttgatatgctggttttgcaaaagcacaacacagagatgaccactgcggctggcgaagctttctacacgttggtgtgtttgcaccaggctgaatattctgaactggtcgaaacattactatcaagtcagcaagacccagttatttaccagagattagcagatgccttcaacaagctcactgcaagcagcactcctcctacgctggatcggaagcagaagatggccttcttaaagagtttagaagaatttatggcaaatgttggtggtctcctttgtgtaaaataaacaacagaactttatgcttaatttagatcctttctgcaaagtgcactgaattgctgaaagttgacttgagtcttgtcctattcctcagttcatttggccattttggattttggagagcctgaaactttgatatgtatgtaatacagtgaaacaggagaggtcaacttggcatcagcttctgctgttaagtgttagccacaatctgtcatatatatgtcttttagattctgaatggtgatttaaaattttcaaaatgaaattccatatatgtgcaaacagatatgggcaccacgaaatacatatgcagtgccttttttccttttaacataggtggctagccaaagtttagaatttttgtcattaaatatgaaatggatatatgctaggcagtgtttctcaaaatctccatagatcgcctgcatcacttgaggagctggtgaaaaggcagattcttaggcccaactgtagaccttcagagtcagaatgtctggttgttgggcccaggagtcttcatgttaataagcttctccctttcgtcaccccaaaagttttgaatcaatgaaagagacattgaaaactcttaagaggttttgtgctttctagcttttcctccctttgatgattgggttttataattcagcaggaaggggaaacatcaccaggggtttgttggctttttcttagcttgctttcttgcttgcttgctttcttgcttttcttgctttctgtctctctctttcttttctctctctctctcacatcaacccagtgctgcaggttttgtgtaatacaagtcactaatcatactctgatgcctgaacttgaggaggaaaatacatgtatatttttgttccgtaaaaataaccttaggaactgtagccatttcattgccttaattttaagaggaaaatacaaaaacagctgatttgttttagtaagaaaccacgtcttgatgcttcagagttggtttagggtgttagctgctatgaacctgttgcccctttcgatcgtgtatttatgtaggtttatcagtgaaatgaaaggcttgtttccgtctagtctaactttttgagtgtgtttctatccagccacatagcccatatctactctaaatggcttgcttaagcaataattattttaaaggatgtgaatcactgattcacacagactattgcacgttggggcattaggggcaataattcttatccagacatgggagccagtgaatttaatttcagagattaaaaattcactttagatcctctagtttgatctcttaatcaggatttttatacagctgccaggctcccctaattcagtgtgccagcttacaatgtggaaatgaaagctaatttatacacagcaggcatatgaaactccactcattgcagtactttcacagcacagtgacaggtagaggactctggcacaggtgcactcatgaaactctgcttccaccatgttcctgacacctatctattaaaccattctgcaaatacggtttttctacctgattgcatatagcatatgtgtcattacatgtgatgctgtgcaaaactttgtataattctgtgttattaacagttaacaaaactggagcatctgaattacatccaacctgtgcatgtgatgttaggtagatgtgaatgcagggccttgggccataacttacatttctctcaatttgattagctttgagtcacaattaaggggaagcaaaaacatcttgaaaagactgctaggaaggaaattaatatcagtcatccagaagtacacgtttctgtattttaaaaaatactttgatgcatttatttttaggtgttttttttttccccttaaaaaacttgaagtgatatgcagcagtaatctatttgttttgcattgttcttggtgttttgtgtttcccagatccctcaagctttctcagctgttgtgaattatgtgtatctgtgtgtgtgctaagtacagtctctttaccaaagggcactgaaacacacaattgactggacaggtccacgcgccatgacaaaactataatcaagttattaaaactaaagaggagtgggaaaggaatgccttggtaagtaaaaaggcatctatatttaataacttttatccagatggcaacatatttgcaaaatttgcccagatcctattacaatactaaaaatagaaaatttcacctccatattcctgaggtgtaatttcattagactagttttagtttaaaaagaccttcttcagattggaccaaataatacttataagatcagcagaatgttgaatattagctcactggggtggggagaagccactaccattttttaggtgatggggatgccactgagttgcaacggctagaccttttcagggtggttgtgtccatgtttgcctgattggatgcttattcactttgtgttttcttttgttttattttgtccaattttgtctttagctgtgtttattaacttctccggtcttgttttgttttaatgctcttggcccagtgggtgtcaagaacactggcttaattcaagtcagttgattttttttctattaaaactgttgttaaaatattttttaaaacaaaaacattatttgtgccctcttttatatatgtcaaagggacactgtcaagtatttcatttttagatttttgttttataaaatttctgttgttcatatagtatcctttaacctctagttttccatacatcctttgtttgtttctcattttattttccttgacccatttatttcccaaggcacaatcactaaagactttgtactttcacagtctgttaatgtggtagcacctgtaactgtgttcttgttctgttaaaaggattgatttgcttttatagtccttgtgctggatgagtggctgcctcagtagcaaaactacctgacagtatttgacagtgtcctttccagcaccattatttgggtctttcagggtggccatctctgttagaagacagtagcatgttaacatcactgcattgagtttttgtctggtgtaaagtatgacttttaatgtaaacaaactgcaggtttttttcaaactaattttaagaatttagtcttatttcgttgtaaactgtgtatctaattatattacattactctgttcagatgggatggttactaccacttgtccatgattttcatttgaaaagcaagtatctatatcatttccccccagtcagcattatttaacactccccttaactgtctttgaactttctcttttaacaaaaatgtcaagtctttatagttgtaatatcaccatgtttcccatttctgttaatacttctatgaacccctaaagtattgaagggaactagctgtcagtttcaaggattacaagtttgagtctcctagtattcaacatcattctgaaccctgaaataatatttttctctgttaaacaatttttatctgtttgccacctctgttgttagaggtggttgtcaattgaccttactaagttagctgtctttgatgaggaattattgttattggttcctgaataaaacattaaccttttaagtcagaaggaacctcggtacttcttaaggtttgtttgtgttttctaaaaccagagaataaggaactgatttggctatgaggtttaacattataattttctgtaagctttcccacaaaaaaacattgttgatttgaggatataataatgttttaatctttttaaaatataagtggttattctctgacttggtaactatgttctgaaaacactgcatttaagaatttttaaaaattggttttctaaaattaaaatgtccaaattaggcatattgctgagctcaaattgatgtgaaatgccatggttccagttgaattttaagcatattttcatttagatataaaatatatgaagtatgctttgttgattatagtgagaacccatgacatagttaaccaaagaatatgtttggttcaaataaaaatagaagcttaatactgggcattcatactttttaaagagaatgaatgaagaaatcggtttcctgctgtagttctctatgggtaagtcttagtaaagacgagaatgctgaagtcggccgtggcgattccctcctaggaactgggaggtgtggcttgcccattacccgcttgaagctcacatctttaccctcctctcccactgtggtttgatcttcacctattcccaggccctcccagcaattggagaggtgtctttttttttggttttggttttttttctccccgtctgcattcttaggcctcttagctattaggaactgtcagatacatactagtagctaattttcctagcctgaaattatatactgcatctgcactatgtacctactagggatctgacctcaagtgttttctgagcccaggcttcctggtgtggtgtcttttaccacataaaattattacaaattgcaaatgttggtattgtgatttgattatctgtacaaagaaagaagctctatgcagtgagtttgtggtttaatggtcacaaaaatgttagcactgctaccactcagcacgtgtaaaattttttaaatttataaatattaaaattttaaacttacactaagacttttcagttttatttaaagacccagggatgagtgtactgtttaaatatttacctctattaacataactaatgaaggtataaaattgcatttagtttttcagaagatgctgcaatatgattttaggaaataaggctatgtattgagccagttataggctgaatatcaggttgataaaattttatttgtatttttaaaattcataaatgggagttaaaatgtgtcttttcactaaatatttttattacatttttgttttgaccatgtgtgatttgttcatgggtatttagctagactcttttatgaaatgcattgaaatggtgctagtttgtttaccattataggaagattgacactggggacattacacggtcctaaaataattttaaatttaaaaaaatgaagacatctgtacagataaaaatcaagatttgcatcaccttctgggagaacccgtggtactcacagaatatccagtattagaaatataaaaattttgtctatattttataatatttatctcagcccacagtcttagaaacagtttcacagttactagttaagtcattatctttggtgcatatttagtaaatacttttagcaagtcattctttttggcctttcagggaaagtggtgaattaccatattactgtgtgctagatagatccaccctttgcccagtgttaaatcttgtaaacatatgaagtgaaaagttaatttttaaagaaaatgcatctttaaaatgttcatttttaacctgaatttgctttgaatattctttgatttgtaatgttgttatttagcttatattgagatttattccactccaaaggtggataaagaaaagttgtttaagaaaaccaattagagtgtattttgaatttttgtttctttcattaccaagtgtggggccatacacacaggctaatcatctgtcatttgagacccacagatgatttcaaaggtcccaaataaatacacatctataactgttttttaaaagacatctttaatggtgctctccaaaaatacaattcggttgcttatgagtgatgcctttgacaggctgattagattataaaacagttttgtttttttaaacatagggtctcagattgagtcttgtgcattctatgtaatctcaaatggcagttcagtttgactttcttttaaaactaagtggaaatggtatatttggtgaaactaatgaaagaatcttttgctgggaaattccatacagcacccccagcagcatcctgtctcagtctggcgtataattcaacctcctactgagtgtccctgtaaattatttttaatatatagcatgagagtgaactgaggtaagtcattgatgtttcccagagatgatgaatgaacaaaagcaaataggatctgctaaacatttttattcccacagtagtgagcagttttgttcttgttttgataatgttcatttctgcctaatcttaggcttcaaatacacctttaagaaagcccaagatgtattgagtagtagaacttcttatttgtacacctgtttataactgcactgccctggatgttatggttatttctaaggactgacctggtaaagctacttgaactggtagactgcagggtagaggcagacctagattcaatgtctaactaagctgcttagggcttacattaatttccacaggtctgttatccatatcatgagtttataagtgttcctcccaaagaaaaaatttaaaagtgatggatgaaatataatagtagatgctcaataaattccattgtatttaaagatt

SEQ ID NO: 3637 - DNA, 1133 bp, Homo sapiens
  source 1..1133: mol_type = genomic DNA
gagcttcgcggtgccaccgccccgcccacgcctcctcgccggcctccgagtgcgtcacgtgacgggtcggtggcgctggcggttgctgtcagctgattcccggggttggtggcagcggcggtagcagcaatggactttctcctggggaacccgttcagctctccagtgggacagcgcatcgagaaagccacagatggctccctgcagagcgaggactgggccctcaacatggagatctgcgacatcatcaacgagacggaggaaggtcccaaagatgccctccgagcagtaaagaagagaatcgtggggaataagaacttccacgaggtcttagaaacctgtgtcaagaactgcgggcaccgcttccacgtgctggtggccagccaggacttcgtggagagtgtgctggtgaggaccatcctgcccaagaacaacccacccaccatcgtgcatgacaaagtgctcaacctcatccagtcctgggctgacgcgttccgcagctcgcccgatctgacaggtgtggtcaccatctatgaggacctgcggaggaaaggcctggagttccccatgactgacctggacatgctgtcacccatccacacaccccagaggaccgtgttcaactcagagacacaatcaggacaggattctgtgggcactgactccagccagcaagaggactctggccagcatgctgcccctctgcccgccccgcccatactctccggtgacacgcccatagcaccaaccccggaacagattgggaagctgcgcagtgagctggagatggtgagtgggaacgtgagggtgatgtcggagatgctgacggagctggtgcccacccaggccgagcccgcagacctggagctgctgcaggagctcaaccgcacgtgccgagccatgcagcagcgggtcctggagctcatccctcagatcgccaatgagcagctgacagaggagctgctcatcgtcaatgacaatctcaacaatgtgttcctgcgccatgaacggtttgaacggttccgaacaggccagaccaccaaggccccaagtgaggccgagccggcagctgacctgatcgacatgggccctgacccagcagccaccggcaacctctcatcccagctggcagg

SEQ ID NO: 3638 - DNA, 6003 bp, Homo sapiens
  source 1..6003: mol_type = genomic DNA
ggctctgtgtatgaatgacaaggataccttcagccagctcattctggatgaatgaatgattacactaagtgtcctccacattcctctgtgggctcacttcatggactcactttgcgtgcttgttaaatgtgctgtgttgctcccaagaccatgtaaagcctactgaccactaacctccctcacagcagaaactagacgtcaggttaaaatgggcaactccgacagtcagtacacccttcaaggatctaaaaatcatagcaatactattactggtgctaagcaaattccttgctccctgaaaatacgtggcattcatgcaaaagaggaaaagtcattgcatggatggggtcacggaagcaacggagcaggttacaagtccaggtccctggcccgaagctgcctttctcactttaagagtaaccagccttacgcatcgagactcggtggccccacatgcaaggtctccagaggtgttgcctactccacgcacaggacaaatgccccagggaaggatttccagggcatcagtgctgctttctcaactgagaatggcttccactctgttggccacgagctggcagataaccacatcacctccagagactgcaacggacaccttctcaactgctacgggaggaatgagagcattgcctccaccccaccgggcgaagaccgcaagagcccccgagtgctcatcaaaacgctggggaagctggatgggtgtttaagggtcgagttccacaatggtggcaaccccagcaaagtgcctgcagaggactgcagtgagccggtgcagctgctgaggtactcacctaccttagcatcggaaacctcccctgtgcctgaagccaggagggggtccagcgccgattccctgcccagccatcgcccctctcccacggactctcgcctgcggtccagcaaaggcagctccctgagttctgagtcatcctggtacgactccccttggggcaatgctggagagctgagcgaggctgagggctccttcctggcccccggcatgcctgaccccagtctccatgccagcttcccacctggcgatgccaaaaagcctttcaaccaaagctcttccctctcctccctccgggaactgtacaaagatgccaacctggggagcctctccccctcaggtatccgcctttctgatgaatacatgggcacgcatgccagcctgagcaaccgtgtctcttttgcttccgacattgatgtgccctccagagtggcacacggggaccccatccagtacagttccttcactctcccctgtcggaagcccaaagcctttgttgaggatactgcgaagaaggactccctcaaagccaggatgcgacggatcagtgactggacgggaagcctctcaaggaagaaaaggaaactccaggagccgaggtccaaggagggcagtgactactttgacagtcgctctgatggactgaatacagatgtgcagggatcctcccaggcatctgcttttctgtggtcagggggctctactcagatcctgtctcagagaagtgaatccacacatgcgattggcagcgatcccctccggcagaacatttatgagaatttcatgcgagagttggaaatgagcaggaccaacactgagaacatagaaacatctacagaaaccgccgagtccagcagcgagtcactcagctctctggaacagctggatctgctctttgagaaggaacagggggtggtccggaaggccgggtggctcttcttcaagcccctggtcactgtgcagaaggaaaggaagcttgagctggtggcacgaaggaaatggaaacagtactgggtaacgctgaaaggatgcacgctgctgttttatgagacctatgggaagaattccatggatcagagcagtgcccctcggtgtgctctgtttgcagaagacagcatagtgcagtctgttccagagcatcccaagaaagaaaatgtgttctgcctcagcaactcctttggagatgtctaccttttccaggccaccagccagacagatctagaaaactgggtcactgctgtacactctgcttgtgcatccctttttgcaaagaagcatgggaaagaggacacgctgcggctgctgaagaaccagaccaaaaacctgcttcagaagatagacatggacagcaagatgaagaagatggcagagctgcagctgtccgtggtgagcgacccaaagaacaggaaagccatagagaaccagatccagcaatgggagcagaatcttgagaaatttcacatggatctgttcaggatgcgctgctatctggccagcctacaaggtggggagttaccgaacccaaagagtctccttgcagccgccagccgcccctccaagctggccctcggcaggctgggcatcttgtctgtttcctctttccatgctctggtatgttctagagatgactctgctctccggaaaaggacactgtcactgacccagcgagggagaaacaagaagggaatattttcttcgttaaaagggctggacacactggccagaaaaggcaaggagaagagaccttctataactcaggtcgatgaacttctgcatatatatggttcaacagtagacggtgttccccgagacaatgcatgggaaatccagacttatgtccactttcaggacaatcacggagttactgtagggatcaagccagagcacagagtagaagatattttgactttggcatgcaagatgaggcagttggaacccagccattatggcctacagcttcgaaaattagtagatgacaatgttgagtattgcatccctgcaccatatgaatatatgcaacaacaggtttatgatgaaatagaagtctttccactaaatgtttatgacgtgcagctcacgaagactgggagtgtgtgtgactttgggtttgcagttacagcgcaggtggatgagcgtcagcatctcagccggatatttataagcgacgttcttcccgatggcctggcgtatggggaagggctgagaaagggcaatgagatcatgaccttaaatggggaagctgtgtctgatcttgaccttaagcagatggaggccctgttttctgagaagagcgtcggactcactctgattgcccggcctccggacacaaaagcaaccctgtgtacatcctggtcagacagtgacctgttctccagggaccagaagagtctgctgccccctcctaaccagtcccaactgctggaggaattcctggataactttaaaaagaatacagccaatgatttcagcaacgtccctgatatcacaacaggtctgaaaaggagtcagacagatggcactctggatcaggtttcccacagggagaaaatggagcagacattcaggagtgctgagcagatcactgcactgtgcaggagttttaacgacagtcaggccaacggcatggaaggaccgcgggagaatcaggatcctcctccgaggtctctggcccgccacctgtctgatgcagaccgcctccgcaaagtcatccaggagcttgtggacacagagaagtcctacgtgaaggatttgagctgcctctttgaattatacttggagccacttcagaatgagacctttcttacccaagatgagatggagtcactttttggaagtttgccagagatgcttgagtttcagaaggtgtttctggagaccctggaggatgggatttcagcatcatctgactttaacaccctagaaaccccctcacagtttagaaaattactgttttcccttggaggctctttcctttattacgcggaccactttaaactgtacagtggattctgtgctaaccatatcaaagtacagaaggttctggagcgagctaaaactgacaaagccttcaaggcttttctggacgcccggaaccccaccaagcagcattcctccacgctggagtcctacctcatcaagccggttcagagagtgctcaagtacccgctgctgctcaaggagctggtgtccctgacggaccaggagagcgaggagcactaccacctgacggaagcactaaaggcaatggagaaagtagcgagccacatcaatgagatgcagaagatctatgaggattatgggaccgtgtttgaccagctagtagctgagcagagcggaacagagaaggagcagcccgaatggagctcagaggtgatggatgtactagatcccaggggaaagcttacaaaaggcactctggaagaaccacggacactggtaacagaactttcgatgggagagcttctgatgcactctacggtttcctggttgaatccatttctgtctctaggaaaagctagaaaggaccttgagctcacagtatttgtttttaagagagccgtcatactggtttataaagaaaactgcaaactgaaaaagaaattgccctcgaattcccggcctgcacacaactctactgacttggacccatttaaattccgctggttgatccccatctccgcgcttcaagtcagactggggaatccagcagggacagaaaataattccatatgggaactgatccatacgaagtcagaaatagaaggacggccagaaaccatctttcagttgtgttgcagtgacagtgaaagcaaaaccaacattgttaaggtgattcgttctattctgagggagaacttcaggcgtcacataaagtgtgaattaccactggagaaaacgtgtaaggatcgcctggtacctcttaagaaccgagttcctgtttcggccaaattagcttcatccaggtctttaaaagtcctgaagaattcctccagcaacgagtggaccggtgagactggcaagggaaccttgctggactctgacgagggcagcttgagcagcggcacccagagcagcggctgccccacggctgagggcaggcaggactccaagagcacttctcccgggaaatacccacaccccggcttggcagattttgccgacaatctcatcaaagagagtgacatcctgagcgatgaagatgatgaccaccgtcagactgtgaagcagggcagccctactaaagacatcgaaattcagttccagagactgaggatttccgaggacccagacgttcaccccgaggctgagcagcagcctggcccggagtcgggtgagggtcagaaaggaggagagcagcccaaactggtccgggggcacttctgccccattaaacgaaaagccaacagcaccaagagggacagaggaactttgctcaaggcgcagatccgtcaccagtcccttgacagtcagtctgaaaatgccaccatcgacctaaattctgttctagagcgagaattcagtgtccagagtttaacatctgttgtcagtgaggagtgtttttatgaaacagagagccacggaaaatcatagtatgattcaatccagatatgggttaaattcctcattttacttttaaactggtggtaaagtggaaattgcaaaaaaaaaaaaaaaaaaaaactgttcattcctgggttttgtgcagtatacattttcccacaaaatggttgtaaagatttaagttattttaatttattgtggatcagaaacctagatgaaactggtcagaatctgtaaattacttagtttatatccactttgagcaggtatcaaatgatttaggatccttaaaattacattctaataattaagttatgtggaaaaagtaaggctggggaagtcgtgattaatagttttcaaagggccattttttaaaatcctctgggcattttctttcagctgtttgttagtttttgctttatttaaagcatatttaagttattttaatgtggtttaggggcaaaatgtgcagatacttcatttttgtaagatagattgtaatagatgctgtttatactaaacatgtcataactatctatacagtatatattaaaagaaagcttgtactgtatcttatttgatgatatttattttctctgccaagctgtatagtaaaaggaaaataagtcaca

SEQ ID NO: 3639 - DNA, 357 bp, Homo sapiens
  source 1..357: mol_type = genomic DNA
cctgcatttagatggctcccgcaaagaagggtggcgagaagaaaaagggccgttctgccatcaacgaagtggtaacccgagaatacaccatcaacattcacaagcgcatccatggagtgggcttcaagaagcgtgcacctcgggcactcaaagagattcggaaatttgccatgaaggagatgggaactccagatgtgcgcattgacaccaggctcaacaaagctgtctgggccaaaggaataaggaatgtgccataccgaatccgtgtgcggctgtccagaaaacgtaatgaggatgaagattcaccaaataagctatatactttggttacctatgtacctgttaccactttcaaaa

SEQ ID NO: 3640 - DNA, 866 bp, Homo sapiens
  source 1..866: mol_type = genomic DNA
agcgcaccgcgggaagatggcgttggaggtcggcgatatggaagatgggcagctttccgactcggattccgacatgacggtcgcacccagcgacaggccgctgcaattgccaaaagtgctaggtggcgacagtgctatgagggccttccagaacacggcaactgcatgtgcaccagtatcacattatcgagctgttgaaagtgtggattcaagtgaagaaagtttttctgattcagatgatgatagctgtctttggaaacgcaaacgacagaaatgttttaaccctcctcccaaaccagagccttttcagtttggccagagcagtcagaaaccacctgttgctggaggaaagaagattaacaacatatggggtgctgtgctgcagaaacttaggaaggaatctcaagagcatacaaaagatctagacaaggaactagatgaatatatgcatggtggcaaaaaaatgggatcaaaggaagaggaaaatgggcaaggtcatctcaaaaggaaacgacctgtcaaagacaggctagggaacagaccagaaatgaactataaaggtcgatacgagatcacagcggaagattctcaagagaaagtggctgatgaaatttcattcaggttacaggaaccaaagaaagacctgatagcccgagtagtgaggaacaaattaaggacattttctacattgaaaaccaaaaggaatatgaaaataaaaaagctgctaggaagaggagaacacaagtgttggggaaaaagatgaaacaagctattaaaagtctaaattttcaagaagatgatgatacatcacgagaaacttttgcaagtgacacgaatgaggccttggcctctcttgatgagtcaca

SEQ ID NO: 3641 - DNA, 569 bp, Homo sapiens
  source 1..569: mol_type = genomic DNA
agctgcgacgccgagtttcactctggctgccttctcctgagagtcggagccacagccagagccctgcccaggccgagccggagctgcagcccgagcgcggtggtgccctcagccccgtcctcttgtcctcctcagcctcgtccccaggcacagcacacggatccaacatctgtacctttgtttttactaactgctgtttcttaatttaaaacctgatcatcttcttcctcgttggcaaaggtgccttggaatttgtgtcgctgagtcagcaagcctttcagatttgcccggtttttgttgtttgtggtttgtatcaagatgggaactcaaacaagtcattcctcctaaggagctggtgtcttcatccagaagggacagtttgtgccagctctccagagagaaaagatctgccggaggcgctgggcaatgaccccgggactccaggccagaggggtctgaagctgtttgggaaagcagcgggactccttgggaagatggccatggccccaagcccttccctggtgcaggtgtacaccagccccgcggctgtggccgtgtgggaatggcag

SEQ ID NO: 3642 - DNA, 574 bp, Homo sapiens
  source 1..574: mol_type = genomic DNA
tttttttccttcagacacttggattggacttaatcttaaacctctggagttcaagaccttttaaaaagggctaaataaacaatctctacatgtaaaaggccactgactcctacttcctctgtatagagcaactgttgaactcagctgcctgtagagcgagaataggacagactcgtataccattctgatctgggtgcatttcttcagaagggcgtgattctcagtcaccagactcagcttggagatcttacaatgatggcaatcaggagacactgaacggagatgctacatattcctctcttgcagcaaaaggttttagaagcgttcgaccaaacctacaagataaaagatcaccaactcagagccagataacagtgaatggaaactcaggaggtgccgtgagtcccatgagttactatcagaggccgttttccccctcggcatattctctcccagcctcactcaactccagcattgtcatgcagcacggcacatccctcgattccacagacacatatccccagcatgcgcagtctctggatggcaccaccagcagctctatccccctgtaccg

SEQ ID NO: 3643 - DNA, 691 bp, Homo sapiens
  source 1..691: mol_type = genomic DNA
gtacgggagctggaggctgagcttgatgcagagcagaagaagcacgccgaggcccttaagggcgtgcgcaagcatgagcgccgtgtcaaggagctcgcataccaggccgaggaggacaggaagaacctggctcgcatgcaggacctggtggacaagctgcagagcaaggtcaagagctacaagcgccagtttgaggaggcggagcagcaggccaacaccaacctggccaagtatcgcaaggcccagcacgagctggatgatgcggaggagcgggcagacatggcggaaacccaggccaacaagctgcgggcacggacccgggacgccctgggccccaaggtgaggagtggcaggggcattgctctctgtgcagggggactgtgggggctgacaggtagtactgctcactcagctatccctttctcctcagcacaaggagtgacggcctgaccccctgggctctaaagaggaatgtctgctgttgcacatctggctgaggccacctgccccgatcctgccatctctgcatcgccccctgctgccttcagccttccctgggccctgaataaacaccacagccagtttccttctcattcttttctttggggttcaggaggaaaaacacagtcctagggacaaaagccaggtccacagcagtcatttttaaaataaagttatttaatagtctcca

SEQ ID NO: 3644 - DNA, 609 bp, Homo sapiens
  source 1..609: mol_type = genomic DNA
tccaacgtcatggaggctaatgccgctcgccaggccactcctgcagagtggagtcaagatgactccaatgatatgtgggaggaccaggaggaggaagaggaggaggaggaggatggtttagctggccaacttttatctgacattcttgctacaagtaaatatgaggaggattactacgaggatgatgaggaagatgaccctgatgccctgaaggatcctctctatcagattgatctgcaggccaccttaatgacaatgagaggcgagttctacagaccatcggcatctaaaaaggggagcctttctacatttgctccttctgggccagccgcaaaccattttgcagccctcactggccttgagatgcactttcttctcaacctaaagtggcatcttgacccttggcccttggcctcggcagtgacactgatgacaattcagaccaggctcaccggtgccgtcacttaggaatgctggaacaaaggacatttctcaaagttcccctgaagacatgccatctctagaaccttttttctccccgactctacccccacctctgttcctagagccctctgctggcgagtccagaaacattattgcccagaagga

SEQ ID NO: 3645 - DNA, 3250 bp, Homo sapiens; identical to SEQ ID NO: 3151
  source 1..3250: mol_type = genomic DNA

SEQ ID NO: 3646 - DNA, 2309 bp, Homo sapiens
  source 1..2309: mol_type = genomic DNA
cgcagacgggaagctgctcagcaccggcttcagcaggatgagtgagcggcaactcgcgctctgggacccggtaggccaggccgcgccgggcgcgctagctcgctccttctctgggtctgccgggagcgccttcccgggctgtggctggcgcccaagaggccagagcggagcggggagctcccattcgggaaaagcctcgctgcgactccggggagccagcagacacccctgctctagggatcggcctttgagcgcgcttaagggttcgggatcggctgagagccgcgtgcctcctgctctctccaggcccggatgctctccaggtcaggggccagacgtggccccgcaggaagctgagtgcttaggccccatttgtctcttccccgcatccgctcctccaccccggacacccaagtcagcaagctggttgctcatccctccatgctcctcagggcaggcagctgggtgatgtccctccctgtctccccctccccccaggagaggtttgcggcccacgaggggatgaggcccatgcgggccgtcttcacgcgccagggccatatcttcaccacgggcttcacccgcatgagccagcgagagctgggcctgtgggacccggtaacgcagctggaggcttgggttttgctgcgtcgcgtgaaggatcctgcgctggcgcccccacctggtgatgccgagtccctgggggtggtttgctgtgactgcatgcggcgcgcagcggaacaacttcgaggagccagtggcactgcaggagatggacacaagcaacggggtcctattgcccttttacgatcccgactccagcatcgtctacctgtgtggcaagggcgacagcagcattcggtactttgagattaccgacgagccgcctttcgtgcactacctgaacacgttcagcagcaaagagccgcagcggggcatgggtttcatgcccaaaaggggactggatgtcagcaagtgtgagatcgcccggttctacaagctacacgaaagaaagtgtgaacctatcatcatgactgtgccccgcaagtcagacctcttccaggacgccgaacccgtgctcatttcgctgagggacggctatgtgccccccaagcaccgcgagctccgggtcacgaagcgcaacatcctggacgtgcgcccgccctccggcccccgccgcagccagtcggccagcgacgcccccttgtcgcagcacaccctggagacgctgctggaagagatcaaggccctccgcgagcgggtgcaggcccaggagcagcgcatcacggctctggagaacatgctgtgcgagctggtggacggcacggactagccccgcgcgccaggcaggcggagcggggcggggcgcacaagctcggccccgccccggcttttagtcccgaactccggaccccgccttcttgggctgggcccgggggcgggactggggagggaactccgcccctcgcgggagaccagaactcttggagcttaggggagacccacgtcgctccagcggaggctggactgcgagcctcgtctgggactcggctggagctggcctagggaggcctggggtaacctggggggctcagcaatggtgctgcacggcgaggtggtgtccccctttgtcctccgcccagggcagggaaagtgcttagtattagcgtgatgcttggggttattggagcctgagcttgacctcaaacgggtggcgatttgatgggtacccccaggctggggaaaatgacagcgcttctcctaatcagctcactggattccatcaccctgagcggtaaaccagatgggcgtcaccccagttctgcagacacatacacaacccgtttgctgcagagccggacccagtggctacacccacagcggtctgtggtagagaactctcttccttctttccaccgacaggggcgagggctgcttcctcgcggcagcccccgcgaagaaatctcgagagaactggcatgaggagttaggttcatcacaaatacacacacactgcccccaaccctctgccgttgcctctctcagaaaaacaagacgtactgaatgaaatattttactaagcgttcagtctgtgcctcctgcatgggtgggagtgaggggaacgagacccccagcctctgcaaatgctacccccaggctcctgggagacctggcgatgcactcctgggctcagggtccatcaggcagcctcttaccctagagctctctccactctgaggttcagaaggaccccaacccacaccgtaggcgttccccccaagtaaagttaggtagcaaaagcctccggt

SEQ ID NO: 3647 - DNA, 955 bp, Homo sapiens
  source 1..955: mol_type = genomic DNA
gacggcggtcgcgtcggcgtcagggtcggggtcggtaaggggtgcggcaatgctgcaactgcgggactcggtggactcggccggtacgagccccacggcggtgctggcggccggcgaggagcccggcagcatcgagcaggcagtggaggagatccgcgtggtggtgcggcccgtggaggacggcgagatccagggagtgtggctgcttaccgaggtggatcactggaacaatgagaaggagcggctggtgctggtcacggagcagtccctgcttatctgtaaatacgacttcatcagtctccagtgccagcaggtggtgcggatagcgctcaacgcagtagacaccatttcctacggagaattccagtttccccctaaatcgctcaacaagcgagaaggttttgggattcgaattcagtgggacaagcaaagtcgtccttccttcataaacagatggaatccctggtctaccaacgtgccctatgccactttcacagaacacccgatggctggcgcagatgagaagacagcatctctgtgtcagttggaaagcttcaaggctctgttaatccaagctgtcaaaaaagcccaaaaagaaagccctttgccaggacaggcgaatggcgtgctgatcctggagcgccccctgctcatcgagacctacgtgggactcatgtccttcattaacaacgaggcgaaactgggctactccatgaccaggggcaaaataggcttttagccgctgctgctggaaggatggggatctttcacctttagggatctcagcacaattagaatcgtaaagtgaattctatctatttaattggatattggactctgctcatataagctacagacaaaagccaaaagactctcgctgtccctgtgctgctggtatttcattctctgtaacttcagttctggtgttttccttgagtatctacttggcttctcg

SEQ ID NO: 3648 - DNA, 643 bp, Homo sapiens
  source 1..643: mol_type = genomic DNA
ttaaccacttaacctctcagaactgaacaaagacaacattgttcctggaacgccctctttttaaaaaagctttttccccttcagcatttatccatgagacaatcaccaagatgacccagggattgtactgcgttgcaggcttctgccatttgaccttcctgcctgccagggttttgagttcatgctgttgtttgtacttaaatgagtagcctgatggactgcagaacatataataaaggagacccctgatgtcctgatgtgtgaagtgtcaagggggtggaagccgtgcactgagggaatcctaaaagtaagacctacaagaaaaatcagctatgaaggcaacataacccctactgtagaactaaatgcactgtgcatgaaacttggaaaaaaaccaatgtataagcctgttgacccttactctcggatgcagtccacctataactacaacatgagaggaggtgcttatcccccgaggtacttttacccatttccagttccacctttactttatcaagtggaactttctgtgggaggacagcaatttaatggcaaaggaaagacaagacaggctgcgaaacacgatgctgctgccaaagcgttgaggatcctgcagaatgagcccctgccagagaggctggag

SEQ ID NO: 3649 - DNA, 3275 bp, Homo sapiens
  source 1..3275: mol_type = genomic DNA
agcttgtcccacagcgagctgtggagctgggagggccattcagagctctgcatggaggcagggtggccggccttcgtcccctcaggccagcagggcaaggcagctcccctcaatagagatccagcaatgggagcagaatcttgagaaatttcacatggatctgttcaggatgcgctgctatctggccagcctacaaggtggggagttaccgaacccaaagagtctccttgcagccgccagccgcccctccaagctggccctcggcaggctgggcatcttgtctgtttcctctttccatgctctggtatgttctagagatgactctgctctccggaaaaggacactgtcactgacccagcgagggagaaacaagaagggaatattttcttcgttaaaagggctggacacactggccagaaaaggcaaggagaagagaccttctataactcaggtcgatgaacttctgcatatatatggttcaacagtagacggtgttccccgagacaatgcatgggaaatccagacttatgtccactttcaggacaatcacggagttactgtagggatcaagccagagcacagagtagaagatattttgactttggcatgcaagatgaggcagttggaacccagccattatggcctacagcttcgaaaattagtagatgacaatgttgagtattgcatccctgcaccatatgaatatatgcaacaacaggtttatgatgaaatagaagtctttccactaaatgtttatgacgtgcagctcacgaagactgggagtgtgtgtgactttgggtttgcagttacagcgcaggtggatgagcgtcagcatctcagccggatatttataagcgacgttcttcccgatggcctggcgtatggggaagggctgagaaagggcaatgagatcatgaccttaaatggggaagctgtgtctgatcttgaccttaagcagatggaggccctgttttctgagaagagcgtcggactcactctgattgcccggcctccggacacaaaagcaaccctgtgtacatcctggtcagacagtgacctgttctccagggaccagaagagtctgctgccccctcctaaccagtcccaactgctggaggaattcctggataactttaaaaagaatacagccaatgatttcagcaacgtccctgatatcacaacaggtctgaaaaggagtcagacagatggcactctggatcaggtttcccacagggagaaaatggagcagacattcaggagtgctgagcagatcactgcactgtgcaggagttttaacgacagtcaggccaacggcatggaaggaccgcgggagaatcaggatcctcctccgaggtctctggcccgccacctgtctgatgcagaccgcctccgcaaagtcatccaggagcttgtggacacagagaagtcctacgtgaaggatttgagctgcctctttgaattatacttggagccacttcagaatgagacctttcttacccaagatgagatggagtcactttttggaagtttgccagagatgcttgagtttcagaaggtgtttctggagaccctggaggatgggatttcagcatcatctgactttaacaccctagaaaccccctcacagtttagaaaattactgttttcccttggaggctctttcctttattacgcggaccactttaaactgtacagtggattctgtgctaaccatatcaaagtacagaaggttctggagcgagctaaaactgacaaagccttcaaggcttttctggacgcccggaaccccaccaagcagcattcctccacgctggagtcctacctcatcaagccggttcagagagtgctcaagtacccgctgctgctcaaggagctggtgtccctgacggaccaggagagcgaggagcactaccacctgacggaagcactaaaggcaatggagaaagtagcgagccacatcaatgagatgcagaagatctatgaggattatgggaccgtgtttgaccagctagtagctgagcagagcggaacagagaaggaggtaacagaactttcgatgggagagcttctgatgcactctacggtttcctggttgaatccatttctgtctctaggaaaagctagaaaggaccttgagctcacagtatttgtttttaagagagccgtcatactggtttataaagaaaactgcaaactgaaaaagaaattgccctcgaattcccggcctgcacacaactctactgacttggacccatttaaattccgctggttgatccccatctccgcgcttcaagtcagactggggaatccagcagggacagaaaataattccatatgggaactgatccatacgaagtcagaaatagaaggacggccagaaaccatctttcagttgtgttgcagtgacagtgaaagcaaaaccaacattgttaaggtgattcgttctattctgagggagaacttcaggcgtcacataaagtgtgaattaccactggagaaaacgtgtaaggatcgcctggtacctcttaagaaccgagttcctgtttcggccaaattagcttcatccaggtctttaaaagtcctgaagaattcctccagcaacgagtggaccggtgagactggcaagggaaccttgctggactctgacgagggcagcttgagcagcggcacccagagcagcggctgccccacggctgagggcaggcaggactccaagagcacttctcccgggaaatacccacaccccggcttggcagattttgccgacaatctcatcaaagagagtgacatcctgagcgatgaagatgatgaccaccgtcagactgtgaagcagggcagccctactaaagacatcgaaattcagttccagagactgaggatttccgaggacccagacgttcaccccgaggctgagcagcagcctggcccggagtcgggtgagggtcagaaaggaggagagcagcccaaactggtccgggggcacttctgccccattaaacgaaaagccaacagcaccaagagggacagaggaactttgctcaaggcgcagatccgtcaccagtcccttgacagtcagtctgaaaatgccaccatcgacctaaattctgttctagagcgagaattcagtgtccagagtttaacatctgttgtcagtgaggagtgtttttatgaaacagagagccacggaaaatcatagtatgattcaatccagatatgggttaaattcctcattttacttttaaactggtggtaaagtggaaattgcaaaaaaaaaa

SEQ ID NO: 3650 - DNA, 1241 bp, Homo sapiens
  source 1..1241: mol_type = genomic DNA
gtcaaaggggcggcccggcccggcccggaagctacagcagcggcgcggagactgcggggcgggccatggcggcgaacctgagccggaacgggccagcgctgcaagaggcctacgtgcgggtggtcaccgagaagtccccgaccgactgggctctctttacctatgaaggcaacagcaatgacatccgcgtggctggcacaggggagggtggcctggaggagatggtggaggagctcaacagcgggaaggtgatgtacgccttctgcagagtgaaggaccccaactctggactgcccaaatttgtcctcatcaactggacaggcgagggcgtgaacgatgtgcggaagggagcctgtgccagccacgtcagcaccatggccagcttcctgaagggctctgtgtaccagaagaccaatgccgtgtctgagattaaaagggttggtaaagacagcttctgggccaaagcagagaaggaggaggagaaccgtcggctggaggaaaagcggcgggccgaggaggcacagcggcagctggagcaggagcgccgggagcgtgagctgcgtgaggctgcacgccgggagcagcgctatcaggagcagggtggcgaggccagcccccagagcaggacgtgggagcagcagcaagaagtggtttcaaggaaccgaaatgagcaggagtctgccgtgcacccgagggagattttcaagcagaaggagagggccatgtccaccacctccatctccagtcctcagcctggcaagctgaggagccccttcctgcagaagcagctcacccaaccagagacccactttggcagagagccagctgctgccatctcaaggcccagggcagatctccctgctgaggagccggcgcccagcactcctccatgtctggtgcaggcagaagaggaggctgtgtatgaggaacctccagagcaggagaccttctacgagcagcccccactggtgcagcagcaaggtgctggctctgagcacattgaccaccacattcagggccaggggctcagtgggcaagggctctgtgcccgtgccctgtacgactaccaggcagccgacgacacagagatctcctttgaccccgagaacctcatcacgggcatcgaggtgatcgacgaaggctggtggcgtggctatgggccggatggccattttggcatgttccctgccaactacgtggagctcattgagtgaggctgagggcacatcttgcccttcccc

SEQ ID NO: 3651 - DNA, 2011 bp, Homo sapiens
  source 1..2011: mol_type = genomic DNA
cttttcctgcccacgtggtctcgggctcctgccccgtcctgctcacgagttcagggctcctgggcggccgccttttccagttccaggtgtgcagaagtgtcctctccccacgcgcggcgggctgcacttggtcgctggctccgagatcgcgcggggccgccggaagcccaagacggtaccgggggccgcagccgcagccggcgccgccctccgccctccccaacagcaggccgagtcccgtagcatccggtagggaaatggtcgtgctttcggtccccgccgaagtcaccgtgatcctgttagatatcgaaggtaccacaaccccgattgctttcgtgaaggacattttatttccttacatcgaagaaaatgttaaagagtatctgcagacacattgggaagaagaggagtgccagcaggatgtcagtcttttgaggaaacaggctgaagaggacgcccacctggatggggctgttcctatccctgcagcatctgggaatggagtggatgatctgcaacagatgatccaggccgtggtagataatgtgtgctggcagatgtccctggatcgaaagaccactgcactcaaacagctgcagggccacatgtggagggcggcattcacagctgggcgcatgaaagcagagttctttgcagatgtagttccagcagtcaggaagtggagagaggccggaatgaaggtgtacatctattcctcagggagtgtggaggcacagaaactgttattcgggcattctacggagggagatattcttgagcttgttgatggtcactttgataccaagattggacacaaagtagagagtgaaagttacaaagattgcagacagcattgggtgctcaaccaacaacattttgtttctgacagatgttactcgagaggccagtgctgctgaggaagcagatgtgcacgtagctgtggtggtgagaccaggcaacgcaggattaacagatgatgagaagacttactacagcctcatcacatccttcagtgaactatacctgccttcctcaacctagagaagggttgttaaggcagaccgccctgttccccagagttgtccctgtagtgtctaggtttattctaatggtaaaagtaacttacttaaaaaacatatgtacacatatgtatgcaagtatgtatatatgtgtatgctcagattaacttccataggtacataagtgaaagaagtctcagttcagtgaacacaaaacttatttaaagatgctttatatgtagaaattgtttcaaatcatactctaacccttagtgagggcaaagtgtagttggtagaagaaattgctaaatacctatctaatgtgctatgtttatcaaatcgtgtactaaaatggaaagctagttttgagaaattattcagaagccttgttattttaaaaatgaaatatttcaaagactgaatattttcaaagaaaatgaataattcattgcccttgtgatttagaagattataacagctgtatttcatatttgcctccttatatatatcaaagaccaaggtatttccttctgcttcaaaagaacaaaattgggaaagaaaactcacttgagtcttgatcaaacaagtgtcttttacttaagaagaaacttggtaatcattgtggcacccacagcaagcagttgccttaccagtgaaaaaggtgcactgaggtaacatctaaaacagagatgtggttcttaatgtttaacagaacagttctaatcctgccacgtgttatcattatagattttatagttgcctttctaactacttagcacagtttgagaatacgttaattgctatttactatttaaaaagttttactgaaatcagtccataacattaagatgagccctaatatgtaagattttcctctggaatggatgtgagaaatgtaaattttataacagcagtatttatcctggtttaattctaatacgatgtcatgttaatttcatgttgtgattaataaaagcattttttcttcactc

SEQ ID NO: 3652 - DNA, 3549 bp, Homo sapiens
  source 1..3549: mol_type = genomic DNA
gagtgtgtgacccagcccttcccccgtggccaagcagagagagtggccttgaggaagccatagcagcaggaccagcatggcctctgctgcctctgtgaccagcctggcagatgaagtcaactgccccatctgtcagggtaccctgagggagccggtcactatcgactgcggccacaacttctgccgggcctgccttacccgctactgtgagataccaggcccagacctggaggagtcccctacttgcccactctgcaaagaacccttccgtcctgggagcttccggcccaactggcagctggctaacgtggtggagaacattgagcgcctccagctggtgtccacactgggtttgggagaggaggatgtctgccaagagcacggagagaagatctacttcttctgtgaggatgatgagatgcagttgtgcgtggtgtgccgggaggctggggagcacgctacccacaccatgcgcttcctggaggatgcagcggctccctatagggaacaaatccataagtgtcttaaatgtctaagaaaagagagagaggagattcaagaaatccagtcaagagaaaataaaaggatgcaagtcctcctgactcaggtgtccaccaagagacaacaggtgatttctgagttcgcacacctgaggaagtttctagaggaacagcagagcatcctcttagcacaattggagagccaggatggggacatcttgaggcaacgggatgaatttgatttgctggttgctggggagatctgccggtttagtgctcttattgaagaactggaggagaagaatgagaggccagcaagggagctcctgacggacatcagaagcactctaataagatgtgaaaccagaaagtgccggaaaccggtggctgtgtcgccagagctgggccagaggattcgggactttccccagcaggccctcccgctgcagagggagatgaagatgtttctggaaaaactatgctttgagttggactatgagccagctcacatttctctagaccctcagacttcccaccccaagctcctcttgtccgaggaccaccagcgagctcagttctcctacaaatggcagaactcaccagacaacccccagcgttttgaccgggccacctgtgttctggcccacactggcatcacaggggggagacacacgtgggtggtgagtatagacctggcccatgggggcagctgcaccgtgggcgtggtgagcgaggatgtgcagcggaagggggagcttcggctgcggccagaggagggggtgtgggctgtgaggctggcttggggcttcgtctcggctctgggctccttccccacacggctgaccctgaaggagcagccccggcaggtgagggtgtctcttgactatgaggtgggctgggtgaccttcaccaacgctgtcacccgagagcccatctacaccttcactgcctccttcactaggaaggtcattcccttctttgggctctggggccgagggtccagtttctccctgagctcctgagaaggagcagttacctactctcctctaagtacaggactcatatcaacccaagtaccatgtggacttgatccctggctgaatcacctggatgacttggaatagaaatgactgctttagaagatgggatggggccgggtggtaagggatagaagagaggactctcaatctactgatcaagtcctttccccaatgcccagtggatggccagggtacctggggactcaggctgctgccagttctgctcaccaccatccgtgcttggcacagaagtagctgcatagaaagagcactggatttgaagtcagaagacctgggttcttgaaccagcctgtcaaccagttgtatgactttaaacaaggcatctcacctcttttcatcttgttttcttccaataatgttagagttcatgtaatcacattctctagaaccatttagtttgtgttaactatgaaccaagcagtgtggtggccactggtgacttgaaaatgtagagaaaaaaaaaacctgctctatatctgaaagagctcttgggaagacagagaaacataaagaggaaattatagcacagtgtggtgggtgttacgggaagtccaaccccagcattatgggagttcaggggaaggggcatagcccagcctggaaggagaggatgagtgggggatggctttctgaaaagggtagtctaaaggatgcctatagtcaatagggaaaagaggggaagaagcatcttaagaagaggaaacagcagagaactggctggatgacctgtgactctggagcactgggttgtctccattgtccttatgggcagatgtgtgccatccccagccgacaccactcactgcctccttcctcctggtgttgccacttctgggtgagattaaggtgcagggcctgggggcaggaggacataaggtatagccataaatcataacccagggaccacactcaaccctagggaaattgtcttcctgatcagttgattaccatctgaggtcaagaaatgagatagtgggagcaaatgggtcacaaatagctcagctgtgggctcagaaactgctaggtaaaagaattccagaaggaggccagggcataagttggatgacctatgacctttagtctaaagaattgagactaccgtaattgagactactgtagtgacatctgagaaatgggatggaagagtgaccatgttttattttcttgttcttgtcactattgtattttattttgcataatcatgcccttcactgacagtctccttaacatcatctgtttactctgctcagatgtaaaatacaatgctctgtcatctccctactgggtctcctgggaggaggggagccatccagggtgcaaactcaaaggcagagggcacagcgtgcttaggcccaagcttagaattcaattgagaagttctgttgttcatccttacctcagcaggtagaaaagaggtggagatcagaagccagggattaaagattgaattgctttccctgggagtgtgcagtatctcattaaaatgttgtatattcaaaaaaatacagacacacacaagtgcctatataatgataaaacatatgcaaagcacccaaacctgtgattccagaaaggtagatcctatttttctgtttatttttattggctttagctgtgtcttttgaaaggactattatcctctaaaatgtatgtgtatgaagatcctggcttgcagctcgggagctttacacaccttgtgtcactttatcttggtaacgagccaagatcatgcaaccagttcatccatgtctgacccaagagctcttaactgctatgctgcactgcctcattcagagatagatgcctgcatgggtcctggcgattattttaatgctggctacacccccacaggtgacttggattcagaaatacaatttatatttcttctttttaaattgttttattttatttttcttttaatagttatatgtcagtgagaacaatttatatgtcttacactgagaaataaaactgctcataagtgaaaa

SEQ ID NO: 3653 - DNA, 4082 bp, Homo sapiens
  source 1..4082: mol_type = genomic DNA
attaggcctgccgagaggagtgttttcttgcatccagaaaagacctgagaggcggacgacacctgtgctccgcagagcagaacgtgggaggaacggcgggatgttaaggtaggagctcaagaagcagagagtctacctgcccgacgcgttcgtggagaggagcagcggttgctgttggaggaggtgggtgcaaggacggcagatggcatccctgagaggtggtgactgagactagatgcgggtgcaggtctgtttctttctaggttcctgtagagatctgtatgtagctgttcacttggaagttaattaagaaagaacaaaaactattcatttggattcaaggtccatctccactggtggctgtggtggctttggattgttggaagaccatcaccttcagcaggtctgcacttgggaacaatcattctcccccagcccgagcgtgcctctgccctctgtatcattgacagaggctgtatgtttggaaagagaactttgtgactgcagaactgacagttgactctaattcttgctaccaagtttttccccgacccagtgaaagagtgttaagacttcgacctaggacacattgagaaccaaggccaagactggacagggccatataactgggcttcaaccatggctgggactaagaataagacaagagcccaggccaaaactgaaaaaaaggctgctatacaagctaaagctggagcagagagggaggctactggtgttgttaggcctgtagccaagaccagggccaaagcaaaagccaagacagggtctaagacagatgcagtagcagagatgaaggcagtgtctaagaacaaggttgttgctgagacgaaggaaggagctctgtcagagcctaagactctgggcaaagccatgggagatttcactcccaaggctgggaatgagtccaccagctccacatgtaaaaatgaggctggtactgatgcctggttctgggctggggaagaggccactatcaattcctggttctggaatggagaagaggctggtaatagtttcagcactaagaatgataaacctgaaattggtgcccaggtctgtgctgaggagttggaacctgcggctggggccgattgcaaacctaggtcaggggctgaggaggaggaggaagagaatgttattgggaactggttttgggaaggagatgatactagttttgaccctaatcctaaacctgtgagcaggatagttaagcctcagcctgtgtatgaaattaatgaaaaaaataggcccaaggactggtctgaggtaactatctggcccaatgcccctgctgtaactccagctgtgttaggatttagatcccaggcaccatctgaggcaagccctccttcatatattgttctggcctccgctgaagaaaatgcctgttctttgcctgtggcaacagcttgccgcccttctaggaacactcgctcatgctcacagcctatccctgagtgtcgttttgattctgacccctgcatccagaccatagatgagattagacgtcaaatcaggatcagggaggtaaatgggattaagccatttgcttgtccttgcaaaatggaatgctatatggattctgaggaatttgaaaaacttgttagcttacttaagtcaactactgatcctcttattcataaaatagcacggattgcaatgggtgtccataatgttcacccatttgcccaagagtttattaacgaagtaggtgtagtgacacttattgaaagcttgctcagttttccttcccctgaaatgagaaaaaagactgtaattactctgaatcctccttctggggatgaaagacaacgcaaaattgaattacatgttaagcatatgtgtaaagaaaccatgtcatttcctttgaactcaccgggacagcaatctggattaaagatactaggacaactgactactgattttgtccatcactacattgttgccaattacttttcagagcttttccatttgctgtcctcaggaaattgcaaaaccagaaatcttgttttgaaactacttttaaatatgtctgaaaatccaactgcagccagagacatgatcaatatgaaggcattggcagcattaaaactcatctttaaccagaaagaggcaaaagccaatcttgttagtggtgtggccatatttattaacataaaggagcatatcagaaaaggctcaattgtagttgttgatcacttgagttataatacactcatggccattttcagggaagttaaagagattattgaaacaatgtaaaatgagccagagatagaacattttaagccatcttcaaactctagcaggctgtacattacagtgtacacattatacactgcatctttaacacagagtcacctgtgacaggctctaggtttgagctagactattttgggggtatcaaatgaatattataccttgggctgaaaatgtttgatttttatcttgtctagattggcatatttttaacattttacttaagatagcaaaccagttcgttttaagtaagctaacttgttcattagtatctgtggcttaaaatggcaaaaaagaaaatatccttgagtttgtaatctagttacagaagtaaggcatacacacacacaaagataacagtacctagagagagagtgtgtgtgagtgtgcgtgtctctgtgtgtgcacgtgcacgctcatggccaaatgtgcgcactctacataaaggaggcaggagttcctataggctatttaatgtaagagaaactatttttctcctgttccagctgtatcagatactcgttccgcaacacagaaatgactcagaatctcagacaaaatgtattatttgttcaattttaattttgctactacattcataactcttaaattgttaggctgtttcatttacatcaaagttatctcacaaaagagaaggcaggaaacgttttgtgagtgcctattctatgtcaaacactgtgttggcaccatattttacaagtttttttcctcttctcacagtgatcttgtgagttagttacttatatttttattagaactcattattctgggtaccctccaatgagaattagagaggttaaataccttttcctagattcccacagcaggaaggtggcatagctgttttgtctgacaccagaacccatctcaccacactgctttacagtcttcctgaaggacattttgaggtgggggggccttcaaagctcagagactggtttgaatggtttaattttgcaatggatcatgtccatgccaggtgttacaattcttaacttcctccaaattcgtgtgtccattagacatttggctacatctggctggaggtcaggagaaaattctgaggtaaatagatggattttatctggcagtgtcgaaaatagtaggagcctaaaactttgttcaatgagtaagatgtagatttggagtcatcagcaggggaaacttgttagatgtcctttgtatctttttctatccatttgtattttttctttcccaaagagctgaaatcattttataccctgaatttaaaaggtaattgcttttttcctccttgcgaaatcataccttaattttttttttttttttttttaccatttatgatttattctcctatgtgtcatatgaaaggccaaggggctttatcttttactagtaggcaagcctgggcatttctgcatttgtgccagctaacactacaaaatagacttaattagagaaatttagacccagaattgcagcttcaacaacacaaaacaggaaagctagaagaggttgctgtgtcaacctacaagatagtgattcttggaagttggtatggaccagaaagcattcccaggacatttaggctatggctgagttctctaagactcagggtgggaattataatccctggtctaagctgatatgaaagtttctatgtgtgaaaatatggagttatatgctttgagattttctgccagttaaactaaaacaagatcatactgtaaatgtttgtaacttgcttccccccactgtatactgtaaacatctttgcatgtcaataaatatgcctctacaac

SEQ ID NO: 3654 - DNA, 2393 bp, Homo sapiens
  source 1..2393: mol_type = genomic DNA
atatctctaggggtttatgacaggctgttttcttttctcagtgtggggatgaattgctccattatcatctaaattggaagtcatgatgatggaaaccaacatgtctgacaaaagtgacttaaaagctgagctagagcgcaaaaagcagcgcttagcacagataagagaagagaagaaacggaaggaagaggagaggaaaaagaaagaggctgatatgcagcagaagaaagaacccgttcaggacgactctgatctggatcgcaaacgacgagagacagaggctttgctgcaaagcattggtatctcaccggagccgcctctagtcccaacccctatgtctccctcctcgaaatcagtgagcactcccagtgaagctggaagccaagactcaggcgatctggggccattaacaaggaccctgcagtgggacacagacccctcagtgctccagctgcagtcagactcagaacttggaagaagactgcataaactgggcgtgtcaaaggtcacccaagtggatttcctgccaagggaagtagtgtcctactcaaaggagacccagactcctcttgccacgcatcagtctgaagaggatgaggaagatgaggaaatggtggaatctaaagttggccaggactcagaactggaaaatcaggacaaaaaacaggaagtgaaggaagcccctccaagagagttgacagaggaagaaaaacagcagatccttcattcagaggaatttctcatcttttttgaccggacaatacgggtaattgaaagagccctggctgaagattccgacatcttttttgactacagcggccgagagttagaggaaaaagatggggatgttcaggctggagccaatctttctttcaatcgtcagttctatgatgaacattggtccaagcatcgagtggtcacttgtatggactggtccctccagtaccctgagctgatggtggcttcttacaacaacaatgaagatgctccccatgaaccagatggagtggccttggtttggaacatgaagtttaagaaaaccacaccagaatacgtcttccactgtcagtcctctgtgatgtcggtctgcttcgcccgtttccatcctaacttggtggttggtgggacttactcgggccagattgtcctctgggacaatcgcagtcatcgaaggactccagtgcagcggacacccttatcagctgctgcacacacgcatcccgtgtactgtgtaaatgttgttgggacccagaatgctcataacctcatcactgtctccactgatggcaaaatgtgttcctggagcctggacatgctctcaactccacaggagagcatggagctggtgtacaataagtccaagcctgtcgctgttaccggaatggctttcccaacgggagacgtcaataacttcgtggttggcagtgaggaaggtacagtctacacggcttgtcgtcatggaagcaaagcaggtattggtgaggtctttgaaggtcaccaagggccagtgacaggaattaactgccacatggcagtgggcccaatcgacttttctcacctgtttgtcacatcatcatttgactggactgtcaaactgtggaccaccaagcacaacaagccgctctactcctttgaagacaatgcagactatgtgtacgatgtcatgtggtcccccgtgcatcctgcgctttttgcctgcgtggacgggatggggcgcttggacctctggaacctcaacaatgacaccgaggttccaacagcaagtgtggccattgagggggcatccgccctaaaccgtgttcgttgggcccaagctggcaaagaagttgctgttggggactcggaaggccgtatttgggtctatgacgttggagagcttgcagttccccacaatgatgaatggacccgatttgccaggacccttgtggaaattcgtgctaacagagctgatagcgaggaggaaggcactgttgagttatctgcctagtggaaatgagccacccccactgcagcccccacctttgtgtcctagagctcagcgtctgcagtcaagtctcttgtattcggtgtccattcagtatcagtattgctgtgatattttgggtgccatattgtgccagctttgctccaagtattctaaatgtgtcccatcatgctttccactgacccaaaattcaccacagcatttctatctttatatttctgtctcaaaaatgaagagaagggggttatgggttaagttgctgccttttaactactttgtagctgtatttaatagctggaaacctctggttaaatttgtgcttacatgcactcctggcatagtcctattaaatccatatgaagccagatatgattgggtgcagatgtggtgttcctcatattatggtaca

SEQ ID NO: 3655 - DNA, 776 bp, Homo sapiens
  source 1..776: mol_type = genomic DNA
tgtcctcccagctaccccctccctaagcaggctgaggaagaagagatagcaagccctcacctaacttgacccctttcttgtctctccccgctgctagcttctcccttctcgctgccttgcggggtggggaaacgtggaaggaattctgggaaaaccagatgtctgggttctctattcccgtctggcttgattctggacaaggggcttcctctccagggcctcggtttccccatctttaaaatggactgatagcatagacctgcccacctttcagaggtgcccgaagccttgacgagataacagatgagaagtggttttcgttgtgatgagccagctgaagcggttgcaccggagcgccagaccgtcagcggtgcagtggctctcgcgtccttcacatccccccacacccatcccgtggatgatgggggaaggcactactcctggggttccccgaagcggatcctgggactgggacctggggacgcggccaaggaggcgggtttggtgcggccactccaaggccaaagcgagaaaatcttactgcgcacgcgcaatagacagccgatggagccaccgatggagccgtccggaggggagcaagagcccggagccgtcaggttcctggacctgccctgggaagacgtgctgctcccacacgtcctgaaccgggtcccgctgcgccagctgctccggctgcagcgcgttagccgggccttccggtcgctggtgcagcttcacctggccgggctgcgtcgcttcgatgccgcgcaggtgag

SEQ ID NO: 3656 - DNA, 1456 bp, Homo sapiens; identical to SEQ ID NO: 1946
  source 1..1456: mol_type = genomic DNA

SEQ ID NO: 3657 - DNA, 555 bp, Homo sapiens
  source 1..555: mol_type = genomic DNA
cttctctcttcctcggcgctgcctacggaggtggcagccatctccttctcgctggcgattggaagacactctgcgacagtgttcagtccctgggcaggaaagcctccttccaggattcttcctcacctggggccgcttcttccccaaaaggcatcatggccgccctcagaccccttgtgaagcccaagatcgtcaaaaagagaaccaagaagttcatccggcaccagtcagaccgatatgtcaaaattaagcgtaactggcggaaacccagaggcattgacaacagggttcgtagaagattcaagggccagatcttgatgcccaacattggttatggaagcaacaaaaaaacaaagcacatgctgcccagtggcttccggaagttcctggtccacaacgtcaaggagctggaagtgctgctgatgtgcaacaaatcttactgtgccgagatcgctcacaatgtttcctccaagaaccgcaaagccatcgtggaaagagctgcccaactggccatcagagtcaccaaccccaatgccaggctgcgcagtgaagaaa

SEQ ID NO: 3658 - DNA, 793 bp, Homo sapiens
  source 1..793: mol_type = genomic DNA
ggtggcgtccgggactctccctgcaggtgactgacggcgccggccgcccctgcccgtcgcccgcccgctgctgccgcccgcccggggtgtggagcccggccgctgctcgcgggctgagtgtctgtcgctgctgccgcctccacccagcctccgccatggacctcttcggggacctgccggagcccgagcgctcgccgcgcccggctgccgggaaagaagctcagaaaggacccctgctctttgatgacctccctccggccagcagtactgactcaggatcagggggacctttgctttttgatgatctcccacccgctagcagtggcgattcaggttctcttgccacatcaatatcccagatggtaaagactgaagggaaaggagcaaagagaaaaacctccgaggaagagaagaatggcagtgaagagcttgtggaaaagaaagtttcctcttcggtgatctttggtctgaagggctatgtggctgagcggaagggtgagagggaggagatgcaggatgcccacgtcatcctgaacgacatcaccgaggagtgtaggcccccatcgtccctcattactcgggtttcatattttgctgtttttgatggacatggaggaattcgagcctcaaaatttgctgcacagaatttgcatcaaaacttaatcagaaaatttcctaaaggagatgtaatcagtgtagagaaaaccgtgaagagatgccttttggacactttcaagcatactgatgaagagttccttaaacaagcttccagccagaagcctgcctggaaaga

SEQ ID NO: 3659 - DNA, 1567 bp, Homo sapiens
  source 1..1567: mol_type = genomic DNA
aggcgcaagaagcaaccagccgcgctatccgctcccgttgctaccggaatgcctcttcaggttagcgattacagctggcagcagacgaagactgcggtctttctgtctctgcccctcaaaggcgtgtgcgtcagagacacggacgtgttctgcacggaaaactatctgaaggtcaactttcctccatttttatttgaggcatttctttatgctcccatagacgatgagagcagcaaagcaaagattgggaatgacaccattgtcttcaccttgtataaaaaagaagcggccatgtgggagaccctttctgtgacgggtgttgacaaagagatgatgcaaagaattagagaaaaatctattttacaagcacaagagagagcaaaagaagctacagaagcaaaagctgcagcaaagcgggaagatcaaaaatacgcactaagtgtcatgatgaagattgaagaagaagagaggaaaaaaatagaagatatgaaagaaaatgaacggataaaagccactaaagcattggaagcctggaaagaatatcaaagaaaagctgaggagcaaaaaaaaattcagagagaagagaaattatgtcaaaaagaaaagcaaattaaagaagaaagaaaaaaaataaaatataagagtcttactagaaatttggcatctagaaatcttgctccaaaagggagaaattcagaaaatatatttactgagaagttaaaggaagacagtattcctgctcctcgctctgttggcagtattaaaatcaactttacccctcgagtattcccaacagctcttcgtgaatcacaagtagcagaagaggaggagtggctacacaaacaagctgaggcacgaagagcaatgaatactgacatagctgaactttgcgatttaaaagaagaagaaaagaacccagaatggttgaaggataaaggaaacaaattgtttgcaacggaaaactatttggcagctatcaatgcatataatttagccataagactaaataataagatgccactattgtatttgaaccgggctgcttgccacctaaaactaaaaaacttacacaaggctattgaagattcttctaaggcctacaggattatgaagcggcacttaagattgatccatccaacaaaattgtacaaattgatgctgagaagattcggaatgtaattcaaggaacagaactaaaatcttaatgactattagaagtaactaagtattgttataagttttttaaaaacaactggaggcatctttgtacatattatggccagttgtacagaatcgctttctgtttagtactttagttctgttgagggcaaaatattataaatctatagaaaataaactgtttgacttgaatcatttctgaataagtaaatctaaataagaatctattttaattccttatttcttcatattaatacatatgtatacttttttgtgttactgaattaagcttgcccttgtaacaaaatatgttttggtatagttaccaggacacttactgattaatttttaacaaggtagaattttaaaataaaagatttataaataa

SEQ ID NO: 3660 - DNA, 2078 bp, Homo sapiens
  source 1..2078: mol_type = genomic DNA
aagccctagagaggctaccaccggtacaccccgccttcccacccacgggtaaagtggcgccgcctacgcaccggcacagcccctgggctcccgccccggcgcggagaccaccgtggacatccgggggcgggaggccgctctggccccaagcggagcctctctctggtagacgagcccgagggagcccttctgggcgcggcgccgcggagctgctctatgctccaaccggaagtgctcttcaccgccggcctcccacccagctctctggtcccggcggtaagatggcggctgccgcggagtgcgatgtggtaatggcggcgaccgagccggagctgctcgacgaccaagaggcgaagagggaagcagagactttcaaggaacaaggaaatgcatactatgccaagaaagattacaatgaagcttataattattatacaaaagccatagatatgtgtcctaaaaatgctagctattatggtaatcgagcagccaccttgatgatgcttggaaggttccgggaagctcttggagatgcacaacagtcagtgaggttggatgacagttttgtccggggacatctacgagagggcaagtgccacctctctctggggaatgccatggcagcatgtcgcagcttccagagagccctagaactggatcataaaaatgctcaggcacaacaagagttcaagaatgctaatgcagtcatggaatatgagaaaatagcagaaacagattttgagaagcgagattttcggaaggttgttttctgcatggaccgtgccctagaatttgcccctgcctgccatcgcttcaaaatcctcaaggcagaatgtttagcaatgctgggtcgttatccagaagcacagtctgtggctagtgacattctacgaatggattccaccaatgcagatgctctgtatgtacgaggtctttgcctttattacgaagattgtattgagaaggcagttcagtttttcgtacaggctctcaggatggctcctgaccacgagaaggcctgcattgcctgcagaaatgccaaagcactcaaagcaaagaaagaagatgggaataaagcatttaaggaaggaaattacaaactagcatatgaactgtacacagaagccctggggatagaccccaacaatataaaaacaaatgctaaactctactgtaatcggggtacggttaattccaagcttaggaaactagatgatgcaatagaagactgcacaaatgcagtgaagcttgatgacacttacataaaagcctacttgagaagagctcagtgttacatggacacagaacagtatgaagaagcagtacgagactatgaaaaagtataccagacagagaaaacaaaagaacacaaacagctcctaaaaaatgcgcagctggaactgaagaagagtaagaggaaagattactacaagattctaggagtggacaagaatgcctctgaggacgagatcaagaaagcttatcggaaacgggccttgatgcaccatccagatcggcatagtggagccagtgctgaggttcagaaggaggaggagaagaagttcaaggaagttggagaggcctttactatcctctctgatcccaagaaaaagactcgctatgacagtggacaggacctagatgaggagggcatgaatatgggtgattttgatccaaacaatatcttcaaggcattctttggcggtcctggcggcttcagctttgaagcatctggtccagggaatttcttttttcaatttggctaatgaagggcaaccacccagaacccagaaaatgcagattcactcagtttaatcttgaatgtggaaacagttcacctcctcccttcatcacgtctccgtgtgcttagagcagtttcgttttctcagttggatgccctgtgtctctgtgagtggggtggagcaaagggaaccaatgccgaagaccgagggcaggggagggaggcgggggtggacagggaggcagcttgtgaatttttgttttactgtttaactttattaaaaaagaaaaaaaaaagagaataaaatgttttgacccttcctggccctttgctctgg

SEQ ID NO: 3661 - DNA, 1669 bp, Homo sapiens
  source 1..1669: mol_type = genomic DNA
aacgaggtctataacttgacccaggagttcttccggcacgataaaccagtcaatgctgaaagtcaaaatagcgtgggggtgttcacccgagaggaggtgcgtaaccgcatcaggaatgaccctgacgacccagaggctaccaagcgcctgaagctcgccatgatccagcagtacctgaaggtggagagctgtgagagcagctcacacagcatggacgaggtgtccctgagcgccttcggggagtggaccgagatccccggcgctcaccacatcatcccctcgggcttcatgcgggttgtggagctgctggcggagggcatccctgcccacgtcatccagctagggaaacctgtccgctgcattcactgggaccaggcctcagcccgccccagaggccctgagattgagccccggggtgagggcgaccacaatcacgacactggggagggtggccagggtggagaggagccccgggggggcaggtgggatgaggatgagcagtggtcggtggtggtggagtgcgaggactgtgagctgatcccggcggaccatgtgattgtgaccgtgtcgctaggtgtgctaaagaggcagtacaccagtttcttccggccaggcctgcccacagagaaggtggctgccatccaccgcctgggcattggcaccaccgacaagatctttctggaattcgaggagcccttctggggccctgagtgcaacagcctacagtttgtgtgggaggacgaagcagagagccacaccctcacctacccacctgagctctggtaccgcaagatctgcggctttgatgtcctctacccgcctgagcgctacggccatgtgctgagcggctggatctgcggggaggaggccctcgtcatggagaagtgtgatgacgaggcagtggccgagatctgcacggagatgctgcgtcagttcacagggaaccccaacattccaaaacctcggcgaatcttgcgctcggcctggggcagcaacccttacttccgcggctcctattcatacacgcaggtgggctccagcggggcggatgtggagaagctggccaagcccctgccgtacacagagagctcaaagacagcgcatggaagctccacaaagcagcagcctggtcaccttttctcttccaagtgcccagaacagcccctggatgctaacaggggcgccgtaaagcccatgcaggtgctgttttccggtgaggccacccaccgcaagtactattccaccacccacggtgctctgctgtccggccagcgtgaggctgcccgcctcattgagatgtaccgagacctcttccagcaggggacctgagggctgtcctcgctgctgagaagagccactaactcgtgacctccagcctgccccttgctgccgtgtgctcctgccttcctgatcctctgtagaaaggatttttatcttctgtagagctagccgccctgactgccttcagacctggccctgtagcttttctttttctccaggctgggccgtgagcaggtgggccgttgagttacctctgtgctggatcccgtgcccccacttgcctaccctctgtcctgccttgttattgtaagtgccttcaatactttgcattttgggataataaaaaaggctccctcccctgcccctcagcttctctctggttttctca

SEQ ID NO: 3662 - DNA, 573 bp, Homo sapiens
  source 1..573: mol_type = genomic DNA
agaacagtagcaccacccagcagctgggattctttccctctctcatttgcctctctcttgctttttttccttcagacacttggattggacttaatcttaaacctctggagttcaagaccttttaaaaagggctaaataaacaatctctacatgtaaaaggccactgactcctacttcctctgtatagagcaactgttgaactcagctgcctgtaggtaaacacggtgttccagaatacagcaggagcatctgggcatttttgtggctggcgtgattctcagtcaccagactcagcaaaaggttttagaagcgttcgaccaaacctacaagataaaagatcaccaactcagagccagataacagtgaatggaaactcaggaggtgccgtgagtcccatgagttactatcagaggccgttttccccctcggcatattctctcccagcctcactcaactccagcattgtcatgcagcacggcacatccctcgattccacagacacatatccccagcatgcgcagtctctggatggcaccaccagcagctctatccccctgtaccgatcctcagagg

SEQ ID NO: 3663 - DNA, 1472 bp, Homo sapiens
  source 1..1472: mol_type = genomic DNA
atgaagtgtgagcactgcacgcgcaaggaatgtagtaagaaaacaaaaactgatgaccaagagaatgtgtcagccgatgcaccgagtccagcccaggaaaatggagagaagggagaattccacaagttggctgatgccaagatatttttgagcgactgcctggcatgtgacagctgtatgactgcagaggaaggagtccaactttcccagcaaaatgccaaggacttcttccgcgttctgaaccttaacaagaaatgtgatacctcaaagcacaaagtgctggtagtgtctgtgtgtcctcaatctttgccttattttgctgctaaattcaacctcagtgtaactgatgcatccagaagactctgtggtttcctcaaaagtcttggctgggtccgatacgccgagcgggtgctgggtcgccccatcactgcccacctctgcaccgccaagtccccccagcaggtcatgggctctttggtgaaggattatttcgccagacagcagaacctgtctccagagaagattttccacgtcattgtggccccttgttatgacaagaagctggaggctcttcaggaaagccttccccctgctttgcatggctcccggggcgctgactgcgtgttaacatcaggcacaggctccctgtgggagtgcacacctgtaatcacagctactcaggaggctgcggcaagagaatcacttgaacccgggaggcagaggttacagcgagacaagattgcaccactggactccagcctgggcggcggaggtgaaattgctcaaataatggagcaaggtgacctctcagtgagagatgctgccgtcgacactctgtttggagacttgaaggaggacaaagtgacgcgtcatgatggagccagctcagacgggcacctggcacacatcttcagacatgcggccaaggagctgttcaacgaggatgtggaggaggtcacttaccgagccctgagaaacaaagacttccaagaggtcacccttgagaagaacggagaggtggtgttacgctttgctgcagcctatggctttcgaaacatccagaacatgatcctgaagcttaagaagggcaagttcccattccactttgtggaggtcctcgcctgtgctggaggatgcttaaatggcagaggccaagcccagactccagacggacatgcggataaggccctgctgcggcagatggaaggcatttacgctgacatccctgtgcggcgtccggagtccagtgcacacgtgcaggagctgtaccaggagtggctggaggggatcaactcccccaaggcccgagaggtgctgcataccacgtaccagagccaggagcgtggcacacacagcctggacatcaagtggtgaagtcaggccagggccttccagctgctcttggggccagagccaagagcctctcagtagagggaggggctgccctgagtggagtattaaagacacttaag

SEQ ID NO: 3664 - DNA, 769 bp, Homo sapiens
  source 1..769: mol_type = genomic DNA
aggggaaggcccagaggaagatcagtgccatccacatcctcgatgtccttgtgctgaatggcaccgacgttcgggagcagcactttaaccagcgaattcagcttgccgagaaatttgtgaaagccgtttccaagcctagtcggcccgacatgaatcccatcagggtgaaggaggtgtacagactggaagagatggagaagatttttgtcaggttggagatgaagatcatcaagggctccagtggcaccccaaagctcagctacacagggcgtgatgaccggcactttgtacccatgggcctctacatcgtcaggacagtgaatgagccctggactatgggattcagcaaaagcttcaagaagaagttcttctacaacaagaaaaccaaggactctacttttgacctccctgcagactccattgccccatttcacctccccagccttgcctgcctgtcgaagatggattaactccgcactcccctgggatcgccacatgaccacttcaagtccccaagccgcccttcgctgcacagactgcatttttttctgccataattacaagcaatggcactgactggagggcatgacagtgtgtggtggggggatggacaggtggcacaatgtctgctgctcaaccccagcagtgcccgagccctggaagtaactcccactatttggcttggaaagtgcttcccactgtctccttcccactcgagctgggggccttctcctctattctgaattgtaatccagagctttcccttgaa

SEQ ID NO: 3665 - DNA, 3290 bp, Homo sapiens
  source 1..3290: mol_type = genomic DNA
ggagcacagagaagctcccagctttgaaggtcttgcggtggtgcgtggcgggcaggaacccacaattccaaatacaaacggtcggcgcgagaagcgcttctgggcgcaggcgcctggctgtagcgactggttgcgggaggctggactctggtgactgtaagcatcaagtgtacctgatttgtgaacctatcttgcttcagttggtttcctcctaaatattaggcagatgggattggctggtctgtgctctgctaggtgaaaaattagacgatttcaagaattggagctgaatctgatgttaagtaatggcaacaggtgacttaaaaagaagcttacggaacctagaacaggtgctccgcttgctaaattatcctgaagaggtggactgtgtaggtttgataaagggagacccagcagcatctttgcccatcatcagctattcttttacctcatactcaccttatgtaacagaacttataatggaatccaatgtagagctcatagcaaaaaatgacttgcgctttatagatgctgtctataagcttcttcgtgatcaatttaattataaaccaattttgacaaaaaagcagtttatccaatgtgggtttgcagaatggaaaatccaaattgtttgtgatattttgaattgtgtgatgaaaaagcacaaggaattaagcagtcttcagaagattccatcacaacaaagaaagaaaatcagttctggtaagtcagaacctcctttgggcaatgagaaaatatctgcagaggctgttggcgttgatatcagtggcaggtttatgacctcaggaaagaagaaagctgtggtgattcgtcacttgtataatgaagataatgttgacatttctgaggatacattaagtccaataacagatgttaatgaagcagttgatgtgtctgacttaaatgctactgaaataaagatgcctgaagtaaaggttcctgaaatcaaggctgagcaacaggatgtaaatgttaatcctgagattactgcactacaaactatgcttgctgaatgccaagaaaatcttaagaaactgacttcgatagagaaaaggttagactgtttggaacaaaaaatgaaaggaaaagtgatggtagatgaaaacacctggactaatcttcttagtcgtgtcactcttcttgaaacagaaatgcttttgtctaaaaagaatgatgaatttatagagtttaatgaagttagtgaagactacgcttcttgtagtgacatggaccttctgaatcctcacagaaaaagcgaagtagagaggccagcaagtattcctctgtcctctggctatagtacagcatcatcagattcaactcccagagcctctactgttaattactgtggtttgaatgagatttcagagaattttcctgcatggagtgctacatcctcttgttccagtctcagctggctgctccgtgggcatacttcatacctttcatcacagagctttgcttggcctctctcctgtgtgtaatctctgtttcttggatcctgtgcttaccttttcctgctgtactctgatgtttcagtgaagctcatccacgaagtccagaattctgcctggaaaccagcttcctcctcagctccagctcttttaatgggcatatcaaaactgatgactttttccttcctgctacatgggtaacacttagttgtttgtctaatttctattttccagaaatttctcaaaatgtctgctgatagcccctcactcatatttttcatgtgggtttatagctttcatatttctttattattgtaaatgggggctgtggaaggtgagaaaacacatgctttcttaaaacagaagctctctccttcattaatttaaatatttttatcggctctagaaaatgcataaggttagtacaagatcagtagagagaaagtcaaagattacagaagtgctgaagcagaccattcttcctttcttcccaatgtctattaagatcacacataggtaaactgttacaaatccagaatggtgaaagagtccaacaatggctgagggaagtagaggttaagatatagctcaacagtgaaagtagcagggaaagagctgggcaaggccaagaccatcttttgtaccgttggtacagtaggctaaaggtacggtgttccatattaaatacagcaatatgaagaaaaataaattaagtcccttatacctaagacctctatttctctgttgattacatacacagtggcaatggaaagaagggaaaataatggggatagcatttgctcattctctgaccatgcaacactggcagcattctatacttattctattaactgcatcaaccacatcttataaaacacatttccataggccatatgtaataggccttggctttattcattgcatttattggctccttaaattgacaacatataattgttttcatataattttcatcaaataaaattcactttaatttgtatgaacatatttaaagtggaaagtatcttcccaaatggtccatatcttaaagtgtcagatattttatgggcttcacatctgaactgccagagatctcaggcatagcatgcattaatcacaaccacttactgacctggttcagatacttactcaatacatggggctagacacagagtgtgccttaggctaaagaaaaaattattcaagttgagcatatccataaactctggctcaagcagtgtattttgggggtaataaacacaagtttgttcctagttggagggatatgatgcttaggtttgaacctgttaaccttcctgggtttgagggctagaaaacgtggagacattcctttctaactaacacattttctaatagaaacaatccaccaggatgttgagcccacattttaagagttcttcggaatttactgaaaatggaaaactgattacattgggcacataggacatttatatttatagaaacattttagataagacaagaattttaaaagccagaaatcacttttagtgggcattttcagaaaaatgttgtcaactttttgtaatttttaataggcataaaaaagattgttatattgatattgacagaaattaggtggttaattagagagcgtaaaaggatgaattgctctaacattggtttagaatttttctttatatgattcaattttgtggtctggcaaaggcccaatagtcatttatctagtatgcatacctttccacagctggattttcaaatatgatgataaagttcatatgacagacctattctgaaaataaatatgtcagcagg

SEQ ID NO: 3666 - DNA, 1024 bp, Homo sapiens
  source 1..1024: mol_type = genomic DNA
agtcacagcagccagctgctgtagaagaggggaggaaacaagccagtgcaaggggagcaaaagagaaaaggagccaggctgggcttcctgatcccacagcatcgcagagctcgggaggcacagctcacagacacaggaaacacaggactgctattctgctctcctgcccacggtgatctggtgccagctggtggaacagtgggtgatggcgtccctgctgcaagaccagctgaccactgatcaggacttgctgctgatgcaggaaggcatgccgatgcgcaaggtgaggtccaaaagctggaagaagctaagatacttcagacttcagaatgacggcatgacagtctggcatgcacggcaggccaggggcagtgccaagcccagcttctcaatctctgatgtggagacaatacgtaatggccatgattccgagttgctgcgtagcctggcagaggagctccccctggagcagggcttcaccattgtcttccatggccgccgctccaacctggacctgatggccaacagtgttgaggaggcccagatatggatgcgagggctccagctgttggtggatcttgtcaccagcatggaccatcaggagcgcctggaccgatggctgagcgattggtttcaacgtggagacaaaaatcaggatggtaagatgagtttccaagaagttcagcggttattgcacctaatgaatgtggaaatggaccaagaatatgccttcagtctttttcaggcagcagacacgtcccagtctggaaccctggaaggagaagaattcgtacagttctataaggcattgactaaacgtgctgaggtgcaggaactgtttgaaagtttttcagctgatgggcagaagctgactctgctggaatttttggatttcctccaagaggagcagaaggagagagactgcacctctgagcttgctctggaactcattgaccgctatgaaccttcagacagtggagcttcggaggaagatcctggtgaaggggaagaagttaacacttga

SEQ ID NO: 3667 - DNA, 671 bp, Homo sapiens
  source 1..671: mol_type = genomic DNA
gtttgagcagcattgttagagcctgtggaaaacactttacaactgtgtaactgtcttcatctttacagaggaatagtctacaaaggaagacttgtaacctggagaagagacctgtcatttactccatcctttatagtgatgctacaggacgaagaggaatggataaaaacattggcgagcaactcaataaagcgtatgaagccttccggcaggcatgcatggatagagattctgcagtaaaagaattacagcaaaagactgagaactatgagcagagaatacgtgaacaacaggaacagctgtcacttcaacagactattattgacaagctaaaatctcagttacttcttgtgaattccactcaagataacaattatggctgtgttcctctgcttgaagacagtgaaacaagaaagaataatttgactcttgatcagccacaagataaagtgatttcaggaatagcaagagaaaaactaccaaaggtagacattgcttctgcagaaagcagcatttaaatgctgatgcgtgacatagcttcctcattttatttttctgaagtgatctgctggaattccaaacagaagttccatatatacaaatatgtggcttaaatatttctaaatagaagaactattttcaagtaaaataaaggctgaggttttgtattt

SEQ ID NO: 3668 - DNA, 3959 bp, Homo sapiens
  source 1..3959: mol_type = genomic DNA
agacgcagaggcgaggccgccagtcgaggacgaggaggagataacatcaagatgccgaagactgaggaaactgtgctccagaatgatcccagtgtagcagagaatggggcccctgagcctaaaacaccagggcagagccagaaaagcaagagtttctgtttagatgaccagtctcctgacctgatgtcttttctgtcacagatctgatagagacagttaatgaagtttccaagctgagcatttcacatgaaattgtagtaaaccaagatttctatgtggaagagaccattttgcctccaaacagtgtagaaggcaggtttgcggaggcaatgtacaatgctttttggaaccatctgaaagaacagctattgagtactcctcctgacttcacttgtgcccttgaacttctaaaagatgttaaggagaccttgctatcactgctattaccatggcagaaccgcctaagaaatgagatagaagaagctctggacacagatctcctcaagcaggaagcagaacatggggccctggatgtccctcatctttctaactacattctcaatttgatggctctgctatgtgcaccggttcgagatgaagcgatacagaaactagagaccataagagatccagtgcagttactgaggggcatcctccgtgttctgggcctaatgaaaatggacatggtgaactataccatccagagctttcgaccctacctgcaggaacattccatccagtatgaacaagctaaattccaggaactccttgataaacagcccagtctcctcgattataccacaaaatggctaaccaaagcagccacagacatcactacactatgtccgagttctcctgactcacctagctcctcctgcagcatggcgtgttcacttccaagcggggcaggtaacaattcagagccccccagtccaacaatggtgctataccaaggctacctgaacctcctcctctgggatcttgaaaacgtagaattcccagagactctgctgatggacagaatccggctccaggaactggcattccagttgcaccagttaactgtcctggcctcagtcttgctagtggccagaagcttctctggtgaagttttattcagatcacctgaatttgtggatagactgaaatgcaccaccaaggccctaactgaggaatttatctccaggcctgaagagactatgctgagtgtgagtgaacaggtgtctcaggaagtccatcaaggccttaaggacatgggcctcactactctgagcagtgaaaacacagcatctcttctaggccaactccagaacatcaccaagaaagagaactgcattcgtagcattgttggagtctctgctacactttcctggaggcctcattctcattgaaaaggagttggcagaactgggctggaagtttctcaatctgatgcatcataatcagcagagtcatttttcacaaaacgaaatctttccagaagatcacgaataagagagatcaaagctaggcagcttgagttgaagtagagctggaagaaggagttttgaggactgtttcaaaaccactggactagatgatctctaaagtggtgacatggacataggataatggttatagacagtccccctcccaacgggaaaaaatgaaagcaagcaaaaagttaccagctccaagccaacttgaaatccaatcaggatcttatccaggacgcttcattgcatttggtcttcatttctccttagtctcctccaggctgacatttcctcaatctttattggtcttccacagccctgacacttttggagataccagtcagcatttccaagttcgttctgtgagactgtagtgtcaggacaaagcaacaacaaaatgtgctctactctaaagaagtgtgggacatacagaactgaagttgcagaatgccatgaccatggtagcacttttcaaggaagaaagaaaggtgggagttctttccgggataattttgacaagaggagctgtcattatgaacatggtgggtatgagcgcccgccttcacactgccaggagaatgatggaagcgtggagatgagggatgtccacaaggaccaacaactaagacacactccttatagcatccgatgcgaaagaagaatgaaatggcatagtgaagacgaaatccgtattaccacgtggagaaatagaaaacctccggagagaaaaatgagtcagaacacacaggatggatacacaaggaactggtttaaggtcacaattccttacgggataaagtatgacaaggcatggctaatgaattcaatccagagccattgcagtgaccgcttcactccggttgatttccactacgtccgaaatcgggcatgcttctttgtccaggatgctagcgctgcctccgcattgaaggatgtcagttataagatttatgatgatgagaaccaaaagatatgtatatttgtcaatcattctactgcgccctactctgtgaagaataagttgaagccaggccaaatggagatgctaaagctgaccatgaacaaacggtacaatgtctcccagcaagctcttgatctccagaatctccgctttgacccagacttgatgggccgtgacattgatataatcctgaatcgaagaaactgcatggctgccaccctgaagatcattgaaagaaatttccctgagctgttgtctttgaacttgtgcaacaacaagctgtaccagctggatggcctttctgacattacagagaaggctcccaaagtcaagaccctgaatctctccaaaaataagctggagtcggcgtgggagttgggcaaggtgaaagggctgaagctcgaagagctatggctagaagggaacccgttgtgcagcaccttctcggaccagtccgcctatgtaagtgccatccgggattgtttccccaagttgttacgcctggacggccgagagttatccgcaccagtgattgttgacattgacagctctgagacaatgaaaccctgcaaggaaaactttactggatctgagaccctaaagcatttagtcctgcaattcctgcagcagtattactcgatctatgactctggagatcgacagggtctcctcggtgcttaccacgatgaggcctgcttctccttggctattcccttcgaccccaaggactcagccccgagcagcttgtgcaagtactttgaggatagcaggaatatgaaaacactcaaggacccctacctgaagggggaactgctgaggcgcacaaaacgtgacattgtggactccctcagtgcgttgcccaaaactcagcatgacctcagctccatcctggtggacgtgtggtgccagacggaaaggatgctctgcttttctgtcaatggggttttcaaggaagtggaaggacagtctcagggttctgttctcgccttcacccggaccttcattgctacccctggcagcagttccagtctgtgcatcgtgaatgacgagctgtttgtgagggatgccagcccccaagagactcagagtgccttctccatcccagtgtccacactctcctccagctctgagccctccctctcccaggagcagcaggaaatggtgcaggctttctctgcccagtctgggatgaaactggagtggtctcagaagtgccttcaggacaatgagtggaactacactagagctggccaggccttcactatgctccagaccgagggcaagatccccgcggaggccttcaagcaaatctcctaaaaggagccctccgatgtcttctttgtcttcgttcacatcctctttgtttcctcttttcaccagcctaaggcctggctgaccaggaagccaacgttaacttgcaggccacgtgacataaccacccaaagagccagttgctctgtgtattcgccccactcatgatcaccattttattttcataataaagagtgacgttacacgttgta

SEQ ID NO: 3669 - DNA, 633 bp, Homo sapiens
  source 1..633: mol_type = genomic DNA
gagtttcactctggctgccttctcctgagagtcggagccacagccagagccctgcccaggccgagccggagctgcagcccgagcgcggtggtgccctcagccccgtcctcttgtcctcctcagcctcggtgccttggaatttgtgtcgctgagtcagcaagcctttcagatttgcccggtttttgttgtttgtggtttgtatcaagatgggaactcaaacaagtcattcctcctaaggagctggtgtcttcatccagaagggacagtttgtgccagctctccagagagaaaagaaacttccaattgaagacactgagctgaaccattccgcccgcccgcccgcccgagggcactccagatctgccggaggcgctgggcaatgaccccgggactccaggccagaggggtctgaagctgtttgggaaagcagcgggactccttgggaagatggccatggccccaagcccttccctggtgcaggtgtacaccagccccgcggctgtggccgtgtgggaatggcaggacgggctgggcacctggcacccctacagtgccaccgtctgcagcttcatcgagcagcagtttgtccagcagaagggccaacgttttgggcttgggagcctggcccacagc

SEQ ID NO: 3670 - DNA, 269 bp, Homo sapiens
  source 1..269: mol_type = genomic DNA
ctcaaccacagactacacttgctgaactggctcctggggccatgaggctgtcactgccactgctgctgctgctgctgggagcctgggccatcccagggggcctcggggacagggcgccactcacagccacagccccacaactggatgatgaggagatgtactcagcccacatgcccgctcacctgcgctgtgatgcctgcagagctgtggcttaccagagactctgctcctatcctccccacctccccctaactgagcagcagtcctga

SEQ ID NO: 3671 - DNA, 2954 bp, Homo sapiens
  source 1..2954: mol_type = genomic DNA
gggtgacgcaggcgcagcgcgggctgcgcgcgctactgcccatccccggttgtcccacttttgttcgcctctcttcggccctctactcaagagctccgtctccgtctcgccctcctcgaagtcctcgtcgcgcgcccgcgacccaggtcgccctgaaatctagcccgtccgagcgcgagtccaacgccgcggccgcaccaaggccccctcagaccgtgccatgggtgacagtgatgacgagtacgatcgaaggcgcagggacaagttcagaagagagcgcagcgactacgaccgttcccgcgagagagatgaaagacgtcgaggggacgattggaatgacagagagtgggaccgtggccgtgagcgccgtagtcggggtgaatatcgggactatgaccggaatcggcgagagcgcttctcgccacctcgccacgaactcagcccgccacagaagcgcatgaggagagactgggatgagcacagctctgacccataccacagtggctatgagatgccctatgctggggggggtgggggcccaacttatggcccccctcagccctggggccaccctgacgtccacatcatgcagcaccatgtcctgcctatccaggccaggctgggcagcattgcagagattgacctgggtgtgccgccgcccgtgatgaagaccttcaaggagtttctcctctccctggatgactcggtggatgagacggaggccgtcaagcgctataatgactacaagctggatttccggaggcaacagatgcaggatttcttcctggcgcacaaagatgaggagtggtttcggtctaagtaccacccagatgaggtggggaagcgtcggcaggaggcccggggggccctgcaaaaccgactgagggtcttcctgtccctcatggagactggctggtttgataaccttctcctggacatagacaaagctgatgccattgtcaagatgctggatgcagccgtgattaagatggaaggaggcacggagaatgatcttcgcatcctggagcaggaggaggaggaggagcaggcaggaaagcctggggagcccagcaagaaagaagaaggacgggctggagcaggcctaggggacggggagcgcaaaaccaacgacaaggatgagaagaaggaagacggcaagcaggctgagaatgacagttctaatgatgacaaaacaaagaagtcggagggtgatggggacaaggaagagaagaaagaagactccgagaaggaagccaaaaagagtagcaagaagcggaaccggaagcacagtggtgacgacagctttgacgagggcagcgtgtcagagtctgagtcggagtcagagagcggccaggctgaggaggagaaggaggaggccgaagaagcgctcaaggagaaggagaagcccaaggaagaagaatgggagaagcccaaggacgccgcggggctggagtgcaagccgcggccgctgcataagacctgctccctcttcatgcgcaacatcgcgcccaacatctcccgggccgagatcatctccctttgtaaaaggtacccaggctttatgcgggtggcgctctcagagccccagccagagaggaggtttttccgtcgtggctgggtgaccttcgaccgcagtgttaacattaaagagatctgttggaacctgcagaacatccgtctccgggagtgtgagctgagccctggtgtgaacagggacctgacccggcgcgttcgcaacatcaacggcatcacccagcacaagcagattgtgcgcaacgacatcaagctggcggccaagctgatccacacgctggatgacaggacacagctttgggcctcagaaccagggacgcctcccctgcccacgagcctgccctcgcaaaacccgatcttgaagaatatcaccgactacctgatcgaggaagtaagcgccgaggaggaggagctgctggggagcagcgggggcgctcctcctgaggagcctcctaaggaagggaacccggcagagatcaacgtggagcgggatgagaagttgattaaggtcttggacaagctcctcctttacctgcgcatcgtgcattccttggattattacaacacctgtgagtaccccaacgaggacgagatgcccaatcgctgtgggatcatccacgttcgggggcccatgccacccaaccgcatcagtcacggggaagtgctggagtggcagaagacttttgaggagaagctcacgccgttgctgagtgtgcgggagtcactctcagaggaagaggcccagaagatggggcgcaaagacccagagcaggaagtggagaagttcgtcacctccaacacgcaggaactgggcaaggataagtggctgtgtcctctcagtggcaagaaattcaagggtcctgagtttgtgcgcaaacatatcttcaacaagcatgcagagaaaattgaggaagtgaaaaaggaagtcgcgttttttaacaacttcctcactgatgctaagcgcccagctctgcctgagatcaagccagcccagccacctggccccgcccagagtttgaccccaggactcccctacccacaccagactccccagggcctgatgccctatggtcagccccggcccccgatcttgggctatggagctggtgctgtccgccctgcagtccccacaggaggccctccatacccccatgccccgtatggtgctggtcgagggaactatgatgccttccgaggccagggaggttatcctgggaaacctcgcaacaggatggttcgtggagacccaagggccattgtggaatatcgggacctggatgccccagacgatgttgatttcttttgagccgtcccccgttcctcagtcctgtatcatccatacttgtactaccttgtcctatgaagctctgagaattttttgtacgatcagccttactgctaataaaagcacttccacaggg

SEQ ID NO: 3672 - DNA, 1321 bp, Homo sapiens
  source 1..1321: mol_type = genomic DNA
cccagaagatgtccaggctttggtgagcgggaagcttgcacttcggtatgcagggaggcagacagaagcattaaaatgcgtggctcaggctagcaagaacagatcactggcagattttgaaaaggctctgacagattaccgggcagagctccgggatgacccaatcatcagcacacacttggccaagttgtatgataacttactagaacagaatctgatccgagtcattgagcctttttccagagtacagattgaacacatatctagtctcatcaaactctccaaggccgacgtggaaaggaaattatcacagatgattcttgacaagaaatttcatgggattttggaccagggggagggtgtcctgattattttcgatgaacccccagtagataaaacttacgaagctgctctggaaacaattcagaacatgagcaaagtagtggattccctctacaacaaagccaagaaactgacataggtgagtgctggcttcaggaccccagggctgggcagctctgtcttctgcgtgtcgagactgaaaacctcctcctggtgtcctcatggcttcctgattgacactgctctgtcttctcttgcagagttggatctgtagcggtcctttggagagtgtgtgtggcgggagagtgaaaccttgggggaaaatgctaggagattcttttttctttttgttctacttttcgctcggaaagtttttaaatcctcatttggtgcatctgtattccagccaataggtgtgccagttttcatgtaatctttactggcccaacttgggagtggggaaattgcttaaaaaaaaagaaaaagaaaaaaaaaaagattattctaaataaaaggaaaaaggcttacactacctaaagctgtgctctctgcctcctgggagagggccgcaaagccaggcaccccgccaaccactgggggtcctaatccacctgctgggcatcacctctcctcctcctcagaattgggtgtttgctgaccatcaaaagcaatgactttttattctgtttgtactgaaccaaaacaaacaactgtgtatagactgctgttttcttttttatttgaaatgaggcattttggtgttctttcccctaccatacggcctgtctgcccttccctccccacattggctccagcagagtagccgaaggtcctgccgccgccgccaccaccaccaccactgcagcaacaacagcagcagcagcagcagcgcctgcatagctccactctgacctgtgaaggaatggggatgaggccaggagctagtgtctaccacggccacacagggagcagtgtgggc

SEQ ID NO: 3673 - DNA, 4815 bp, Homo sapiens
  source 1..4815: mol_type = genomic DNA
cttttctctcgaagggcacccgaagattgtcacgagtccttagactccaactactgcggcagcttccaaatttcctgaaaaccctaagctgggccagcccggcagcccacgcacttccggcctcggacccgccccaaacacccaagcgccccagcgcctcatctctaggtccggaaataaacgaacatctccgattatggttataccagggtcgagggtttccgaatatattcgattcaaagcttcggcaagacgaagaaaaccgagcctgaaagcagggcgagaaaaggggcgctgcagggcggatggaaagaattgattggtaacgatgtggagacggaaacatccgaggacatccggaggaacccggggagttctgagtggtaatcgaggggtagagtatggcagtgggcggggtcatctcggtacgttcgaagggcgttggcggaaattaccgaagatgcccgaagccgtcgggacggacccgagtacctcacgcaagatggcggagctggaggaggtgactctggacgggaagcctcttcaggcgctgcgggtgaccgacctgaaggccgcactggagcagcgaggcctagccaagagcgggcagaagagtgccctggtcaagcggctcaaaggggctctaatgctagaaaatttacagaaacactcaacaccccatgctgcattccagccaaattcccagattggtgaggaaatgagccagaacagtttcataaaacagtatctggaaaagcagcaggagctacttaggcagcgtctggaacgtgaagctcgagaagctgcagaacttgaaggaaaaagctcctcaatttctgaagagaaaggtgactctgatgatgagaaaccaaggaaaggagaaagacgatcatctagggtcagacaggcaagagcagctaaactgtctgagggcagccaacctgctgaggaggaagaggatcaagaaacaccttccagaaacctaagggtcagagcagatcgaaatttgaaaacagaggaggaagaagaggaggaggaggaggaggaagaagatgatgaagaagaggaaggtgatgatgagggacaaaaatctagggaggcaccaatcctgaaagagtttaaggaagaaggggaagagatacctagagtaaaaccagaggagatgatggatgagagacccaaaacaagatcccaggaacaggaggtgttagagagaggagggagatttacaagatcccaggaagaggctagaaaaagtcatctggccagacagcagcaggagaaggaaatgaaaacaacatctccccttgaggaggaagaaagagaaataaaatcttcacaaggcttaaaggaaaaatcgaagtctccttcccctcctcgactgactgaagatcgaaagaaggcctcacttgtagcgctgccagagcaaactgccagcgaggaggagactcctccacctttactaacaaaggaagcatcttctccaccacctcatccacagctccatagcgaagaagaaatagagcccatggaaggcccagcccccgctgtcctcattcagttatctcctcctaatacagatgctgacaccagggagctattagtatctcagcatactgtccagttggtaggaggcctgtctcctttgtcaagtccttcagacaccaaagcagaatctccagcagagaaagtgccagaggagagtgtcctgcctctggttcagaaaagcacactggctgactactcagcccagaaggatcttgaacctgagtcagacagatctgctcagcccctccctctaaaaattgaggaattagcactggccaaaggaatcactgaagaatgtctgaaacagccatctttggaacagaaggaaggcagaagagcttctcatacccttctcccaagccacagattgaaacagtcagctgattcatcctctagccggtcctcctcatcttcctcctccagttctagatcaagatctcgctctcctgacagttcaggttctcggtctcattcaccgctcagatccaagcagagagatgtagcccaggcacgtactcatgccaaccctcgtggtagacccaagatgggctccagatcaacatcagagtccagatcaaggtcacgttcacgttctcgttcagcatcaagcaacagcagaaaatctctgagccctggagtctccagggacagcagcaccagctatactgaaaccaaagatccctcttctggtcaggaggttgcaactccaccagtgccacaactgcaggtctgtgagccaaaggagaggacttccacctcctcatcctctgtccaagcaaggcgtctgagtcagcctgaatcagctgaaaagcatgtgacccagaggttacagcctgagcgggggagcccaaagaagtgtgaagctgaagaggcagagccaccagctgccacacagccccaaacctcagagactcagacctctcatctgccagaatcagaaagaattcatcacactgttgaggagaaggaggaagtgaccatggacacaagtgaaaacagacctgaaaatgatgttccagaacctcccatgcctattgcagaccaagtcagcaatgatgaccgcccggagggcagtgttgaagatgaggagaagaaagagagctcgctgcccaaatcattcaagaggaagatctccgttgtctcagctaccaagggggtgccagctggaaacagtgacacagaggggggccagcctggtcggaaacgacgctggggagccagcacagccaccacacagaagaaaccttccatcagtatcaccactgaatcactaaagagcctcatccccgacatcaaacccctggcggggcaggaggctgttgtggatcttcatgctgatgactctcgcatctctgaggatgagacagagcgtaatggcgatgatgggacccatgacaaggggctgaaaatatgccggacagtcactcaggtagtacctgcagagggccaggagaatgggcagagggaagaagaggaagaagagaaggaacctgaagcagaacctcctgtacctccccaggtgtcagtagaggtggccttgcccccacctgcagagcatgaagtaaagaaagtgactttaggagataccttaactcgacgttccattagccagcagaagtccggagtttccattaccattgatgacccagtccgaactgcccaggtgccctccccaccccggggcaagattagcaacattgtccatatctccaatttggtccgtcctttcactttaggccagctaaaggagttgttggggcgcacaggaaccttggtggaagaggccttctggattgacaagatcaaatctcattgctttgtaacgtactcaacagtagaggaagctgttgccacccgcacagctctgcacggggtcaaatggccccagtccaatcccaaattcctttgtgctgactatgccgagcaagatgagctggattatcaccgaggcctcttggtggaccgtccctctgaaactaagacagaggagcagggaataccacggcccctgcaccccccacccccacccccggtccagccaccacagcacccccgggcagagcagcgggagcaggaacgggcagtgcgggaacagtgggcagaacgggaacgggaaatggagcggcgggagcggactcgatcagagcgtgaatgggatcgggacaaagttcgagaagggccccgttcccgatcaaggtcccgtgaccgccgccgcaaggaacgtgcgaagtctaaagaaaagaagagtgagaagaaagagaaagcccaggaggaaccacctgccaagctgctggatgaccttttccgaaagaccaaggcagctccctgcatctattggctcccactgactgacagccagatcgttcagaaagaggcagagcgggccgaacgggccaaggagcgggagaagcggcgaaaggagcaagaagaagaagagcaaaaggagcgggagaaggaagccgagcgggaacggaaccgacagctggagcgagagaaacgtcgggagcacagtcgggagagggacagggagagagagagagaaagggagcgggacaggggggaccgagatcgggatagggaaagggaccgagaacgaggcagggaaagggatcgcagggacaccaagcgccacagcagaagccggagtcggagcacacctgtgcgggaccggggtgggcgccgctagctgggaaaacactagagctgcaggtaccagccactcggccccagggggttatggccacagagggataggcacagtctccaccaccctggagccaagggtctttcacatcacctatccctacatacataccaaatggaaaagtggccatccttttccccccaaacacacccccttaacctatctcttgggacttagcccgaccctccctctcatttcccattaagtctgagaggcaagagctaggttaggcaaggaggtggttggccagagatggggaacagccaggtgccccagtcctctgatttttcctccatcctgcttaccacctccctgggtacttacagccttctcttgggaacagccggggccaggactgggtcacctatgagctgaatcagcatctcctcctgagtcccagggcccctgcagttcccagtctcttctgtcctgcagcccttgcctctttcccacaggttccactttatatccaccttttccttttgttcaatttttatttttattttttttattattaaatgatgtggtctatggaaaaaaaaataaaaatctgacttagtttt

SEQ ID NO: 3674 - DNA, 2038 bp, Homo sapiens
  source 1..2038: mol_type = genomic DNA
gtggggccgccgttgccagagaagccactagccggttactagctgcgcttttgttccacttgagcgggcactcttctgcggcaagcaggtctaggaattcgcctggttcccacctcgcgtcccttgccttccttcctagtctacccactgtagtgccccctgcgtcccgctccctcctagccgactcagagcacaagaaggattgccacggtttccattgcagcagccgtggcgcctctgaccctttttttatatcgcggcgacggcgggctgtcgtcacgacgacgtgcggacgcagcggcgggggcctttcagcttatgtggagaagtcgctgtgaagccacctataaatccatttactgaatttatggagaaggctgtaaatgatggaagtcattcagaagaactcttttgccatcttaaaactatatcagagaaagaagatttaccacggtgtaccagtgaaagtcatctcagctgcctgaagcaggacattctaaatgaaaagactgaattggaagcaacacttaaggaagcggagttggtaactcattctgtagaattgcttttgccactatttaaggacaccattgaaaagattaattttgaaaatgcgaatctttctgcattgaatttgaagatttctgaacagaaggaaatattaataaaagaattagacaccttcaaaagtgtaaaactagctttagaacatcttcttagaaagagagactacaaacaaacaggagacaatttatccagcatgttgctagaaaatctaactgataatgaaagtgaaaatactaatcttaagaagaaggtatttgaaaaggaggcccatatccaagaactttcttgtttgtttcagagtgaaaagagcttagaaaccaagatagccaagtggaacctgcaatcaagaatgaataagaatgaggctatagtgatgaaagaagcaagtaggcaaaaaactgtagctttaaaaaaggcatctaaagtttacaaacaaaggcttgaccattttacaggagctattgaaaagcttacttcccaaattagagatcaggaagccaagttgtctgaaacaatttcagcttccaatgcctggaaaagtcattatgagaaaattgtgatagaaaaaaccgaattggaagtacagattgaaacaatgaaaaagcaaatcattaatcttttggaagatctgaagaaaatggaagaccatggaaaaaattcatgtgaagaaattcttagaaaagttcactcaattgaatatgaaaatgaaactctgaatcttgagaatacaaaattaaagactacacttgctgctttgaaggatgaagttgtatctgttgaaaatgaactctcagaattgcaagaagtagaaaaaaaacagaaaacccttattgaaatgtataaaactcaggtacaaaagttgcaagaagcagctgaaatagtaaaaagcagatgtgaaaatttgctacataaaaataaccaaataacaaaaaccaaaaataaaaatgtagagaaggttgatggaaatcacaatcttctgacaaagctttctctggaagaggaaaactgtcttattcagctgaagtgtgaaaaccttcaacaaaaattagaacagatggacgcagaaaataaagagcttgagaagaagctggcaaaccaagaagaatgtcttaagcacagcaatcttaagtttaaagagaaatctgcagagtatacagcattggccagacaactggaagctgctttagaagaaggaagacaaaaggttgctgaagaaatagagaaaatgtcatctagagagagtgctttacaaattaaaatattagatctggaaactgagcttagaaagaaaaatgaagaacaaaatcaacttgtttgcaaaatgaacagtaaagcacaacatcaggaagtgtgtttgaaagaagtacaaaatagtcttgagaagtcggaaaatcaaaatgagagtattaagaattatttacagtttcttaaaacttcttatgtaacaatgtttgaataaattgtcaaattt

SEQ ID NO: 3675 - DNA, 1847 bp, Homo sapiens
  source 1..1847: mol_type = genomic DNA
ggtggagggtggaacgcgggcgcctgaaggagttgttgtctcggcagcgcccgcggagacgtgaagaggtggttgtgggaagagaagtttgcagaactgaaatggaggtcagagcttcattacagaaggttagtggatcatctgattctgtggctacaatgaacagtgaagaatttgttttggttcctcagtatgcagatgataattctacaaaacatgaagaaaaacctcaactgaagatagtttctaatggtgatgaacaattggaaaaagccatggaagagattttgagagattccgagaaaaggccaagcagtcttcttgttgattgtcaaagttccagtgagatttcagaccattcgtttggagatattccagccagccaaacaaataagccatctcttcagttaattttggatccgtctaacacagaaatttctacacccagaccatcttctccaggtggactacctgaagaagatagtgttttatttaataaactgacctacttaggatgtatgaaggtttcttccccacgtaatgaagtagaggctttacgggcaatggcaaccatgaaatcttccagtcaatacccctttcctgttaccctgtatgtaccaaatgttccagaaggttctgtgagaattatagaccaatccagcaatgtggagatagcatcttttccaatctataaggtgttattctgtgcacgtggacatgacggaacaacagagagcaattgctttgcatttacagagagttcccatggttcggaagaatttcagatacatgttttctcctgtgaaattaaagaggcagtaagcagaattttgtacagtttctgtacagcattcaaacgttcttccagacaagtgtctgatgttaaagactcagttattcctacccccgacagtgatgtgtttaccttcagtgtctccttggaggtaaaagaagacgatggaaaaggaaactttagattattggtaattcctattccttttgaatatttcagccctgtgcctaaggatagagataaattttatttcaaattaaagcaaggaatagagaagaaggttgtgattacagtgcagcaactttctaacaaagaattagctattgaaagatgttttggaatgttattaagcccaggtcgaaacgtgaagaacagtgacatgcatttactggatatggaatccatgggaaagagctatgatgggagagcttatgtcatcactggcatgtggaaccccaatgcaccagtatttctggcacttaacgaggaaaccccaaaagataagcaagtatacatgactgtggcagtggatatggtagtcacagaggtggtggagcctgttcgctttctcctggagacagtagtccgtgtgtaccctgcaaatgagcgattttggtatttcagcagaaagactttcacagagactttcttcatgagattgaaacagtctgagggaaaaggccataccaatgctggagatgcaatatatgaggtggtgagtctacagcgagagtctgacaaggaggaaccagtcactcctactagtggagggggtccaatgtcaccccaggatgatgaagcagaagaggagagtgataatgaactctcaagtggaacaggtgatgtgtctaaggattgtcctgagaagatcctgtattcttggggagagttgctaggaaaatggcacagtaaccttggtgcacgaccgaaagggctgtctactctggtgaagagtggtgtccctgaagcattgagggcagaggtatggcagttattggcaggctgccatgacaaccaggcaatgctggatagataccgaattcttatcacaaag

SEQ ID NO: 3676 - DNA, 865 bp, Homo sapiens
  source 1..865: mol_type = genomic DNA
gggtcccccggcccctgcagggctacttgggcgcagagccgcggagggtctccgttcctagaggtcctcctatcccgggctgcctgagtcctcgccagcatccgccctctcccactcccatccttcctggatccgcctctcggttcccgagggacagtcccgaccgcaaacccacgtagagtaaggaatgtgggacaggcgacagaagtggcatacggtcctgcgttatccctccgtctcgccacaccttgtgtctccatctctccccacttccttccctccgtctgtcatctgtcatccccggtcgctctaagaccaggattccaattcgcctagtgaggaatctcactaggggaatttatcgcgacatcataaattaacgggttcattttgactgaaaaagcgaaggacttttttcaggcagaaaacaagtctcgtctggacgcgtctagtctatttattgtcgcggggaagctgcggccgcctcgcacccggaacaacaaagcaaggaagacggagtccgagcctcgggggctcctagcaacgggccggggcgggagttccatggagactggggagcgcgcccgtctcatcctcatccttgtcctccagcttctccttcgcatccgacgcaaccggcagcagcgctgccgccgcgtcctcagccaccgctccctcttcccacggatgtgatcttcgtggtggaaagctaaattttaaaaccaccccaatggatgcagacagtgatgttgcattggacattctaattacaaatgtagtctgtgtttttagaacaagatgtcatttaaacttaaggaagattgctttggaaggagcaaatgtaatttataaacgtgatgttgga

SEQ ID NO: 3677 - DNA, 1086 bp, Homo sapiens
  source 1..1086: mol_type = genomic DNA
gccacgcgtgcgcttaggcgccgctgagcgctgactgggtgcgagtggggaagctgctaacccgacccggattggcgctgaggtggcccgtggggcagggcagatgattctggaccagatgaagcctgaggagccttccagctctaagatagcaggataggagacttctaagattggagctgcagaagacttgccagcccaccagcacaatgtcagaaggaagagtcagcagagcaaccagagttctactacgatgagtttggtttccgtgtgtacaaggaagaaggtgatgagcctggctccagtctgctggcgaactcccctctgatggaggatgctccacagaggctgcggtggcaggcccacctggagttcacccataaccacgatgtgggggatctcacctgggacaagattgccgtctccctaccccgctctgagaagctccgctccctggtgctggccggcatcccacatggcatgaggccacagctgtggatgcggctctctggggccctgcagaagaagaggaactctgagctgtcctaccgcgagattgtgaagaacagctccaacgatgagaccatcgctgccaagcagatcgagaaggacctgctccgcaccatgcccagcaacgcctgcttcgccagcatgggtagcatcggggtgccccgcctgcgcagggtgctccgggccctggcctggctctacccagagatcggctactgccagggcaccggcatggtggccgcctgcctcctgctgttcctggaggaggaggacgccttctggatgatgtctgccatcatcgaggacctgctccccgcctcctacttcagcaccaccctgctgggtgtccagactgaccagcgggtcctgcgccacctcattgtccagtacctgcctcgcctggacaagctgctccaggagcatgacattgagctgtccctgatcacactgcactggttcctcacggccttcgccagcgtggtggacatcaagctgctcctgcgcatctgggacctgtttttctacgagggctcccgggtgctgttccagctcacgctgggcatgctgcacctcaag

SEQ ID NO: 3678 - DNA, 649 bp, Homo sapiens
  source 1..649: mol_type = genomic DNA
tccactggtgaaagtgcagatctttggcgttcgtctagacacagcacggcaggagaccaactatgtggagaacaatggttttaatccatactgggggcagacactatgtttccgggtgctggtgcctgaacttgccatgctgcgttttgtggtaatggattatgactggaaatcccgaaatgactttattggtcagtacaccctgccttggacctgcatgcaacaaggttaccgccacattcacctgctgtccaaagatggcatcagcctccgcccagcttccatctttgtgtatatctgcatccaggaaggcctggagggggatgagtcctgaggctcaatcccataccgacatctacaactaatctttcccatcaactctgtgtgaaggcaggttgcaactagaaattcagaggggcttggaatagagaaacctaaagaagcatcatcccctccatccccaacttcctcaaagcccaaagccaagggaaggataaatcaaggctcaaggcttccccagcaaagattagggaaagagacttgaccccaggactgtactacgactcttaagagaacactgcacagcactcaaagtcccccactggactgcttcctccttagccccactggtataaatacatctctctcc

SEQ ID NO: 3679 - DNA, 1902 bp, Homo sapiens
  source 1..1902: mol_type = genomic DNA
aagggcccagagctctggccggcggaccttttccttctggagtttccccggcgggtgccagggctcgacccacagagcaccctcagccatcgcgagtttccgggcgccaaagccaggagaagccgcccatcccgcagggccggtctgccagcgagacgagagttggcgagggcggaggagtgccgggaatcccgccacaccggctatagccaggcccccagcgcgggccttggagagcgcgtgaaggcgggcatccccttgacccggccgaccatccccgtgcccctgcgtccctgcgctccaacgtccgcgcggccaccatgatgcaaatctgcgacacctacaaccagaagcactcgctctttaacgccatgaatcgcttcattggcgccgtgaacaacatggaccagacggtgatggtgcccagcttgctgcgcgacgtgcccctggctgaccccgggttagacaacgatgttggcgtggaggtaggcggcagtggcggctgcctggaggagcgcacgcccccagtccccgactcgggaagcgccaatggcagctttttcgcgccctctcgggacatgtacagccactacgtgcttctcaagtccatccgcaacgacatcgagtggggggtcctgcaccagccgcctccaccggctgggagcgaggagggcagtgcctggaagtccaaggacatcctggtggacctgggccacttggagggtgcggacgccggcgaagaagacctggaacagcagttccactaccacctgcgcgggctgcacactgtgctctcgaaactcacgcgcaaagccaacatcctcactaacagatacaagcaggagatcggcttcggcaattggggccactgaggcgtggcgcccgtggctgcccagcaccttcttcgacccatctcaccctctctcattcctcaaagctttttttttttttcctggctggggggcgggaagggcagactgcaaactggggggctgcgtacgtgcaggaggcgcggtggggctgcgtggaggagggggccacgtgtgagagagaagaaaatggtggccggagatgggagggcccaaggaacctcctgggagggggcctgcattctatgttggtgggaatgggactgggctgacgccctgcattcagcctgtgcctttcctggggtttcttttctgttcttttcggaggagagggcccgagaaggggccataccagggcgcggcgctgggttgccacacttgggaaagcagcccggagctgggtgctggggaaggcggggcgcgtagcctcccgccgccctgcggttgggccggtggaggcccaggcgttgctaggattgcatcagttttcctgtttgcactatttctttttgtaacattggccctgtgtgaagtatttcgaatctcctccttgctctgaaacttcagcgattccattgtgataagcgcacaaacagcactgtctgtcggtaatcggtactactttattaatgattttctgttacactgtatagtagtcctatggcacccccaccccatccctttcgtgccactcccgtccccacccccaccccagtgtgtataagctggcatttcgccagcttgtacgtagcttgccactcagtgaaaataataacattattatgagaaagtggacttaaccgaaatggaaccaactgacattctatcgtgttgtacatagaatgatgaagggttccactgttgttgtatgtcttaaatttatttaaaactttttttaatccagatgtagactatattctaaaaaataaaaaagcaaatgtgtcaactaaattggacaagcgtctggtcctcattaatctgccaatgaatggtttcgtcattaaataaaaatcaatttaattgatttactagc

SEQ ID NO: 3680 - DNA, 1856 bp, Homo sapiens
  source 1..1856: mol_type = genomic DNA
attactcgcttacgtgagcagaagtagttctggtcgtcgtctaccgtctcgctatagccgtttgagggaagaaggaggaaaattacccgctacaccaaaattgcattgagccaaacttgccaccaagagcccaacaatcaccatgatgctgagcacggaaggcagggaggggttcgtggtgaaggtcaggggcctaccctggtcctgctcagccgatgaagtgatgcgcttcttctctgattgcaagatccaaaatggcacatcaggtattcgtttcatctacaccagagaaggcagaccaagtggtgaagcatttgttgaacttgaatctgaagaggaagtgaaattggctttgaagaaggacagagaaaccatgggacacagatacgttgaagtattcaagtctaacagtgttgaaatggattggatgacactgccagtggactttcaggggcgaagcacaggggaagcctttgtgcagtttgcttcacaggagatagctgagaaggccttaaagaaacacaaggaaagaatagggcacaggtacattgagatcttcaagagtagccgagctgaagttcgaacccactatgatccccctcgaaagctcatggctatgcagcggccaggtccctatgataggccgggggctggcagagggtataatagcattggcagaggagctgggtttgaaaggatgaggcgtggtgcctatggtggagggtatggaggctatgatgactatggtggctataatgatggatatggctttgggtctgatagatttggaagagacctcaattactgtttttcaggaatgtctgatcatagatacggagatggtgggtccagtttccagagcaccacagggcactgtgtacacatgagggggttaccttacagagccactgagaatgatatttataatttcttctcacctcttaatcccatgagagtacatattgaaattggacccgatggcagagttaccggtgaggcagatgttgaatttgctactcatgaagatgctgtggcagctatggcaaaagacaaagctaatatgcaacacagatatgtggagctcttcttaaattctactgcaggaacaagtgggggtgcttacgatcacagctatgtagaactttttttgaattctacagcaggggcaagtggtggcgcttatggtagccaaatgatgggagggatgggcttatccaaccagtctagttatggaggtcctgctagccagcagctgagtggtggttatggaggtggttatggtggtcagagcagtatgagtggatatgaccaagttctgcaggaaaactccagtgactatcagtcaaaccttgcttaggtagagaaggagcactaaatagctactccagatataaaagctgtacatttgtgggagttgaatagaatgggagggatgtttagtatatccagtatgattggtaaatgggaaatataattgattctgatcactcttggtcagcttctctttctttatctttctttctccttttttaagaaaacgagttaagtttaacagttttgcattacaggcttgtgattcatgcttactgtaaagtggaagttgagattattttaaaacttcaagctcagtaattttgaacactgaaacattcatctaggacataataacaaagttcagtattgaccataactgttaaaacaatttttagctttcctcaagttagttatgttgtaggagtgtacctaagcagtaagcgtatttaggttaatgcagtttcacttatgttaaatgttgctcttataccacaaatacattgaaaacttcggatgcatgttgagaaacatgcctttctgta

SEQ ID NO: 3681 - DNA, 4192 bp, Homo sapiens
  source 1..4192: mol_type = genomic DNA
tttcccttagtaacagcttttaccttctgcctcaattcctctccccgctcgcgcccttcccccgcgcgccgcctccccccgccgccggccgcgtgcgcccccgcccctccccccgcggcgggagcacctccgctcgccacctggggacccgcgccgcgctccccgcccccgcccgcccggcgcccatcccccgcgccctccgctcgctggggttataattgcctctcaccccccggaggggttattttgggggtggttggaggcggtggcggcggcggcgaggaggggaatttccttgtgcctccattcccgggaggggggagcggcgttggaggccaccgtttccagcatcaacaacagcaacttgtgattggcggtgaccggatattcagttgcacatccccacatcaatgcactgccaatgggttatatcctgtgttgtgacctcatggtttaagtgggaataaagatgagtataagcagtgatgaggtcaacttcttggtatatagatacttgcaagagtcaggattttctcattcagcatttacctttggtatagaaagccatatcagtcagtccaatataaatggtgccctcgtcccacccgctgcattgatttctatcatccagaaaggtctacagtatgtagaagcagaagttagtattaatgaggatggtaccttgtttgatggtcgaccaatagagtctctgtccctgatagatgccgtaatgcctgatgtagtacaaacaagacaacaagcttatagagataagcttgcacagcaacaggcagcagctgctgcagctgccgcagctgcagccagccaacaaggatctgcaaaaaatggagaaaacacagcaaatggggaggagaatggagcacatactatagcaaataatcatactgatatgatggaagtggatggggatgttgaaatccctcctaataaagctgttgtgttgcggggccatgaatctgaagtttttatctgtgcctggaaccctgttagtgatctcctagcatcagggtctggagactcaacagcaagaatatggaatcttagtgagaacagcaccagtggctctacacagttagtacttagacattgtatacgagaaggagggcaagatgttccaagcaacaaggatgtcacatctctagattggaatagtgaaggtacacttctagcaactggttcctatgatgggtttgccagaatatggactaaagatggtaaccttgctagcaccttagggcagcataaaggccctatatttgcattaaaatggaataagaaaggaaatttcatcctaagtgctggagtagacaagactacaattatttgggacgcacatactggtgaagccaagcaacagtttccttttcattcagcaccagcattggatgttgattggcagagcaacaacacctttgcttcttgtagtacagatatgtgcattcatgtctgtaaattaggacaagacagacctattaaaacattccaaggacatacgaatgaagtaaatgctatcaaatgggacccaactggcaatctcttggcctcctgttctgacgacatgactttaaagatatggagtatgaaacaagacaattgtgtccatgatttgcaagcacataataaagaaatttatactatcaaatggagtccaacaggaccagggactaataatccaaatgccaaccttatgttagcaagtgcatcctttgattctactgttaggttatgggatgtagaccgagggatatgcatccataccttgacaaaacaccaagagcctgtgtacagtgtagctttcagtcctgatggcaggtatctggcaagtggttcttttgacaaatgtgtacacatctggaacacgcagacaggtgctctagttcacagctataggggaacaggtggaatatttgaagtttgctggaatgcagcaggagacaaagttggagccagtgcatcagatggttcagtttgtgtattagaccttcggaaatagcgctactagttggaagccatggaccgactatgaatgtgtacatagccaaaatgactgtccctgacccatgtactgctatagtcccacttgaaccatggccagtccactacagccaaatctaaaagaaatatatacatacagtgtatataaacaaaattgcaccctgaagatgacagagttttgtcacagcttgtgaattctgttcaccaagtgctggaatctaatctgctgtgcccctaaaatagcatttagaagttttggatatgaaaaacagaagagagaaaaatatacattataaaagcagaacatacatgtaccagtttttggatactaaatgacagccttgtttctcccctttgaatcagcagacaccatggattatattctttttttcccttcagtagtgagcagtttgtatgtacagagaaaatggacttacaaaaacttgcagcagtagtttgttcttgctttaaaatttcgtttttggtttagattatggatgcatgaagtaagggagtgaatcagtttcttgtttatatttttttcaccttttaaacaaaaaattctttaaaatattttaatgcattcttttgaagaggtagatgtttggtacattttatggctcccagagcatatattcagttggtgcatgttgtggaagggggaattggaaattaaatgaaaacctatgactttggtcatgtcaatctgtaagacacatcagtaaaagggtattatgctctgttggttttgtttttttgttttgctttttttttttttttttcttttttgttttttggtgatgtggcttaaatgcaatagtttcttttttgggacatatttctgccaattaaagactagaagggcacaactttttttttaattaccatagagaagatacattaaaaaaaatcttctgatgttttgtagccataactaaattatggtaaaaatgtgcactattgtgaaaaggagcaacgtagttttgggttttttgttgtttgtttgttttgctttgttttttaagagattaaaatgtttctggataaggattagcttctcgaagtgtccatcattctgtgtagaagcttaaatatgtaatgtaaccaaactccagtattaaaaatctctcatgttgttttctttatacaaagcaagataacggcatataacactgccattacatggcaaaatgtttgctaccttagtttaaaaaacaatctcaaacaaaagacttgcttcaaggtgtttttaaatagcagtgattcagaattttttttaatgaaagtataattgcactaaccttcttcctgctgctctgattctgcatttgtggtacttgtgactacgttttttcaaatatagatagatttaagctgctaatttttttttttttagtaatcactactatatcatgtcttttactctgtttataatatcaagtattttcttaaagatatagatattaaaccttgtgctcatgcaacttagagtaacatatacagacaaatgattgcatgaggccatgtttatatgtgtgactaataaggcttgtcatgattaacataatccaggtatgtcatttctgaagagaatagtcatcaaatttatatctcgaagattttaattaaggaattgcttattgttgagcttagcaaattaataacactatttctgtcactaattattttgaggccttttagtactaaaattttaacctgtgttctaagtagaaactgatttaacccaagtaatgcagctttgattgatttcagcattcgttgctttgctatttttacaaaacagcattgattgaagcaagtcttggttttactaaggtagggtagcatttgctattggtaaagagaataaatacacttaatttcacaatacattgttatatgtaccccagttgttgttagtggggactatgatactgtaataatatttttaaaaatttacatcaagagaggcagtcattcacgatggttttgtgccagctctttttagggttttggatcacattagagatatttagaacatattaccctgtgacttacgtaggaaacctaatatgctgagtatctggcacttgaattcctgcttttattgctggaggtccacatctgtggttgacctctgttattgtttaaaaaaaataaataaaaattaaaaaaa

SEQ ID NO: 3682 - DNA, 3767 bp, Homo sapiens
  source 1..3767: mol_type = genomic DNA
gttgcctgatgacgagagttgggagtgtggctggggctgcggatctccagcagtggcgttacttctagcggctggataccgggttctccgcgagatcgcgagatcccgagatattctccccgcacggaagcgacgactggcctggccagaggactcgcgtgggagcgaggtgccggccccgacaggacggtgagaaattgttttacagcctacccgtatattacaagaaatctcaagtcaaacactggaaaagatgtcagaagattcagaaaaggaagactattcagacagaacaatcagtgatgaagatgaatcggatgaggatatgttcatgaaatttgtaagtgaagatcttcatcggtgtgcacttttaacagctgactcttttggtgatcccttcttcccccggactacacagatactattagaatatcagctagggagatgggtgccacgtcttcgtgaaccaagggatttatatggtgtctcttcttctggtccattgagcccaacacggtggccataccattgtgaagtcatcgatgaaaaagtccagcatattgattggactccttcttgtcctgagccagtgtatatcccaacgggcttagaaacggaacccctttatccagactccaaggaagctactgtggtttatctagctgaagatgcttacaaagagccctgttttgtgtattcccgagttgggggtaaccgaacacctttgaagcagcctgtggattaccgtgacaatactttgatgtttgaagcaaggtttgagagtggtaatctacagaaggtagtcaaagtggcagaatacgaataccaattgactgtacgccctgacctcttcacaaataaacacacccagtggtactatttccaagtcactaatatgcgagcaggaatagtctacagattcactattgtcaacttcaccaaacctgctagtctttacagtcggggtatgcgcccactgttctattctgaaaaagaggccaaggctcatcacattggctggcagagaataggagaccaaatcaagtattataggaacaacccaggccaagatgggcgccattatttctctcttacatggacatttcaatttccacacaacaaagatacctgctactttgctcattgctatccatacacttacaccaacctgcaagaatacctttctggcatcaataatgatccagtacggtcaaagttttgtaaaatacgtgttttgtgccacacgcttgctaggaacatggtgtatattttaacaatcactacccccttgaagaactctgactcaagaaagcggaaggctgtgattctgactgcaagggtccatccaggggaaaccaacagctcttggatcatgaaaggcttcctagattatattttaggaaactcaagtgatgcacagttgcttcgggacacttttgtcttcaaggtggtacccatgctcaatccagatggtgtgattgtgggaaattatcgctgttccttagctggacgggatttaaaccgtaattatacatctctcctgaaggaatcttttccttctgtatggtatacccggaacatggttcatagactgatggagaaacgagaggttattttatactgtgatcttcatggccatagtaggaaagagaacatcttcatgtatggctgtgatggtagtgacagatctaagacattatacttacagcaacgaatcttcccacttatgctaagcaaaaattgtccagataaattttcattctcagcttgcaagtttaatgtccagaagagcaaagaaggaacaggaagggtggtaatgtggaaaatgggaatcaggaacagctttaccatggaggccaccttctgtggatctactctgggtaacaaacgaggcactcatttcagcacgaaagacctggaatcaatgggatatcatttttgtgattctctcttggattattgtgatcccgaccggaccaagtattatcggtgcctgaaagaattagaagaaatggaaagacatataaccctggaaaaagtctttgaggattcagacacacctgtgatagacattacattggatgtagagtctagtagccgaggctctgacagttcagaatccattgactctctgacttaccttctcaagttaacttctcagaaaaaacatttgaaaacaaagaaggaaaggaattctaccatagcaagccaccaaaatgccagaggacaagaggtttatgatagagggcatttgctgcaaagacacacacaatcaaattctgatgtgaaagatacaaggccaaatgaaccagatgattatatggttgattatttcagaagacaattacctaatcaaggtttggctcactgcaagctccgcctcccaggttcacgccattctcctgcctcagcctcccgagtagctggaactacaggcacccgccaccatacctggctaatttttgtatttttagtagagatggggaaaaaaattcccctcaagggaactgatttgtatggaaactgtttcaaagtgacatccctgcagtctcctatgggcaaacaaacttctacttggactgagaagacaaggataccaacagaagatctgcaccacaacttaaaaagcaaaataaaagaatgcatatctttccaaagcaagaagactggcataaattggacagatgatgaaaaaagaagctacaaggataaaggaatagttcaaactcaagaaatattgcagtatttgctccccatcgtgcatagcactaaaaacatgcaaaccactcagataaaacagctattcaatccaagaaccaacttccaaatccaacatcaactaaatccggctacttgcagaaatataaagaaatacagcacatcttggacagcacccagaaatcacccttttgtaatccaaggggatgttatggcaaactcttcagaatgggtccagtctaagccccacaggtcattggaaagtttatcacctctcaaaggccccaagaagaataaacattctcaaatctgggccataaagaatgaagacataaaacctctcagcagcaagtgggagactgcttcttcaagctttggaatggatgcaaatgttctaaaatataagagtcttcaagctgaagaaactaaccagcaaagctctaagcatacagccctccatctaactaaaaataaggatgagcaggccaataagaatgatggacaacccaccttatatctgaagttccaaagggagagttaatctagctttatactgctctgagaactgtgaatgaaggataacatatgcttatgtagtaaaaagaaaaaaaggaaagccctccccttcccctttccctatctctccccttacacatgcatatgcataaactaaaaattttagatatcccatcttctgtagtgggaacatctttcagagatttaaaaagaaatccagagaaaatatggaaaaatattaaagcagatatttatatttagtttttatcagcatggaaaaaaatctctgaagttttgatttcttccaaaactacttacacattcgacaccaaaaaaacttaagaactcaaagtaggaatgacatataatatgtcactgattttaacctccctactagacactttaatcaattagtcaacaaacatcatttcctgattttctgttatatcattagtgtgctaggaaccatttctctctactaggagattaccacataattgtacagataaaacatacctgaataaaatgattac

SEQ ID NO: 3683 - DNA, 7941 bp, Homo sapiens
  source 1..7941: mol_type = genomic DNA
tcaagatggcggccaaggtggcgaagcagcagccgcggcggcggcggcggctggagtgagcgtccgactcgccgcgccgaacgaggtcccggtgtagggccgcgcgccgtggccgcgtcccactcctcaggccggggcgcacgtcggctcccacgcttagccagctcccggtggtttcctagaaacatgattgtttattggcattgatctcacagtctggtgaggacttctttactgataatgtcaagttcaggttatcctcccaaccaaggagcattcagcacagaacaaagtcgttatcctcctcactctgtccagtatacatttcccaacacccgccaccagcaggagttcgcagtccctgattatcgttcctctcatcttgaagtgagtcaggcatcacagcttttgcagcaacagcagcagcaacagcttcgaaggcgaccttccttgctttcagaatttcacccaggttctgacaggcctcaagaaaggagaactagttatgaaccgtttcatccaggcccatccccagtggatcatgattcactggaatcgaagcgaccacgtctggaacaggtttctgattctcattttcagcgtgtcagtgctgcggttttgcctttagtgcacccgctgccagaagggctgagggcttctgcagatgctaagaaggatccagcattcggaggcaaacatgaagctccatcctctccaatttcggggcaaccatgtggagatgatcaaaatgcttcaccttcaaaactctcaaaggaagagttaatacagagtatggatcgtgtagatcgagaaattgcaaaagtagaacagcagatccttaaactgaaaaagaaacaacaacagcttgaagaagaggcagctaaacctcctgagcctgagaagcccgtgtcccctcctcctgtggagcagaaacaccgcagtattgtccaaattatttatgatgagaatcggaaaaaagcagaagaagctcataaaatttttgaaggtcttggcccaaaagttgaactgccactgtataaccagccatcagataccaaggtgtaccatgagaacatcaagactggagtacctgcaaggcgcatgatgaaaaaccaggtgatgaggaaaaaactcattttattttttaaaagaagaaatcatgcaagaaaacaaagggaacaaaaaatctgccagcgttatgatcagctcatggaggcatgggagaaaaaagtggacagaatagaaaataatcctcggaggaaagctaaagaaagcaaaacaagggaatactatgaaaagcagtttccagaaattcgaaaacaaagagaacagcaagaaagatttcagcgagttgggcagaggggagctggtctttcagccaccattgctaggagtgagcatgagatttctgaaattattgatgggctctctgagcaggagaataatgagaaacaaatgcggcagctctctgtgattccacctatgatgtttgatgcagaacaaagacgagtcaagttcattaacatgaatgggcttatggaggaccctatgaaagtgtataaagataggcagtttatgaatgtttggactgaccatgaaaaggagatctttaaggacaagtttatccagcatccaaaaaactttggactaattgcatcatacttggagaggaagagtgttcctgattgtgttttgtattactatttaaccaagaaaaatgagaattataaagccctcgtcagaaggaattatgggaaacgcagaggcagaaaccagcaaattgctcgaccctcgcaagaagaaaaagtagaagaaaaagaagaggataaagcagaaaaaacagaaaaaaaagaagaagaaaagaaagatgaagaggaaaaagatgaaaaagaagactccaaagaaaataccaaggaaaaggacaagatagatggtacagcagaagaaactgaggaaagagagcaagccacaccccgggggcgaaagactgccaacagtcagggccgccgtaagggccggatcaccaggtccatgacaaacgaagctgcagctgccagtgctgcagccgcagcggctactgaagagcccccaccacctctgccaccgccaccagaacccatttctacagagcctgtggagacctctcgatggacagaagaagaaatggaagttgctaaaaaaggtctagtagaacatggtcgtaactgggcagcaattgctaaaatggtgggaacgaaaagtgaagctcaatgtaaaaacttctattttaactataaaaggcgacacaatcttgacaacctcttacagcagcataaacagaaaacttcacgaaaacctcgtgaagagcgagatgtgtctcaatgtgaaagtgtcgcttccactgtttctgctcaggaggatgaagatattgaagcctccaatgaagaagaaaatccagaagacagcgaagttgaagctgtcaagcccagcgaggacagtcctgaaaatgctacttctcgaggaaacacagaacctgcggttgagcttgagcccaccacggaaactgcacccagtacatctccctccttagcagttccaagtacaaaaccagctgaagatgaaagtgtggagacccaggtgaatgacagcatcagtgctgagacagcagagcagatggatgtagatcagcaggagcacagtgctgaagagggttctgtttgtgatcccccacccgctaccaaagctgactctgtggacgttgaagtgagggtgccagaaaaccatgcatctaaagttgaaggtgataataccaaagaaagagacttggatagagccagtgagaaggtggaacctagagatgaagatttggtggtagctcagcaaataaatgcccaaaggcccgagccccagtcagacaatgattccagtgccacgtgcagcgctgatgaggatgtggatggagagccagagaggcagagaatgtttcctatggactcaaagccttcactgttaaaccccactggatctatactcgtctcatctccgttaaaaccaaatccactggatctgccacagcttcagcatcgagctgctgttatcccaccaatggtatcctgcaccccatgtaacataccaattggaaccccagtgagcggctatgctctctaccagcgacacattaaagcaatgcatgagtcagcactcctggaggagcagcggcagagacaagaacagatagatttggaatgtagaagttctacaagtccatgtggcacatccaagagtccaaacagagagtgggaagtccttcagcctgctccacatcaagtgataactaatctccctgaaggcgttcggcttccgacaactcgaccaaccaggccaccgccccctctcatcccgtcatccaaaaccacagtggcttcagaaaaaccatcttttataatgggaggctccatctcacagggaacaccaggcacttatttgacttctcataatcaggcttcctacactcaagaaacacccaagccgtcagtgggatctatctctcttggactgccacggcaacaggaatctgccaaatcagctactttgccctacatcaagcaggaagaattttctccccgaagccaaaactcacaacctgagggtctgttggtcagggcccaacatgaaggtgtagtcagaggtaccgcaggagccatacaagaaggaagtataactcggggaactccaaccagcaaaatttcagtggagagcattccatccctacggggctctatcactcagggcaccccggctctgccccagactggcataccaacagaggctttggtgaaggggtccatttcgagaatgcccattgaagacagcagtcctgagaaaggcagagaggaagctgcatccaaaggccatgttatttatgaaggcaaaagtggacatatcttgtcatatgataatattaagaatgcccgagaagggactaggagtccaagaacagctcatgaaatcagtttaaagagaagctatgaatcagtggaaggaaatataaagcaagggatgtcaatgagggagtctcctgtatcagcaccgttagaggggctgatatgccgagcattacccagggggagtcctcattctgacctcaaagaaaggactgtattgtctggctccataatgcaggggacaccaagagcaacaactgaaagctttgaagatggccttaaatatcccaaacaaattaaaagggaaagtcctcccatacgagcatttgaaggtgccattaccaaaggaaaaccatatgatggcatcaccaccatcaaagaaatggggcgttccattcatgagattccaaggcaagatattttaactcaggaaagtcggaaaactccagaagtggtccagagcacacggccgataattgagggttccatttcccagggcacaccaataaagtttgacaacaactcaggtcaatctgccatcaaacacaatgtcaaatccttaatcacggggcctagcaaactatcccgtggaatgcctccgctggaaattgtgccagagaacataaaagtggtagaacggggaaaatatgaggatgtgaaagcaggcgagaccgtgcgttcccggcacacgtcagtggtaagctctggcccctccgttcttaggtccacactgcatgaagctcccaaagcacaactgagccctgggatttatgatgacaccagtgcacggaggacccctgtgagttatcaaaacaccatgtccagaggctcacccatgatgaacagaacttctgatgttacaatttcttctaacaagtctaccaatcatgaaaggaaatcgacactgacccctacccagagggaaagtatcccagcgaagtctccagtgcctggggtggaccctgtcgtgagccacagtccgtttgatccccatcacagaggcagcactgcaggcgaggtttatcggagccacctgcccacgcacttggatccagccatgccttttcacagggctttggatcctgcagcggctgcttacctgtttcagagacagctttcaccaactccaggttacccaagtcagtatcagctttacgcaatggagaacacaagacagacaatcttaaatgattacattacctcacaacagatgcaagtgaacttgcgtccagatgtggccagaggactctccccaagagagcagccactgggtctcccatacccagcaacgagaggaatcattgacctgaccaatatgcctccaacaattttagtgcctcatccagggggaacaagcactcctcccatggacagaatcacttatattcctggtacacagattactttccctcccaggccgtacaactctgcttccatgtctccaggacacccaacacaccttgcagctgctgcaagtgctgagagggaacgggaacgggagcgggagaaggagcgggagcgggaacggattgctgcagcttcctccgacctctacctgcggccaggctcagaacagcctggccgacctggcagtcatggatatgttcgctccccttccccttcagtaagaactcaggagaccatgttgcaacagagacccagtgttttccaaggaaccaatggaaccagtgtaatcacacctttggatccaactgctcagctacgaatcatgccactgcctgctgggggcccttcaataagccaaggcctgccagcctcccgttacaacactgctgcggatgccctggctgctcttgtggatgctgcagcttctgcaccccagatggatgtgtccaaaacaaaagagagtaagcatgaagctgccaggttagaagaaaatttgagaagcaggtcagcagcagttagtgaacagcagcagctagagcagaaaaccctggaggtggagaagagatctgttcagtgtttatacacttcttcagcctttccaagtggcaagccccagcctcattcttcagtagtttattctgaggctgggaaagataaagggcctcctccaaaatccagatatgaggaagagctaaggaccagagggaagactaccattactgcagctaacttcatagacgtgatcatcacccggcaaattgcctcggacaaggatgcgagggaacgtggctctcaaagttcagactcttctagtagcttatcttctcacaggtatgaaacacctagcgatgctattgaggtgataagtcctgccagctcacctgcgccaccccaggagaaactgcagacctatcagccagaggttgttaaggcaaatcaagcggaaaatgatcctaccagacaatatgaaggaccattacatcactatcgaccacagcaggaatcaccatctccccaacaacagctgcccccttcttcacaggcagagggaatggggcaagtgcccaggacccatcggctgatcacacttgctgatcacatctgtcaaattatcacacaagattttgctagaaatcaagtttcctcgcagactccccagcagcctcctacttctacattccagaactcaccttctgctttggtatctacacctgtgaggactaaaacatcaaaccgttacagcccagaatcccaggctcagtctgtccatcatcaaagaccaggttcaagggtctctccagaaaatcttgtggacaaatccaggggaagtaggcctggaaaatccccagagaggagtcacgtctcttcggagccctacgagcccatctccccaccccaggttccggttgtgcatgagaaacaggacagcttgctgctcttgtctcagaggggcgcagagcctgcagagcagaggaatgatgcccgctcaccagggagtataagctacttgccttcattcttcaccaagcttgaaaatacatcacccatggttaaatcaaagaagcaggagatttttcgtaagttgaactcctctggtggaggtgactctgatatggcagctgctcagccaggaactgagatctttaatctgccagcagttactacgtcaggctcagttagctctagaggccattcttttgctgatcctgccagtaatcttgggctggaagacattatcaggaaggctctcatgggaagctttgatgacaaagttgaggatcatggagttgtcatgtcccagcctatgggagtagtgcctggtactgccaacacctcagttgtgaccagtggtgagacacgaagagaggaaggggacccatcacctcattcaggaggagtttgcaaaccaaagctgatcagcaagtcaaacagcaggaaatctaagtctcctatacctgggcaaggctacttaggaacggaacggccctcttcagtctcctctgtacattcagaaggggattaccataggcagacgccagggtgggcctgggaagacaggccctcttcaacaggctcaactcagtttccttataaccctctgactatgcggatgctcagcagtactccaccaacaccgattgcatgtgctccctctgcggtgaaccaagcagctcctcaccaacagaacaggatctgggagcgagagcctgccccactgctctcagcacagtacgagaccctgtcggatagtgatgactgaactgcacaaagtgaggggaacagggtgcaggagagggatctctagtttttgtggtttaatttttagtagcaggtcaaaaacctgccctcctgtgacttattccctgagacttttcaggagagccagcccacagatgatgaagaaatgatggaagttcatttggagagtcaaatgggaaaaaaacaaacaaaaaactgcctttgatacaggcaattcagtggactataataatagtggagggttgagatgtagagtttttaaaaagtgaacagttgctgttcttacatctgtaaagaaaaccataatgtctttaaatcactcttctgtaaatagatgacctttttgcagtgt

SEQ ID NO: 3684 - DNA, 1618 bp, Homo sapiens
  source 1..1618: mol_type = genomic DNA
gaataagcccgagcagccggtcctccagtggctccgctccccgttctctgtgggctcaaaatgacagaggctcacaggacacctgcatgcccaaggcactccaccgtatgtgatcaacctggatccagcagtacatgaagttccctttcctgccaatattggtgatgaaatttattgagaaggcccagaacatgtccaaatatgtgttgattgacacacctggacagattgaggtattcacctggtcagcttctgggacaattatcactgaagcccttgcatcctcatttccaacagttgtcatctatgtaatggacacatcgagaagtaccaacccagtgaccttcatgtccaacatgctctatgcctgcagcatcttatacaaaaccaagctgcctttcattgtggtcatgaataaaactgacatcattgaccacagctttgcagtggaatggatgcaggattttgaggctttccaagatgccttgaatcaagagactacatacgtcagtaacctgactcgttcaatgagcctggtgttagatgagttttacagctcactcagggtggtgggtgtctctgctgttctgggtactggattagatgaactctttgtgcaagttaccagtgctgccgaagaatatgaaagggagtatcgtcctgaatatgaacgtctgaaaaaatcactggccaacgcagagagccaacagcagagagaacaactggaacgccttcgaaaagatatgggttctgtagccttggatgcagggactgccaaagacagcttatctcctgtgctgcacccttctgatttgatcctgactcgaggaaccttggatgaagaggatgaggaagcagacagcgatactgatgacattgaccacagagttacagaggaaagccatgaagagccagcattccagaattttatgcaagaatcgatggcacaatactggaagagaaacaataaataggagactttagcacacttcacttgtttctagaagtccagaattttggacctccacgtgaaagaactgttcttacctctgaactgggggctcccataagggataattttcctcagagtagcaaagtttctcttattagagaaatcttgtgactcagatgaagtcagggatagaagacccttggacctggcaggttaatgctgattattccttggcctttcccttgtatttatgcaaggaaggatatactgagctgatactcttccaagcctacaacttcaagttttatcatttgaactcaagtacttttgctgctgaggaatggaatcaaaagaacgtagtctcctggtgaccacctcagatctctattattaggctagatgtatagcctctactcccccagcttcttgctcttgaccctgcactgtaagttgcccttctattagcagccaaggaaaagggaaacatgagcttatccagaacggtggcagagtctccttggcaatcaaccaacgttgctatgaaatatgcctcacactgtatagctcattataggacgtcaggtttgttgaaaaaagtgggcaagacatgattaatgaatcagaatcctgtttcattggtgacttggataaagactttttaatttt

SEQ ID NO: 3685 - DNA, 1677 bp, Homo sapiens
  source 1..1677: mol_type = genomic DNA
gtagtcataaaggtctctttgccaagttactgccctctcaagctgcttccagtgaatgctacacacctgcaccatggtttgtccgacatccttagccaagatcaggattggctatgttggtacttacatatcctcatgagaattgtggttctggtactagtttggtaaagaaattattaaacctagctgatgcttgaaggtagttggattaacaggaaagaaaagagacttcttttctagccaagatgaaagatacacaagacattcaggaagcttcgaaggcaatgcagaataaagtccatgagcaggaagataagaatgagaaacaaaaacaaagagaagacaaacttggagtatattctttagtacatttttccccaaagatgttgggttcagttgccacaacactgccattgtcatcttcaaattccagtggaatgcctcttggttactatctgtctagtcctcagattagtagagtaactatatcaacaactggacaattgacttctaaagctactgtaggtagctgttccagagtggaaaacagcttggatgccagccccttctcagttccgaagaaacaggatgaatcacccatgattggggatggagaagattatttcctttctttgtttggtgattcaaagaaacttacagcacactcaaactacactcagaaaactttaaaatacttttctatgattcttgaagaagttggccaatttacctccagttctcttggagatgttgaaatagctgaagtgaatgtcaagggtttgttcgtgaagctcattaactcttcccttgacaaagaaatggcaattggagatcatattctccagcaaaatgtgaatggacaaaccatttctttgtaccgattccttccaaacatcgtaatgcaggcaaattccacagtaacagtgtgggcagcagcatctgaagcaaagcatcaacctccatcagattttctttggaaggaacaagacaagtttagagcaagtcctgattgtataacaatcctgtgcaaaccgaacggtcaagccattgcgtggtacacccctatccactggaagcaagcgtgggaaaaattagatgctgacgttgaatttaacagatgttcagtagtatctccaacattccgaaagcgtgtgtttcagtggacagcatctacagctacaataactaaagaaaaacaagatcaacctaagaaagatatctcaaattatcaggtggaacaagctcaagttcttcttaagagagagaaggaaatcccaccaaccgttttccctaatcgcagcccttggtgccagaatccctatgtctctgcacatccttactgtcctctgattgaaccacacaatacatccaccgctggaggcagattggatagacagcccaggactcggtcaaccagacctaatcgagcctcagggtctaagaaaaagaagacatctgagtcacaaaagcaataagcagtcaactcaacctttaaagtaatctagtccaccctcaaccagctactagaaaagcaaaagagaactcaaatccctgaggcctgctctgcaacctccctgctattccatgagagggtgaagacatcacatttctatatggaaaaaggatccaaaatttgtattgctgtagaattggtgaattatagatgcttgatgaaat

SEQ ID NO: 3686 - DNA, 3097 bp, Homo sapiens
  source 1..3097: mol_type = genomic DNA
cagttcgatcaaggttgacgatgtgtcacactgtgtaagggaatcgcatggagatgggcattccgaactgttaatggggacatgggactccagttgtctctgatcacttgtgtggattttcctggcgtagaacgacagaagccgctagtaagtcgccaagacctacagcaggaattctgcaccaaagggcataaaatcttgttattttaatttgcatctgggagaatgtctgagcaaggagacctgaatcaggcaatagcagaggaaggagggactgagcaggagacggccactccagagaacggcattgttaaatcagaaagtctggatgaagaggagaaactggaactgcagaggcggctggaggctcagaatcaagaaagaagaaaatccaagtcaggagcaggaaaaggtaaactgactcgcagccttgctgtctgtgaggaatcttctgccagaccaggaggtgaaagtcttcaggatcaggaatcaattcatttacagctttccagtttttccagcctgcaagaggaggataaatctaggaaagatgactctgaaagagaaaaagaaaaggataaaaacaaagataaaacctctgaaaaacccaagatcagaatgttatcaaaagattgcagccaagaatacacggattctacaggcatagacttacacgagtttctgattaacacattaaagaataattccagggacaggatgatacttttgaaaatggagcaggaaattattgatttcattgctgacaacaataatcattataaaaagttccctcagatgtcatcgtatcagaggatgcttgtccatcgagtggcagcttattttggattggatcacaatgtggatcaaacaggaaaatctgttatcatcaacaagaccagcagcaccagaataccagagcaaaggttttgtgaacatttaaaagatgaaaaaggtgaagaatcccagaagcggtttatcttgaagcgagataactctagtattgataaagaagacaatcagtcagtttgctcccaggaaagcctttttgtggaaaacagtaggctcttggaagacagtaacatatgcaatgagacctataagaaaagacagctctttcggggcaacagagatggctcagggagaacatctgggagtcgacagagcagctcagaaaatgaactcaagtggtctgaccaccaaagggcctggagcagcacagactccgacagttccaaccgcaatctaaagcccgccatgaccaagacggcgagttttgggggcatcacggtgctgaccaggggtgacagcacttccagtactaggagtaccgggaagctgtccaaagcaggttccgagtcttccagcagtgcaggctcctcaggatcgctgtcccgcacccatccacctctccagagcacacccctagtctcaggtgtggcagctggctctccaggctgtgtgccttatccagagaatggaatagggggccaggttgctcccagcagcaccagctacatcctccttccacttgaagctgcaacaggcatcccgcctggaagcatccttcttaatccacacacaggccagccctttgtgaatcccgatggaactcctgcaatatacaacccacccaccagtcagcagcccctgcgaagcgccatggtggggcagtcccaacagcagccaccacagcagcagccctccccgcagccccaacagcaggtccagccaccgcagccacagatggcaggccctctggtcactcagtctgtccaggggctgcaggcttcctcccagtcagtgcaatatccagcagtctcttttcctccccagcacctcctacctgtgtctccaacgcagcactttcccatgagagatgatgtggcaacacagtttggccagatgaccctgagccggcagtcctcgggggagactcctgaacccccatcaggtcctgtctacccatcctcccttatgccacagccggcccagcagcccagctatgtaatcgcctctacaggccagcagcttcctacaggaggattctcaggctctggccctcccatctcccagcaggtcctccagccccctccctcaccacagggatttgtgcaacagcctccgcctgcacagatgcctgtatattattacccatctggtcagtaccctacctcaaccacgcaacagtaccggcccatggccccggttcagtacaacgctcagaggagtcaacagatgccacaggcagcacagcaagcaggttaccagccagtcttgtctggtcaacagggattccaaggcctaataggagtgcagcagccacctcagagtcagaacgtgataaataaccaacaaggaactccggtgcaaagcgtgatggtttcctacccaacaatgtcttcttatcaggtgccaatgacccagggttctcaaggactgccccagcagtcataccaacagccaatcatgctacctaaccaggcaggtcaagggtcactcccagccactggaatgcctgtttactgtaatgtcacaccgcccacccctcagaacaaccttaggctgattggcccacactgcccctccagcactgtcccagtgatgtcagctagctgcagaacaaactgtgcaagtatgagcaatgctggttggcaggtcaaattctgagagctctggctgtggtacatttcttcagatatttctcatggcctttgatggaagaggaacaaggtgggaaaactggctgaggacttaagtattcactcaacactcaaatgattgctgctggtattctgtaaaaaataaacaaagactaatatacacgttagctggttaatggtgcatatttctgtcatgtctgctaggtatgcctttatagcttagctagtgacatgaattcatcaaggtaagattttctcctaccactgaataccactgtgtagattataatatccctaatttggattagttttgtactttgtgttgagtttgtgatgctaaaagtatttaaaaattatatactaaatcacattgtaccaaagctgtaatggaaaagcaaagaagaattgatgaattgaaggaataatttatatacatt

SEQ ID NO: 3687 - DNA, 4829 bp, Homo sapiens
  source 1..4829: mol_type = genomic DNA
gtcacttccggtcgacggcggaaggcggaaggcggagcggtccctgcaacccggccggcgggaactgccttctagtttttagtctcagaccagaccaccgggcgcaccccgatgccgagcccgcagcttctggtgctcttcggcagccagacaggcacggctcaggatgtgtcggagagactgggtcgcgaggcccggcgccggcggcttggctgccgggtgcaggccctggactcctacccggtggtgaatctgattaacgagcccctggtgatatttgtttgtgcaactacaggccaaggagacccccctgacaacatgaagaacttctggaggtttatattccggaagaacctgccctccactgccctctgtcagatggactttgccgtcctgggcctcggggactcctcatacgccaagttcaacttcgtggccaagaagctgcaccgacggctactgcagcttgggggcagcgccctcctgcccgtgtgcctgggcgatgaccagcatgagctggggcccgacgctgctgtggacccctggctgcgagacttgtgggacagggttctggggctgtacccgccgcctccgggcctcactgagatccctcccggagtccccctgccctccaagttcaccctgctgttcctccaagaggcacccagcacgggctctgaggggcagcgggtagctcaccccggctctcaggagcccccgtcagagtcgaagcccttcctagcacccatgatctccaaccagagagtcaccggcccctcccacttccaggacgttcggctgattgagtttgacatcttgggctctggcatcagctttgctgctggtgatgtggtgctgattcagccctccaactcggctgcccatgtccagcggttctgccaggtgctgggcctggaccctgaccagctcttcatgctgcagccgcgggagccagatgtctcctcccccacgaggctgccccagccctgctccatgcggcacctcgtgtcccactacctggacatcgccagcgtgcctcgccgctccttcttcgaactcctggcctgtctatccctccatgagctggagcgggagaagctgctggagttcagttctgcccaaggccaggaggagctctttgaatactgcaaccggccccgcaggaccatcctggaggtgctctgtgacttcccgcacacagctgccgccatccctcccgactacctgttggacctcatccccgttatccggccgagggccttctccatcgcctcctcgctgctgatcctcgtggctgtagtgcagttccagactcgcctcaaggagccccgccggggcctctgctcctcctggctggcatccctggaccctgggcaaggacctgtccgggtgcccctctgggtgcggcctgggagtctggccttcccagagacaccagacacacctgtgatcatggtggggcctggcactggggtagcccccttccgagcagccatccaggagcgtgtggcccagggccagactggaaacttcttgttttttggctgccgctggcgggaccaagacttctactgggaggctgagtggcaggagctggagaagcgggactgtctgaccctcatccctgccttctcccgggaacaggagcagaaagtatatgtgcagcaccggctccgggagctggggtcgcttgtgtgggaactgctggaccgccagggtgcatacttctacctggcaggcaacgccaagtccatgccagcggacgtctcggaagccctgatgtccatcttccaggaggagggtggactctgcagcccggacgcagccgcgtatctagccaggctccagcagacacggcgcttccagacagagacgtgggcctgaggcccgcggctgcccgtgccccctctgacagccatcctcctgggagcccaggaaggcatccacgagggagctcctggccagcagccgtcatcctctcggaccagccagctggtcctctgggaacagccagctcccgagcacagccgcactcctgttgaccctggatcccaccctttgagcctgaccccactgcagcctctgcccagccagccctgcgctcccccaccctgacagtgagctgtgtcctcgtccccccacccccttcccagtcaaggtggtggcctgggccgctccacctcaccggtgcagtgacccaggacggcatcagcagcccagtgagcaccaggggtggcatagggcacccatgaggctgcgctgcactcctctgccctggggccacctcggctgctgcagcctgcccagcagcacattccagtcactgcccccgcactcccacagggctcaggctgggctcagaggccactgagatgccagctccttgagagcagtgggggtgtcccaggccagagcagcctcttcctctcctggtcccagaaaaacccttgcagtaaatggtggcctctgggtggttacttctagcgcaggcttccttccttcctctagctcctcccggtgccctgggtgctgggtgctggatggatgggcgtcctctagctcctcccggtgccctgggtgctgggtgctggatgggtgggcgtcctctagctcctcccggtgccctgggtgctgggtgctggatgggtgggcgccacggtgcacccttgttgggctgcctgtgcccgagtggcctctgcagctcttatgtctgcctctaatgggatgtgcgccctgactgcctcgttcttaagggcatagtgggtcggctaagatctgatcgccaggactgcgttctgggcaggtgctgggaaggcggaaccaagccgtccgtgccgctagggagccgagactgccggaaagaggagcggcaggagggggcgtggttgtgcagccccacccccgggaggggctttaggcactgggaaggaaagtcctgttggaggagttcggtggctgttcacacccgcctcgctgtcttggagtcttgatctgtcgtcggcgggtcgctggcacaggactaaacatggctgaggctgggctccagccagatctggctggggacagcaccgcgtgggcccaggatccacccagagcaggcaggccttgctggggccccagtcaagtccacttccagtgaggagagccagccgggaggtcagtgccagagctctggtggagcccagaccctgccttccctgagggccgcccctgtcgccgccctggggtccctgtcctcctatcctgactcctgccccagggccaccacccctgaactgtgccctggggcccccaccctccacctggccgactccagctctgggcctgtcagtccacctgggtcctctctgggccctgagtgcctggaccctctgtgccaagcaccagcaagcaaaggggatgaccttgggcacccccaaggtgctgagactacagccagtgagcccctgctgggggccaaagccatggagggtgcctgggcccttccaacctggaaggaggaggggagagagcaggcagcagggcagggggaagaggaggagtgcccgatctgcacagagccctacgggcccagagagcgccgcctggccctgctgaactgtagccacggcctgtgtgtgggctgcctgcacaggctgctgggctcggcctccagtgccgacctgggccgggtgcgctgcccgctgtgccgccagaagacgcccgtgctggaatgggagatctgccggctacaggaggagctgctacaggccgacgggccctcacgccagccccgccgagaggcccctgcatcctatcaccgcaaccctgggccctggggctccctggagcaccgctaccagctgcgcttcctggcagggcccgtgggcggccggggctgcctgcccttcctgccctgtccaccctgcctgggtgcccggctctggaccctgcgggagcggggaccctgtgcccgccgcctggcgctgctgagcctgctggcccttgagcttctggggctgctgctggtcttcacgccgctcctgctgctgggactgctcttcgtgctcctggaccgctctggccgctgagcagagcccaggacagccccgccgccaacaggccagggggcccagactggcccacgtccccatgcctgggtgctgtgaggcctgatgaccaggctggaaaaacccaaggttgggtccagggcaggggccttcaatcaagacctcccattgctgaacccacaaccagggctacccagaggcctgaccctgccagagtccatggctgcactgctgcccagacactagctgaacccaaggacaccagcgcccaaggacagctcctggaggaggccagcccagcaggaaagtctgtgagcaggaccccattcaccctgcggcagacgggcaccgtactggccacgggctgacgccggccacacttcccctccgagggccagctgagcacagcaggcatgaaagcaaacagagatacagcagtgagtcagttccttggagagggcagggactccgcccaccctgtgttcagataagggccagtgtgtgtccctgaaggtcaggccagccgggggaggggtccatgctgcgaaaattcagcctgcaaaggctcctctccccacttgatcaggcccagaccaggtgggggttggcgctggcctgtgttgcaggggacaagggcccacccaggccttggaacataagctctgcccctgcacaccctcatgtcaccacacctgggatggagacatcaggtggcccagcgagagatggaggactgatcctggaacgtgaagcagctttcaataaaccagctcctgggga

SEQ ID NO: 3688 - DNA, 3066 bp, Homo sapiens
  source 1..3066: mol_type = genomic DNA
gatgctgtttggcgactcgtcgccattcccggagcaggtcggcctcggcccaggggcgagtatccgttgctgtgtcggagacactagtccccgacaccgagacagccagccctctcccctgcctcgcggcgggagagcgtgtccggccggccggccggcggggctcgcgcaacctccctcgcctccccttcccccgcagcctccgtcgccgctgccgccgggcttaacagccccgtccgccgcttctcttcctagtttgagaagccaaggaaggaaacagggaaaaatgtcgccatgaaggccgagaaccgctgccgccgccgacccccgccggccctgaacgccatgagcctgggtccccgccgcgcccgctccgctccgactgccgtcgccgccgaggcccccgttgatgccgctgagctcccccaacgccgccgccaccgcctccgacatggacaagaacagcggctccaacagctcctccgcctcttcgggcagcagcaaagggcaacagccgccccgctccgcctcggcggggccagccggcgagtctaaacccaagagcgatggaaagaactccagtggatccaagcgttataatcgcaaacgtgaactttcctaccccaaaaatgaaagttttaacaaccagtcccgtcgctccagttcacagaaaagcaagacttttaacaagatgcctcctcaaaggggcggcggcagcagcaaactctttagctcttcttttaatggtggaagacgagatgaggtagcagaggctcaacgggcagagtttagccctgcccagttctctggtcctaagaagatcaacctgaaccacttgttgaatttcacttttgaaccccgtggccagacgggtcactttgaaggcagtggacatggtagctggggaaagaggaacaagtggggacataagccttttaacaaggaactctttttacaggccaactgccaatttgtggtgtctgaagaccaagactacacagctcattttgctgatcctgatacattagttaactgggactttgtggaacaagtgcgcatttgtagccatgaagtgccatcttgcccaatatgcctctatccacctactgcagccaagataacccgttgtggacacatcttctgctgggcatgcatcctgcactatctttcactgagtgagaagacgtggagtaaatgtcccatctgttacagttctgtgcataagaaggatctcaagagtgttgttgccacagagtcacatcagtatgttgttggtgataccattacgatgcagctgatgaagagggagaaaggggtgttggtggctttgcccaaatccaaatggatgaatgtagaccatcccattcatctaggagatgaacagcacagccagtactccaagttgctgctggcctctaaggagcaggtgctgcaccgggtagttctggaggagaaagtagcactagagcagcagctggcagaggagaagcacactcccgagtcctgctttattgaggcagctatccaggagctcaagactcgggaagaggctctgtcgggattggccggaagcagaagggaggtcactggtgttgtggctgctctggaacaactggtgctgatggctcccttggcgaaggagtctgtttttcaacccaggaagggtgtgctggagtatctgtctgccttcgatgaagaaaccacggaagtttgttctctggacactccttctagacctcttgctctccctctggtagaagaggaggaagcagtgtctgaaccagagcctgaggggttgccagaggcctgtgatgacttggagttagcagatgacaatcttaaagaggggaccatttgcactgagtccagccagcaggaacccatcaccaagtcaggcttcacacgcctcagcagctctccttgttactacttttaccaagcggaagatggacagcatatgttcctgcaccctgtgaatgtgcgctgcctcgtgcgggagtacggcagcctggagaggagccccgagaagatctcagcaactgtggtggagattgctggctactccatgtctgaggatgttcgacagcgtcacagatatctctctcacttgccactcacctgtgagttcagcatctgtgaactggctttgcaacctcctgtggtctctaaggaaaccctagagatgttctcagatgacattgagaagaggaaacgtcagcgccaaaagaaggctcgggaggaacgccgccgagagcgcaggattgagatagaggagaacaagaaacagggcaagtacccagaagtccacattcccctcgagaatctacagcagtttcctgccttcaattcttatacctgctcctctgattctgctttgggtcccaccagcaccgagggccatggggccctctccatttctcctctcagcagaagtccaggttcccatgcagactttctgctgacccctctgtcacccactgccagtcagggcagtccctcattctgcgttgggagtctggaagaagactctcccttcccttcctttgcccagatgctgagggttggaaaagcaaaagcagatgtgtggcccaaaactgctccaaagaaagatgagaacagcttagttcctcctgcccctgtggacagcgacggggagagtgataattcagaccgtgttcctgtgcccagttttcaaaattccttcagccaagctattgaagcagccttcatgaaactggacacaccagctacttcagatcccctctctgaagagaaaggaggaaagaaaagaaaaaaacagaaacagaagctcctgttcagcacctcagtcgtccacaccaagtgacactactggcccaggctaccttctccatctggtttttgtttttgtttttttttcccccatgcttttgtttggctgctgtaatttttaagtatttgagtttgaacagattagctctggggggagggggtttccacaatgtgagggggaaccaagaaaattttaaatacagtgtattttccagcttcctgtctttacaccaaaataaagtattgacacaagag

SEQ ID NO: 3689 - DNA, 2571 bp, Homo sapiens
  source 1..2571: mol_type = genomic DNA
accgcaggcgggcctcgcgggtccgggagcgcggcggagacgatgcctgagatcagagtcacgcccttgggtgcctgccctgtgctgtcctggaacctggtccttccaccgggcagggggtcgagggcaccttccagcacagacaccaggacgggattccatgtcctcccccatggcgtgagcgcttcctcggagggtgccccccgccccggtgtggacactgtgctgtgaacacccctggcctgtgcacaccccatggcattttgcagctgtttgcatgggccccactgccctcccctgctctctgggtcctccgtggggtcctcccagcctgcccctttcccatttggcctcttggctgcctgttctgcccactctctggacatctgatctttctgatctttcatgtggcttcaattacccgcaatctgtacctgggtatattctcaaggtcacctcagccaaggcagcccctcggctgtggccccgtcatcctgatgtgtggtgctggctttggacacttcgagtggctggcagggggaggggccggccaggacgtgggccgaagctgcatcctggtctccattgcgggcaagaatgtcatgctggactgtggaatgcacatgggcttcaatgacgaccgacgcttccctgacttctcctacatcacccagaacggccgcctaacagacttcctggactgtgtgatcattagccacttccacctggaccactgcggggcactcccctacttcagcgagatggtgggctacgacgggcccatctacatgactcaccccacccaggccatctgccccatcttgctggaggactaccgcaagatcgccgtagacaagaagggcgaggccaacttcttcacctcccagatgatcaaagactgcatgaagaaggtggtggctgtccacctccaccagacggtccaggtagatgatgagctggagatcaaggcctactatgcaggccacgtgctgggggcagccatgttccagattaaagtgggctcagagtctgtggtctacacgggtgattataacatgaccccagaccgacacttaggagctgcctggattgacaagtgccgccccaacctgctcatcacagagtccacgtacgccacgaccatccgtgactccaagcgctgccgggagcgagacttcctgaagaaagtccacgagaccgtggagcgtggtgggaaggtgctgatacctgtgttcgcgctgggccgcgcccaggagctctgcatcctcctggagaccttctgggagcgcatgaacctgaaggtgcccatctacttctccacggggctgaccgagaaggccaaccactactacaagctgttcatcccctggaccaaccagaagatccgcaagactttcgtgcagaggaacatgtttgagttcaagcacatcaaggccttcgaccgggcttttgctgacaacccaggaccgatggttgtgtttgccacgccaggaatgctgcacgctgggcagtccctgcagatcttccggaaatgggccggaaacgaaaagaacatggtcatcatgcccggctactgcgtgcagggcaccgtcggccacaagatcctcagcgggcagcggaagctcgagatggaggggcggcaggtgctggaggtcaagatgcaggtggagtacatgtcattcagcgcacacgcggacgccaagggcatcatgcagctggtgggccaggcagagccggagagcgtgctgctggtgcatggcgaggccaagaagatggagttcctgaagcagaagatcgagcaggagctccgggtcaactgctacatgccggccaatggcgagacggtgacgctgcccacaagccccagcatccccgtaggcatctcgctggggctgctgaagcgggagatggcgcaggggctgctccctgaggccaagaagcctcggctcctgcacggcaccctgatcatgaaggacagcaacttccggctggtgtcctcagagcaagccctcaaagagctgggtctggctgagcaccagctgcgcttcacctgccgcgtgcacctgcatgacacacgcaaggagcaggagacggcattgcgcgtctacagccacctcaagagcgtcctgaaggaccactgtgtgcagcacctcccagacggctctgtgactgtggagtccgtcctcctccaggccgccgccccttctgaggacccaggcaccaaggtgctgctggtctcctggacctaccaggacgaggagctggggagcttcctcacatctctgctgaagaagggcctcccccaggcccccagctgaggccggcaactcacccagccgccacctctgccctctcccagctggacagaccctgggcctgcacttcaggactgtgggtgccctgggtgaacagaccctgcaggtcccatccctggggacagaggccttgtgtcacctgcctgcccaggcagctgtttgcagctgaagaaacaaactggtctccaggctgtcttgcctttattcctggttagggcaggtggtcctagacagcagtttccagtaaaagctgaac

SEQ ID NO: 3690 - DNA, 1251 bp, Homo sapiens
  source 1..1251: mol_type = genomic DNA
ggcaagagcggcagccacaccggcagattgcagaccgggcaaggtcccccaggccaggatgtcaggcctggtgttggggcagcgggatgagcctgcaggccaccggctcagccaagaggagatcctggggagcacacggctggtcagccaagggctagaggccctacgcagtgaacaccaggccgtgctgcaaagcctgtcccagaccattgagtgtctgcagcagggaggccatgaggaagggctggtgcatgagaaggcccggcagcttcgccgttctatggaaaacattgagctcgggctgagtgaggcccaggtgatgctggctctagccagccacctgagcacagtggagtcggagaaacagaagctgcgggctcaggtgcggcggctatgccaggagaaccagtggctgcgggatgagctggctggcacccagcagcggctacagcgcagtgaacaggctgtggctcagctggaggaggaaaagaagcacctggagttcctggggcagctgcggcagtatgatgaggatggacatacctcggaggagaaagaaggcgatgccaccaaggattccctggatgacctctttcctaatgaggaggaagaggaccccagcaatggcttgtcccgtggtcaaggtgctacagcagctcagcagggtggatatgagatcccagcaaggttgcggacgttgcacaacctggtgatccagtacgcagcccaaggtcgctatgaggtggccgtgccactctgtaagcaggcactagaggacctggagcgcacatcaggccgtggccaccctgatgtcgccaccatgctcaacatccttgctttggtgtatcgtgaccagaataagtataaggaagctgcccacctgctgaatgatgcccttagcatccgggagagcaccttgggacctgaccatcctgctgtcagtattccttgccctccccaccccacgccccgcaccccccaccattgctgttttggcctctcttagctcatccatctgctgccctcagtccactcactaagggtgctgaggaaggaggcataagaagtcctttcttccaggcactgtccagtgatcctaatgattctcaattctctgagactcagtgactcctttttataacaaatattttgcttgaatttaattaatagataagtcataggtaaatccacatatgatttctacaaaacttaatatgctactctaataaatataaaagaaaaacaagaaaa

SEQ ID NO: 3691 - DNA, 4210 bp, Homo sapiens
  source 1..4210: mol_type = genomic DNA
ggtttcaaattggccctttggcctctggagcaaattcaaatgtaactcttccccaaccccccttctcttcttccagattaattaaaagaagaatgaactataatccttgaagataactgggcaattttttaagtcggaggctgttcttactggtgtgaggatttacacacgtcttcagtttttcagcacagaccagcagaccatcatttttagaggaaatactccctctgccctcctttttggtttccttggtggtaaagattaaatttggttgcatcattttgacttgtgtttgagtctagattttatggcacaaggaatggcataaacttttcatgtgttttggttaaaacaaaccagaccattgcattgaccctggacatctttaattgagaaattggtaactttattttaatatgtatatctgaagaattcaagaaaacaaaggcatcctcagaggtgtgcctcttttctttattattagaggcaaaacgaacaattttataggatttgtagtgaaattataccagattataaggagaaccaaaactaagtcgcaaaatttattaatttaaggggctctcgctttgaaagtttgagagtaagttacgataggcatttgtatccattcattactttcctcttttcaaataagcaactaaatagaaatgctaatctcagacttaattatttaacagaagagtgtaccatggaaaacctccagacaaatttctccttggttcagggctcaactaaaaaactgaatgggatgggagatgatggcagccccccagcgaaaaaaatgataacggacattcatgcaaatggaaaaacgataaacaaggtgccaacagttaagaaggaacacttggatgactatggagaagcaccagtggaaactgatggagagcatgttaagcgaacctgtacttctgttcctgaaactttgcatttaaatcccagtttgaaacacacattggcacaattccatttaagtagtcagagctcgctgggtggaccagcagcattttctgctcggcattcccaagaaagcatgtcgcctactgtatttctgcctcttccatcacctcaggttcttcctggcccattgctcatcccttcagatagctccacagaactcactcagactgtgttggaaggggaatctatttcttgttttcaagttggaggagaaaagagactctgtttgccccaagtcttaaattctgttctccgagaatttacactccagcaaataaatacagtgtgtgatgaactgtacatatattgttcaaggtgtacttcagaccagcttcatatcttaaaggtactgggcatacttccattcaatgccccatcctgtgggctgattacattaactgatgcacaaagattatgtaatgctttattgcggccacgaacttttcctcaaaatggtagcgtacttcctgctaaaagctcattggcccagttaaaggaaactggcagtgcctttgaagtggagcatgaatgcctaggcaaatgtcagggtttatttgcaccccagttttatgttcagcctgatgctccgtgtattcaatgtctggagtgttgtggaatgtttgcaccccagacgtttgtgatgcattctcacagatcacctgacaaaagaacttgccactggggctttgaatcagctaaatggcattgctatcttcatgtgaaccaaaaatacttaggaacacctgaagaaaagaaactgaagataattttagaagaaatgaaggagaagtttagcatgagaagtggaaagagaaatcaatccaagacagatgcaccatcaggaatggaattacagtcatggtatcctgttataaagcaggaaggtgaccatgtttctcagacacattcatttttacaccccagctactacttatacatgtgtgataaagtggttgccccaaatgtgtcacttacttctgctgtatcccagtctaaagagctcacaaagacagaggcaagtaagtccatatcaagacagtcagagaaggctcacagtagtggtaaacttcaaaaaacagtgtcttatccagatgtctcacttgaggaacaggagaaaatggatttaaaaacaagtagagaattatgtagccgtttagatgcatcaatctcaaataattctacaagtaaaaggaaatctgagtctgccacttgcaacttagtcagagacataaacaaagtgggaattggccttgttgctgccgcttcatctccgcttcttgtgaaagatgtcatttgtgaggatgataagggaaaaatcatggaagaagtaatgagaacttatttaaaacaacaggaaaaactaaacttgattttgcaaaagaagcaacaacttcagatggaagtaaaaatgttgagtagttcaaaatctatgaaggaactcactgaagaacagcagaatttacagaaagagcttgaatctttgcagaatgaacatgctcaaagaatggaagaattttatgttgaacagaaagacttagagaaaaaattggagcagataatgaagcaaaaatgtacctgtgactcaaatttagaaaaagacaaagaggctgaatatgcaggacagttggcagaactgaggcagagattggaccatgctgaggccgataggcaagaactccaagatgaactcagacaggaacgggaagcaagacagaagttagagatgatgataaaagagctaaagctgcaaattctgaaatcatcaaagactgctaaagaatagaaactgttaaagagattcatctgtgtattactgacaaggttttttttgtttgttgcttgctttggtaattgaattctgaagaatttatctgcatgacgataactaggcattctatccatttgtagatcagagaaagtgaagagattatatattagtacttaaatttttacattttccaaatgaatgaaaatgtatgtttctttgtacttttttaaaaaaatcagcttagtaacaatactatatggtttcaactagtaggtaatctgcttatatttctaatgcaaacttaacaattgtgtactttttaaaagctgcaatatgtgttggaaaatagctgtggtcaattttgttatccatatttcagactcaattttagatacaatggtggctttatattttaagtatatagagctactcaaggagttgaatctccccttttctcattaacacaatttttctaagttgatatggtgtactcattaacatacaccaaatttacttttactttgttcagattgtggaatgaatttccaccagttctcttctttttaatgtgtaccctaggaggaattttactgaggttatagcataccccatgagcacagtggggaagaagaatgtgttgttatgtgctgctgctaaacagaagcagcagttgtaatttgtttttcagtttaaatgtggttatagttagatttttttttaagcagcaacttttcaaaaataaaatgtgataatttctgaacttttgtttgtgttgttaatagtggtgtgaaaatattaacgttcttgagaaaaactgataccactgttgtgtatcagtttctatacaatccataatcctcctgtacagtttttacatgtagttatgagtcttactaaaatttatataatggacttgttttcctttaagttgtaaaatgttaaacaccttgaaggttattttggacttctgtatgtttaaatgttgtcttaccaaaatttgcacgaatggaccattttcatttactacttaatatcaaaatcaggaatttacagtcaactgatagtacatgataggtgcatataggacagtttagttacctgctactaaaagatttttagataagttttagaagataaaggaattccatagtttcaggagggacaacatcttctgcactttttttttgcacagaaaagtctgtcattctctaatggcaaatttcatatttgttaattcttggctcaaaatatattaggtaaaattcttagatctgtttttaaagggagtttcctgaaactatcattaattgacattattaccccatggattttatgggataataaatgtttttcatgttctcttataagatactatgtatgaaattacttcagagagctatatttattttaaaataaattagctagggttaaggttatattctatttccagcatagaaggta

SEQ ID NO: 3692 - DNA, 5971 bp, Homo sapiens
  source 1..5971: mol_type = genomic DNA
agagcctcggtggtttgcagcagtggaaccaggcaggcccagttgtgggtaggagaggccgtcacctgttgaggcctcccccccacacccccgcatcgccctgccctggcagagcccagcccccagtccccggagagcgcgcctgaggacggacggacggacggacggacagacctagggacggagggccaggggcaggggagatccaagaggccccgcgctggaatgcagttttctcgggcgagggagactttgcaccggagtggaaaatagtttggggtggggtttcgcaccgtcccctcctccccagccccgggccccctcccaggcgctttctgggagcttttagaactgcgctctgaagtttccagagagcgaggagcttttgcggcaggcagagacaatggaagaaaatgaaagccagaaatgtgagccgtgccttccttactcagcagacagaagacagatgcaggaacaaggcaaaggcaatctgcatgtaacatcaccagaagatgcagaatgccgcagaaccaaggaacgcctttctaatggaaacagtcgtggttcagtttccaagtcttcccgcaatatcccaaggagacacaccctaggggggccccgaagttccaaggaaatactgggaatgcaaacatctgagatggatcggaagagagaagcgttcctagaacatctgaagcagaagtacccccaccacgcctctgcaatcatgggtcaccaagagaggctgagagaccagacaaggagccccaaactgtctcacagtcctcaaccacccagtctgggtgacccggtcgagcatttatcagagacgtccgctgattctttggaagccatgtctgagggggatgctccaacccctttttccagaggcagccggactcgtgcgagccttcctgtggtgaggtcaaccaaccagacgaaagaaagatctctgggggttctctatctccagtatggagatgaaaccaagcagctcaggatgccgaatgaaatcacaagtgcagacacaatccgtgctctcttcgtaagtgcctttccacagcagctcaccatgaaaatgctggaatcgcccagtgtcgccatttacatcaaagatgaaagcagaaatgtctattatgaattaaatgatgtaaggaacattcaagacagatcactcctcaaagtgtacaacaaggatcctgcacatgcgtttaatcacacaccaaaaactatgaatggagacatgaggatgcagagagaacttgtttatgcaagaggagatggccctggggcccctcgccccggatctactgctcatccaccccatgcgattccaaattccccaccgtctactccagtgccccattccatgcccccctccccgtccagaattccttatgggggcacccgctccatggttgttcctggcaatgccaccatccccagggacagaatctccagcctgccagtctccagacccatctctccaagcccaagcgccattttagaaagaagagatgtcaagcctgatgaagacatgagtggcaaaaacattgcaatgtacagaaatgagggtttctatgctgatccttacctttatcacgagggacggatgagcatagcctcatcccatggtggacacccactggatgtccccgaccacatcattgcatatcaccgcaccgccatccggtcagcgagtgcttattgtaacccctcaatgcaagcggaaatgcatatggaacaatcactgtacagacagaaatcaaggaaatatccggatagccatttgcctacactgggctccaaaacaccccctgcctctcctcacagagtcagtgacctgaggatgatagacatgcacgctcactataatgcccacggcccccctcacaccatgcagccagaccgggcctctccgagccgccaggcctttaaaaaggagccaggcaccttggtgtatatagaaaagccacggagcgctgcaggattatccagccttgtagacctcggccctcctctaatggagaagcaagtttttgcctacagcacggcgacaatacccaaagacagagagaccagcgagaaaatgatgaaaaccacagccaacaggaaccacacagatagtgcaggaacgccccatgtgtctggtgggaagatgctcagtgctctggagtccacggtgcctcccagccagcctccacctgtgggcacctcagccatccacatgagcctgcttgagatgaggcggagcgtggcggaactcaggctccagctccagcagatgcggcagctccagctgcagaaccaggagttgctgagggcaatgatgaagaaggccgagctggaaatcagtggcaaagtgatggaaacaatgaagagactggaggatcccgtgcagcgacagcgcgtcctagtggagcaagagagacaaaaatatcttcatgaggaagagaagatcgtcaagaagttgtgcgagttggaagactttgttgaagacttgaagaaggactccacggcagccagccgattggttactctgaaagacgtggaagacggggctttcctcctgcgtcaagtgggagaggctgtagctaccctgaaaggagaatttccaaccttacaaaacaagatgcgagccatcctgcgcatagaagtggaggccgtgcggtttctgaaggaggagccacacaagctggacagtctcctgaagcgtgtgcgcagcatgacagacgtcctgaccatgctgcggagacatgtcactgatgggctcctgaaaggcacggacgcagcccaagccgcacagtacatggctatggaaaaggccacagccgcagaagtcctgaagagtcaggaggaggcagcccacacctccggccagcccttccacagcacaggtgcccctggcgatgcgaagtcggaagtggtgcctttgtccggcatgatggttcgccacgcgcagagctcccctgtggtcatccagccctcccagcactccgtggccctgctgaaccctgctcagaacttgcctcacgtggccagctccccagccgtcccccaggaagcaacctccactctgcagatgtcgcaggctccgcagtccccacagatacccatgaatgggtctgccatgcagagcttgttcattgaagaaatccacagtgtgagtgccaagaacagggcagtgtctatcgagaaagcagaaaagaaatgggaggaaaaaaggcaaaatctggatcactataatgggaaagagtttgagaagctcctagaagaagctcaggccaatatcatgaagtcaataccaaatctggagatgccgccagccacaggcccactgccaaggggagatgccccagtggacaaggtggaactttcagaagattctccaaattcggaacaggacttggaaaagctggggggaaagtcgccccctcctcctccgccacctcctcgtcgaagctacctgccaggatcgggactcaccaccacgaggtcaggcgatgtggtctacaccggcagaaaggagaacatcaccgctaaggcaagcagtgaagatgctggaccaagcccacagaccagagctacaaaatatccagcagaggagcctgcttcagcctggaccccatccccaccgcctgtcaccacctcctcctcaaaggatgaggaggaagaagaagaagaaggagacaaaataatggcagaactccaggcattccagaagtgttcctttatggatgtaaattcaaacagtcatgctgagccatcccgggctgacagtcacgttaaagacactaggtcgggcgccacagtgccacccaaggagaagaagggctccagcggggccccacagacgagcaggatgcctgtccccatgagtgccaagaacagacccggaaccctggacaaacccggcaagcagtccaaactgcaggatccccgccaatatcgtcaggctaatggaagtgctaagaaatctggtggggactttaagcctacttccccctccttacctgcttctaagattccagccctttctcccagctctgggaaaagcagttctctgccctcttctagtggtgacagctctaacctccctaatccacctgctactaaaccatcgattgcttctaaccctctcagcccccaaacaggaccacctgctcactctgcctccctcatcccttctgtctctaatggctctttgaagtttcagagcctcactcatacaggtaaaggtcaccatctttcattctcaccgcagagtcaaaatggccgagcaccccctcctttgtcattttcctcctcccctccttctcctgcctcctccgtctcactgaatcaaggtgccaagggcaccaggaccatccatactcccagcctcaccagctacaaggcacagaatggaagttcaagcaaagccaccccatccacagcaaaagaaacctcttaaaggtcaaatcctattaggcacaagtcggagttacatttaaaaaaaattaacagtctacaacaactgttttcacaagagaatgtaacatattgctgtatcgtttgaggcttaatgctaaatatgtgctaaatactggattaatagatttcagtaaagctcgttcgttttgtttggttttctttttacctagttgctatagtgtctacagtctatactcaatacctataaaatgcagtaagcatgtgttacagaaagaggttctggtgggagagaaaggtgcgtgtgagacaggagaattgtcttaagcatataaaacatgtatgattccagaattttagtatgttttgtataaaactatttttcattacggagactagaagtgaacagagaattacacaagtgtgactatacaaattgtaaaacagatactataatatttccttttattttagtgttatttagctttattacagatttctatttttgtcaaaacttcatggttcctttcaagatcttttttgccaaaacattttgatactatagcattgtacatttgaaagtagtgttctagactataaaaccaatgaacttctacatgagccctacagacaggcatgtgtagaaggcaatttatcaaacctattgcactgccatgaaaagtgtgtataataatttgctagcccaagcaagctagttttctttgcttgcttcttttctttcttttttccttccttttttttttttttttcttttttaacatgttgagattctctagttgttttctttggcgtatctaaccccttcttttgttttctgagacctggtaacccacgctcttgcattgtggattttaaaatgtatactctgtacggttctgtaaaccgaaaaacttttgtaaatatataaatatacatagacataaaaatactgtatgtgacagcacatagagtagttttcccacaccaaagttaatttttatgcatgctttaaaagtatatatcgggaccggcagaaatggaagtatccatacatttttaaaaagcaacaagtttgcacagctagagtgtttttgtaaataaatgtatttgtataacacagtcatgtaatatacagaactataagcagagactttgcaaaactaaataaagggctgcatgcttattattttttgtaccttgtcactataactacttcctagtcaaagaacgaaatgtaactgttaccgagttaaatgtttttccgctttgagggatgtaaccacatccactcagaggacactacttttctgaaagctctggggtgactaatgatgagttcctaataaattaattgcaagtgtggtgccttggatgtggcctgttggctcgctttcttctctgtggcttatcaaggtgtagatgacagaaagcaaacctggatacagagtttccaccctcagttcctggaggggctcttattattttctctctttttaaaaaacttccagtagaagtaaagtggaaataaaatgtctttatc

SEQ ID NO: 3693 - DNA, 1070 bp, Homo sapiens
  source 1..1070: mol_type = genomic DNA
aaataattcacaagttggccatgcagctgagacacattggggacaacattgatcataggatggttcgagaggatcttcaacaggatggcagagatgcactagatcattttgtcttctttttctttagaagagttcaggtgttgctgcattttttctggaacaaccatttgctgtaaaaggaaagtaaagagaacctcgtcctcaaactaaaggccacagaaatgggcactacctcctggcccactccctgggcaccatgccctctggtgacctgttggctccactcttgtcactcatgtccagatctgcagtgccagcttctccttctcggtgacatgtcacctccctgccccaatcctggctccaaccctctctggaaaatcgaagtgaaacatttgtctctaatactcaaattcaacatatggctcatctcatctaccttcccatttccatgcctagaggccccactactaccactagcaccgttgggtgtttccttctcaggctctgattctacaacatttacgttcttttctcacctttgatcccctcactcctctgtgacccccttcaagtcttccttcaccactccagtgttttcccataccactcgaccctgctcgaaggtatctttccctgctctgtcatcctcttttaggcatgcctgcttaaaatcgggagtgcttagtccttggccaacagtcctgccttctagaagaatgtaagacctgaaagagttatgaatctatcactaggcaaaaacttctcttttcctattgctggatggttttgctattattggttggtgggccctttgcctgtggaatgtatttcactcattctctcctgcacgctgttaggcagttctttcacctgcatgcttcttcttttacctttttgtctacctcatagtccctctctcccctcctttaaaagaattataaatattaggaaagcttgttgttataaattaaaagtttacatatgtatcttgagttcttcataggggaagtgttattttaaaaaattctaaaaatgaaataaatattgttattttattgagcatgaaa

SEQ ID NO: 3694 - DNA, 544 bp, Homo sapiens
  source 1..544: mol_type = genomic DNA
agaactgtgggattgatgacctcccacaactggagcagccgggaacagctctgaccacacagaggaaagaaattcctaagggaacactgctcagaaagtactgcagcatgtcttcaaatgcctgaggatcaagttggaaaactagaagcaacagaaaacacaataagcgcaatggcggcggccgcggcggagcagcaacagttctacctgctcctgggaaacctgctcagccccgacaatgtggtccggaaacaggcagaggaaacctatgagaatatcccaggccagtcaaagatcacattcctcttacaagccatcagaaatacaacagctgctgaagaggctagacaaatggccgccgttctcctaagacgtctcttgtcctctgcatttgatgaagtctatccagcacttccctctgatgttcagactgccatcaagagtgagctactcatgattattcagatggaaacacaatctagcatgaggaaaaaagtttgtgatattgcggcagaactggccaggaatttaataggtgtgtatg

SEQ ID NO: 3695 - DNA, 579 bp, Homo sapiens
  source 1..579: mol_type = genomic DNA
agactcggttggtgactccgggcgcgtcgaagatcttgtacctgtcgttcgcagtggctcactttcccagtaatccataagaacagcagggataacagggtcccatgtcgtttttttgtcagaattcctcgactggcgaccctgtgcccgacaggctgcaccgcgcccggcgcactgactccggcctctgcgcgcgccccctggccggctccggggtggggagggggcttcgcagatccccagaaaaccgcccggcgagccacgagcccgtggactgcaggctccgcttcctcgcggggtgttcactttgtatcagtgtgctgatttgccgccagttagaagcaccttaaaaaggggccgggggccgtaggaggggggcttgtctgaaggaggctctgggcttgctgatccacgcagcggtttgtcgcgaggctgcgggggaacggcccacggccgcggtaacagggcttcgtcttctttgcagagccatgggcagcaggaagaaggaaattgccctgcaggtcaacatcagcacccaagagctttgggaggaaatgctcagttccaaaggactaactg

SEQ ID NO: 3696 - DNA, 1293 bp, Homo sapiens
  source 1..1293: mol_type = genomic DNA
acgcgcatggaacgcagcgaaggactatggcaggggagaacttcgctacgccgttccacgggcacgtgggccgcggcgccttcagcgacgtgtacgagcccgcggaggacacgtttctgcttttgaacgcgctggaggcagcggctgccgaactggcaggagtggaaatatgcctggaagtagggtcagggtctggtgtagtatctgcattcctagcctctatgataggccctcaggctttgtacatgtgcactgatatcaaccctgaggcagcagcttgtaccctagagacagcacgctgtaacaaagttcacattcaaccagttattacagatttggtcaaaggcttgctaccaagattgaccgaaaaagttgatcttctggtgtttaatcccccctatgtagtgactccacctcaagaggtaggaagtcacggaatagaggcagcttgggctggtggcaaaaatggtcgggaagtcatggacaggttttttcccctggttccagatctcctttcaccaaaaggattattctatttagttaccattaaagaaaacaacccagaagaaattttgaaaataatgaagacaaaaggtctgcaaggaaccactgcactttccagacaagcaggccaagaaactctttcagtcctcaagttcaccaagtcttagcatacagtgtgtgcccagaactactggaaactgaatgcatttagcatattttgaaactgaagtcattcattagatggatttacatcactggcttccctggttctcaagcctttggattcagactgaattataccacaggccttcctgggtctccagcttatagatgacagatcatgggacctcttagcctccataatcatgtaagccactttcttgtagtactggtaaaagatatattaaaccaatctataaaacagatagctatgaaagagaaaggtgacaggcacaagcctaggcaaatagagaagggttcctggacagcctctgacttgcctaggtcattgtgcacacgtggcttgcctgaatgaacatgcccactgtgaaagattccatttctcaacacatgtgcagtaagggaaataaatcaatgtggctcaaactaaccgcccacacatggggtggagccacaaggagtttgctccttatgcaggggagaagccgtgcctcttcagctcgtgtgtggtggcctggcattcaatttgtgaggtgtaaaacctgcatgaaggacccctctttttgtggagagctttccttttgcctaataaattctgccctcctcgcc

SEQ ID NO: 3697 - DNA, 2958 bp, Homo sapiens
  source 1..2958: mol_type = genomic DNA
gctccaagttgccgccagaacccatggccggcgtggaaaccgctgcgaggcggcgccacgacggaggctgaggtcgccggcagtatccatggcgtcccagagcggcagctccctggggctcctggcctggttcttgcttcttcagccatggctcgaagaggcccgggcaggcagggtgggtgcgcagggaggcgtagcactgctcttcccctccgcgctcccctcagggccaggcggccaggaccccggagcgagcggatgggagccgccacctgtaggggctccaggatccccagcggccccccagtccagggggaacgcagtgcgccccgcttcggtgttacttccctcaggtgagccataccgacccgaggaggattccagaatgaccccggcaagcccagaagcccggacgtctcctgtgcacccgaaattccccaaaattccagaaacttctgtagctccagggtctccagcgaccgcagggcctccaggatcctgggttacttcagcatctacagtgggagaagccttggaatccgacggaatctctgaccttggaaggcagttttctcagggtattgtttctggtgctagatctgtcctggcctgcggggtaggtcaaaggggacacagcctggctcagggaggttgagggtcagaccctgacctagatgatttgagagagaggatagataacccgcctccgccctgggcagcctggtggggtggtgggaaggtagtggcttcacttccagtcccctctctttactgagcccaccagcctgtggccaccgtgtttcaaggatgattggaggattgccagccccaaacaagaagtggccctggcaggtgagcctgcagaccagcaacatacaccactgcggaggctccctcatcgacaggcgctgggtgctcactgccgcccactgtgtctttagtttcaggaccaatgccacttgttcttcaggagactgagctaaacattatgcgtcatgagaaatgttgtgagatgctcaagaacaagaatatatccaagagtaaaatggtcacgagggggaccgtctgtggctataatgaccaagggaaggatgcctgtcaggttataaagaggacacaaccaatccaggttgactctggaagctcccttgtctgccaaatggacaagacctggattcagataggagtgttccttgggcaaagccccactggaggggctggagggaaagtagggtcacttggagatcctggatgccagcccctgaggtttggtcttcatctcactgcgggaggggtgacaccatgagccagtccagggcaatgggctgcgagggtgaggaggtctgagaatcggccgagattaagttgagggactccaggagactgcttggaccagcggagtgaggagagggaggggccaaggagggaagtcagccggggcgtacccagcccgggaggtataagggagggctgtcactaggggcgcccttgcgggtcagacaccacgagcgccgtggcgggtggcccctggggggcgccacgcaggcggggcactaggagcatccccacccagctcaccagaggccgcggcatgcggccaacagggggcgccgtcgtgggggcggcactgggagcgccttccggagagacgcagtcggctgccaccccgggatgggtcgctggtgccagaccgtcgcgcgcgggcagcgcccccggacgtctgccccctcccgcgccggtgccctgctgctgctgcttctgttgctgaggtctgcaggttgctggggcgcaggggaagccccgggggcgctgtccactgctgatcccgccgaccagagcgtccagtgtgtccccaaggccacctgtccttccagccggcctcgccttctctggcagaccccgaccacccagacactgccctcgaccaccatggagacccaattcccagtttctgaaggcaaagtcgacccataccgctcctgtggcttttcctacgagcaggaccccaccctcagggacccagaagccgtggctcggcggtggccctggatggtcagcgtgcgggccaatggcacacacatctgtgccggcaccatcattgcctcccagtgggtgctgactgtggcccactgcctgatctggcgtgatgttatctactcagtgagggtggggagtccgtggattgaccagatgacgcagaccgcctccgatgtcccggtgctccaggtcatcatgcatagcaggtaccgggcccagcggttctggtcctgggtgggccaggccaacgacatcggcctcctcaagctcaagcaggaactcaagtacagcaattacgtgcggcccatctgcctgcctggcacggactatgtgttgaaggaccattcccgctgcactgtgacgggctggggactttccaaggctgacggcatgtggcctcagttccggaccattcaggagaaggaagtcatcatcctgaacaacaaagagtgtgacaatttctaccacaacttcaccaaaatccccactctggttcagatcatcaagtcccagatgatgtgtgcggaggacacccacagggagaagttctgctatgagctaactggagagcccttggtctgctccatggagggcacgtggtacctggtgggattggtgagctggggtgcaggctgccagaagagcgaggccccacccatctacctacaggtctcctcctaccaacactggatctgggactgcctcaacgggcaggccctggccctgccagccccatccaggaccctgctcctggcactcccactgcccctcagcctccttgctgccctctgactctgtgtgccctccctcacttgtgggccccccttgcctccgtgcccaggttgctgtgggtgcagctgtcacagccctgagagtcagggtggagatgaggtgctcaattaaacattactgttttccatg

SEQ ID NO: 3698 - DNA, 550 bp, Homo sapiens
  source 1..550: mol_type = genomic DNA
actgactcagtgacctcggggtcgttaggcctccacgtcctcgctggagctgcggacctcagtcgtccatccacacctcccccctgccgcccccgcccatctcactctcccaaccctgggcaccagggcaggtcgacagcccgaggcactcctctactgcgtttccaggcccaggagacccactccagcgccgcggttccttgcgacccggcagccgttcagcagacctcccattctttcctgcatcatcgggcattgtggaggcaccctacgaccgggcaaggtcccccaggccaggatgtcaggcctggtgttggggcagcgggatgagcctgcaggccaccggctcagccaagaggagatcctggggagcacacggctggtcagccaagggctagaggccctacgcagtgaacaccaggccgtgctgcaaagcctgtcccagaccattgagtgtctgcagcagggaggccatgaggaagggctggtgcatgagaaggcccggcagcttcgccgttctatggaaaacattgagctcgggctgagtgag

SEQ ID NO: 3699 - DNA, 666 bp, Homo sapiens
  source 1..666: mol_type = genomic DNA
ggcggagcgagtggaggctgcagcccagctcgtctcggcgcccgcgtcgccgtcgcgaagccccccgccccgcttccgccgcgtcggaatgagctcccggaaagtgctggccattcaggcccgaaagcggaggccgaaaagagagaaacatccgaaaaaaaatcaagcagaagattgagctgctgatgtcagttaactctgagaagtcgtcctcttcagaaaggccggagcctcaacagaaagctcctttagttcctcctcctccaccgccaccaccaccaccaccgccacctttgccagaccccacacccccggagccagaggaggagatcctgggatcagatgatgaggagcaagaggaccctgcggactactgcaaaggtggatatcatccagtgaaaattggagacctcttcaatggccggtatcatgttattagaaagcttggatgggggcacttctctactgtctggctgtgctgggatatgcaggggaaaagatttgttgcaatgaaagttgtaaaaagtgcccagcattatacggagacagccttggatgaaataaaattgctcaaatgtgttcgagaaagtgatcccagtgacccaaacaaagacatggtggtccagctcattgacgacttcaagatttcaggcatgaatgggatac

SEQ ID NO: 3700 - DNA, 604 bp, Homo sapiens
  source 1..604: mol_type = genomic DNA
actttgtttatgggacagtccgggagctgctgcggccgcgctgtctgcttctcctgcgcctccttttcgcccagcactagcgccttaggccagctcgggggatgtgagagccgaagcccttagactgccaggcacagagtcgggtcgggatttgtcagccaagcctcggctccagctccgcaatctcgggactcacccgagcgacccaggcccgacggcaagttcgggcgggacggcggccgccgcgcgctcaggctcagcttcgctgcccgcccaggtagtgcccgctggagctcgcgcgctcatccggcaccactccagggctccaggctcctcgggcttccggagtcgagacgtggtggagttggctcgggctgaacttctttcggggggctgcctgtcctggaatcgtgcgacctttcctttgccatcctgcggttcagcaagccccgagtgcagttattccctccacccctcgccctatcttctcctcctccaggcaacttctttgcttcaagaaagttgcataattctcgagaagatgaatccggcctcggcgccccctccgctcccgccgcctgggcagcaagtgatccacgtcacg

SEQ ID NO: 3701 - DNA, 2147 bp, Homo sapiens
  source 1..2147: mol_type = genomic DNA
attgttcgcagctgatgtcactcgcagttgtgagcggccgcctctcccggggacaatgtgggactgagcggcccagccgccgtgccgccgccgccgccgccgcaggacagccccagcgaggccatttccagcacatagaagagagattggaaaccaacgtgcagaactgccagtcccctgacacgctgtgccccacccactgcagcccagtgctgaatgaaccctgcccagaggtgtctgtagtgagcttctgccctagtgacttttgagccggccaggttgcagcgcggacacactcgcaggtcgctgtggccccagcctcgcctgacagaatgagcggctcggacgggggactggaggaggagccagagctcagcatcaccctcacgctgcggatgctgatgcacgggaaggaagtgggcagcatcatcgggaagaagggcgagactgtaaagcgaatccgggagcagagcagtgcccggatcaccatctccgagggctcctgccctgaacgcatcaccaccatcaccgggtctacagcagctgtcttccatgcagtctccatgattgctttcaaactggatgaggacctttgtgctgctcctgcaaatggtggaaatgtctccaggcctccagtgaccctgcgccttgtcatccctgccagtcagtgtggctcactgattgggaaggctggcaccaagatcaaggagatccgagagactacgggtgcccaggtacaggtggcaggggacctgctccccaactccacagagcgagctgttacggtatctggggtgcctgatgccatcatcctgtgtgtgcgccagatctgcgctgttatcctggagtccccacccaaaggagccactatcccctaccatccgagcctctccctaggtactgttcttctctctgccaaccagggcttctctgtccagggtcagtatggggctgtgaccccagctgaggtcaccaagctccagcagctctcaagccatgcggtcccctttgccacacccagcgtggtgccaggactggatcccggcacacagaccagctcacaggagttcttggttcccaacgatttgattggctgtgtgatcgggcgccagggcagcaagatcagcgagatccggcagatgtcaggggcacatatcaagatcgggaaccaagcagagggcgctggggagcggcatgtcaccatcactggctctccggtctccatcgccctggcccagtacctcatcactgcctgtctagagacggccaagtctacctctggggggacgcccagctcggcccccgcagacctgcctgcccccttctcgccacccctgacggccctgcccacagctccccctggcctgctgggcacaccctatgccatctccctctccaacttcatcggcctcaagcccatgcccttcttggctttaccacctgcttccccagggccgccgccgggcttggcggcctacactgccaagatggcagcagctaatgggagcaagaaggctgagcggcagaaattctccccctactgaggccagctgaggtacaggcaggggcaggcaggaccaccagcagggggctgcctctgcaccctacccgcccaaggagactccaccctggggtcccaaacgccgctaacgcccagacgcatggatgcaccccctaccctgcctccatctatgggagttctttctctcagagtgggggcagtttctggcccaggggtctgagctgcggcagccccagggcagggggccctacctcctcagctctgtgcttggatacagggagcagccaggagactccctagtgcccccaccatggcgggtgtcactcacgcactccccatcccttagggcttcctggcctactgcatccttgtgggagtcagggaggagggcccgttgggtagctggggccaggcttctctccccaccacctgcagatttcttgctgcttccactgatacccttttgactggaatgaactggctgggcttgtcagggggcaccccaaagagggggcactgccaggtagctgggggagtggcatggggcaggggcccagttctcagcagcagacactctgtacagttttttcaatccctgtttttgaataaatattctcagcgacca

SEQ ID NO: 3702 - DNA, 6981 bp, Homo sapiens
  source 1..6981: mol_type = genomic DNA
gggcggcctatagatccaagagaaggtcctggacggcctccactagatggtagggatcattttggaagacctcctgtagatataagagagaatcttgtgaggccaggtatagatcatcttggtcgaagagaccactttggctttaatccagagaagccctgggggcatagaggagattttgatgagagagagcatcgggttctaccggtctatggtggtccaaaaggcttacatgaagaaagaggtagatttcggtctggaaactatcgatttgatcctagaagtggtccttggaaccgaggatttggacaagaagttcacagagattttgatgaccgcagaagaccctgggagaggcaaagggatagggatgacagagattttgatttctgcagagaaatgaatggaaatcgtcttggacgagacagaattcaaaacacttgggttccccctcctcatgctcgggtttttgattattttgaaggggccacttctcaacgaaaaggtgataatgtgcctcaggttaatggtgaaaatacagagagacatgctcagccaccacctataccagtacagaatgatcctgaactttatgaaaaactgacatcttcaaatgaaataaacaaggagaagagtgacacagttgctgatatagaaagtgaaccagtggtagaaagcacagaaactgaggggacataatcatcactcagtaggttaatgatgaaatggcaggtaattcacacttttggacagagcgcaccgcccccgtggaatcaccctacagaagaggccagctataaaggatgtctcacacctttaagatcagtgtttctcaatgtgtggaccatggatacctgtattagaatacccaaaggatttgtttaaaattcaggctgagcccttcccaagacctaatagagctaaaagctttgggagtaggtggaggaaacctgcatctttacccagcaatccaggacagaatgacttggaagataacggagcttcgaagcttctagcagaatatgaagtctttcgtcttcagctacctgggttaagtttaagcagggctctgtgtatgaatgacaaggataccttcagccagctcattctggatgaatgaatgattacactaagtgtcctccacattcctctgtgggctcacttcatggactcactttgcgtgcttgttaaatgtgctgtgttgctcccaagaccatgtaaagcctactgaccactaacctccctcacagcagaaactagacgtcaggttaaaatgggcaactccgacagtcagtacacccttcaaggatctaaaaatcatagcaatactattactggtgctaagcaaattccttgctccctgaaaatacgtggcattcatgcaaaagaggaaaagtcattgcatggatggggtcacggaagcaacggagcaggttacaagtccaggtccctggcccgaagctgcctttctcactttaagagtaaccagccttacgcatcgagactcggtggccccacatgcaaggtctccagaggtgttgcctactccacgcacaggacaaatgccccagggaaggatttccagggcatcagtgctgctttctcaactgagaatggcttccactctgttggccacgagctggcagataaccacatcacctccagagactgcaacggacaccttctcaactgctacgggaggaatgagagcattgcctccaccccaccgggcgaagaccgcaagagcccccgagtgctcatcaaaacgctggggaagctggatgggtgtttaagggtcgagttccacaatggtggcaaccccagcaaagtgcctgcagaggactgcagtgagccggtgcagctgctgaggtactcacctaccttagcatcggaaacctcccctgtgcctgaagccaggagggggtccagcgccgattccctgcccagccatcgcccctctcccacggactctcgcctgcggtccagcaaaggcagctccctgagttctgagtcatcctggtacgactccccttggggcaatgctggagagctgagcgaggctgagggctccttcctggcccccggcatgcctgaccccagtctccatgccagcttcccacctggcgatgccaaaaagcctttcaaccaaagctcttccctctcctccctccgggaactgtacaaagatgccaacctggggagcctctccccctcaggtatccgcctttctgatgaatacatgggcacgcatgccagcctgagcaaccgtgtctcttttgcttccgacattgatgtgccctccagagtggcacacggggaccccatccagtacagttccttcactctcccctgtcggaagcccaaagcctttgttgaggatactgcgaagaaggactccctcaaagccaggatgcgacggatcagtgactggacgggaagcctctcaaggaagaaaaggaaactccaggagccgaggtccaaggagggcagtgactactttgacagtcgctctgatggactgaatacagatgtgcagggatcctcccaggcatctgcttttctgtggtcagggggctctactcagatcctgtctcagagaagtgaatccacacatgcgattggcagcgatcccctccggcagaacatttatgagaatttcatgcgagagttggaaatgagcaggaccaacactgagaacatagaaacatctacagaaaccgccgagtccagcagcgagtcactcagctctctggaacagctggatctgctctttgagaaggaacagggggtggtccggaaggccgggtggctcttcttcaagcccctggtcactgtgcagaaggaaaggaagcttgagctggtggcacgaaggaaatggaaacagtactgggtaacgctgaaaggatgcacgctgctgttttatgagacctatgggaagaattccatggatcagagcagtgcccctcggtgtgctctgtttgcagaagacagcatagtgcagtctgttccagagcatcccaagaaagaaaatgtgttctgcctcagcaactcctttggagatgtctaccttttccaggccaccagccagacagatctagaaaactgggtcactgctgtacactctgcttgtgcatccctttttgcaaagaagcatgggaaagaggacacgctgcggctgctgaagaaccagaccaaaaacctgcttcagaagatagacatggacagcaagatgaagaagatggcagagctgcagctgtccgtggtgagcgacccaaagaacaggaaagccatagagaaccagatccagcaatgggagcagaatcttgagaaatttcacatggatctgttcaggatgcgctgctatctggccagcctacaaggtggggagttaccgaacccaaagagtctccttgcagccgccagccgcccctccaagctggccctcggcaggctgggcatcttgtctgtttcctctttccatgctctggtatgttctagagatgactctgctctccggaaaaggacactgtcactgacccagcgagggagaaacaagaagggaatattttcttcgttaaaagggctggacacactggccagaaaaggcaaggagaagagaccttctataactcaggtcgatgaacttctgcatatatatggttcaacagtagacggtgttccccgagacaatgcatgggaaatccagacttatgtccactttcaggacaatcacggagttactgtagggatcaagccagagcacagagtagaagatattttgactttggcatgcaagatgaggcagttggaacccagccattatggcctacagcttcgaaaattagtagatgacaatgttgagtattgcatccctgcaccatatgaatatatgcaacaacaggtttatgatgaaatagaagtctttccactaaatgtttatgacgtgcagctcacgaagactgggagtgtgtgtgactttgggtttgcagttacagcgcaggtggatgagcgtcagcatctcagccggatatttataagcgacgttcttcccgatggcctggcgtatggggaagggctgagaaagggcaatgagatcatgaccttaaatggggaagctgtgtctgatcttgaccttaagcagatggaggccctgttttctgagaagagcgtcggactcactctgattgcccggcctccggacacaaaagcaaccctgtgtacatcctggtcagacagtgacctgttctccagggaccagaagagtctgctgccccctcctaaccagtcccaactgctggaggaattcctggataactttaaaaagaatacagccaatgatttcagcaacgtccctgatatcacaacaggtctgaaaaggagtcagacagatggcactctggatcaggtttcccacagggagaaaatggagcagacattcaggagtgctgagcagatcactgcactgtgcaggagttttaacgacagtcaggccaacggcatggaaggaccgcgggagaatcaggatcctcctccgaggtctctggcccgccacctgtctgatgcagaccgcctccgcaaagtcatccaggagcttgtggacacagagaagtcctacgtgaaggatttgagctgcctctttgaattatacttggagccacttcagaatgagacctttcttacccaagatgagatggagtcactttttggaagtttgccagagatgcttgagtttcagaaggtgtttctggagaccctggaggatgggatttcagcatcatctgactttaacaccctagaaaccccctcacagtttagaaaattactgttttcccttggaggctctttcctttattacgcggaccactttaaactgtacagtggattctgtgctaaccatatcaaagtacagaaggttctggagcgagctaaaactgacaaagccttcaaggcttttctggacgcccggaaccccaccaagcagcattcctccacgctggagtcctacctcatcaagccggttcagagagtgctcaagtacccgctgctgctcaaggagctggtgtccctgacggaccaggagagcgaggagcactaccacctgacggaagcactaaaggcaatggagaaagtagcgagccacatcaatgagatgcagaagatctatgaggattatgggaccgtgtttgaccagctagtagctgagcagagcggaacagagaaggaggtaacagaactttcgatgggagagcttctgatgcactctacggtttcctggttgaatccatttctgtctctaggaaaagctagaaaggaccttgagctcacagtatttgtttttaagagagccgtcatactggtttataaagaaaactgcaaactgaaaaagaaattgccctcgaattcccggcctgcacacaactctactgacttggacccatttaaattccgctggttgatccccatctccgcgcttcaagtcagactggggaatccagcagggacagaaaataattccatatgggaactgatccatacgaagtcagaaatagaaggacggccagaaaccatctttcagttgtgttgcagtgacagtgaaagcaaaaccaacattgttaaggtgattcgttctattctgagggagaacttcaggcgtcacataaagtgtgaattaccactggagaaaacgtgtaaggatcgcctggtacctcttaagaaccgagttcctgtttcggccaaattagcttcatccaggtctttaaaagtcctgaagaattcctccagcaacgagtggaccggtgagactggcaagggaaccttgctggactctgacgagggcagcttgagcagcggcacccagagcagcggctgccccacggctgagggcaggcaggactccaagagcacttctcccgggaaatacccacaccccggcttggcagattttgccgacaatctcatcaaagagagtgacatcctgagcgatgaagatgatgaccaccgtcagactgtgaagcagggcagccctactaaagacatcgaaattcagttccagagactgaggatttccgaggacccagacgttcaccccgaggctgagcagcagcctggcccggagtcgggtgagggtcagaaaggaggagagcagcccaaactggtccgggggcacttctgccccattaaacgaaaagccaacagcaccaagagggacagaggaactttgctcaaggcgcagatccgtcaccagtcccttgacagtcagtctgaaaatgccaccatcgacctaaattctgttctagagcgagaattcagtgtccagagtttaacatctgttgtcagtgaggagtgtttttatgaaacagagagccacggaaaatcatagtatgattcaatccagatatgggttaaattcctcattttacttttaaactggtggtaaagtggaaattgcaaaaaaaaaaaaaaaaaaaaactgttcattcctgggttttgtgcagtatacattttcccacaaaatggttgtaaagatttaagttattttaatttattgtggatcagaaacctagatgaaactggtcagaatctgtaaattacttagtttatatccactttgagcaggtatcaaatgatttaggatccttaaaattacattctaataattaagttatgtggaaaaagtaaggctggggaagtcgtgattaatagttttcaaagggccattttttaaaatcctctgggcattttctttcagctgtttgttagtttttgctttatttaaagcatatttaagttattttaatgtggtttaggggcaaaatgtgcagatacttcatttttgtaagatagattgtaatagatgctgtttatactaaacatgtcataactatctatacagtatatattaaaagaaagcttgtactgtatcttatttgatgatatttattttctctgccaagctgtatagtaaaaggaaaataagtcaca

SEQ ID NO: 3703 - DNA, 727 bp, Homo sapiens
  source 1..727: mol_type = genomic DNA
cgactctggaggaagactggagcctttgcggcggcgctgcccctcccctggtccccgcgagctcggagggcccggctggtgctgcgggggccccgggaggttgaaaactaagcatggggaagagctgcaaggtggtcgtgtgtggccaggcgtctgtgggcaaaacttcaatcctggagcagcttctgtatgggaaccatgtagtgggttcggagatgatcgagacgcaggaggacatctacgtgggctccattgagacagaccggggggtgcgagagcaggtcaccatcgtggtccttggcaacaagtgtgacttacaggagcagcggcgtgtagacccagatgtggctcagcactgggccaagtcagagaaggtgaagctgtgggaggtgtcagtggcggaccggcgctccctcctggagccctttgtctacttggccagcaagatgacgcaaccccagagcaagtctgccttccccctcagccggaagaacaagggcagcggctccttggatggctgaagagctgccgttcctctttcacgatcccagccccatttcagtgtctggggctctggtagatgtgttgagggcaaagtagaggacaagctgtctttcccagtcagccagggagctccccgccaggccacgccccagccactttgctccctctcacctctgggaagtgcaaatactcttggttgacatccccttcctcagccctccca

SEQ ID NO: 3704 - DNA, 5033 bp, Homo sapiens
  source 1..5033: mol_type = genomic DNA
cggagccgaaacaccggtaggagcggggaggtgggtactacacaaccgtctccagccttggtctgagtggactgtcctgcaggtaaagtacttctcttcctggtcaggttgtcacgctcttacttcctgccttgtccgcgagcgcctggaaaatagaggccttgagcccgagcggcgaagtccgggcttgaagctgccgctgggagatttctcttgctgtcacccctcccccctcggccgctccccggcggcccgggctcccgcgcgcagctcccgggcgccacttttccaagctactcaaatgtctcggggaggccctgagcctcgcagatcttttctttaaaaaatcctagtctctatctggaaaagggcgtctccccctacccctcttccttctgccaacggactagtcaccgggtctcagccttcgctggtgacctttcatggtttactgtccaacgggactccgcctggggagctggagagacaaactcttgccactccaaaattagcaagcgctgccagcgtccgacttgaagttgctagtggttagtcccagccttcgcccttcgcggtccgaccgctgagaggagggagacttcgttatgccccgggccgtcaacggcgccaggagctaaagggcgggcagacgaaagcgggcggcgagtcgccagttagtcttcaccgctctggagagagttgctagccacgggatcctgacccggacacgaactcgtttctccacgtcggtgcgcgcttgcatccctggccccgaaagcgtgggaatgtccggaaatgctggcgtatgggagttccttaattagaaatgcgttagcgaatattatacgcttatactatgggcggacgggtggagagccttaaaaacaacaacaacaaactaagcagttgctcaatcgttgattgatcctcaggcacgtctagattttcccacttacataggtcttgttaagaaaccagtcctgccttcttgccactcgtgtctttcgatggctcccttcccgaagtcccgctgcctctaagcggagtgttaagcggggctctcggaagccggtggaccgagatttccccgggtggggcgggcgcggtgtagcggcccgcgggctgacttgctcccggctgtcccccggccccagcgaccatgccccgtaaaggcacccagccctccactgcccggcgcagagaggaagggccgccgccgccgtcccctgacggcgccagcagcgacgcggagcctgagccgccgtccggccgcacggagagcccagccaccgccgcagagactgcaagtgaggaacttgataatagaagtttagaagagattttgaacagcattcctcctcccccgcctccagcaatgaccaatgaagctggagctcctcggcttatgataactcatattgtaaaccagaacttcaaatcctatgctggggagaaaattctgggacctttccataagcgcttttcctgtattatcgggccaaatggcagtggcaaatccaatgttattgattctatgctttttgtgtttggctatcgagcacaaaaaataagatctaaaaaactctcagtattaatacataattctgatgaacacaaggacattcagagttgtacagtagaagttcattttcaaaagataattgataaggaaggggatgattatgaagtcattcctaacagtaatttctatgtatccagaacggcctgcagagataatacttctgtctatcacataagtggaaagaaaaagacatttaaggatgttggaaatcttcttcgaagccatggaattgacttggaccataatagatttttaattttacagggtgaagttgaacaaattgctatgatgaaaccaaaaggccagactgaacacgatgagggtatgcttgaatatttagaagatataattggttgtggacggctaaatgaacctattaaagtcttgtgtcggagagttgaaatattaaatgaacacagaggagagaagttaaacagggtaaagatggtggaaaaggaaaaggatgccttagaaggagagaaaaacatagctatcgaatttcttaccttggaaaatgaaatatttagaaaaaagaatcatgtttgtcaatattatatttatgagttgcagaaacgaattgctgaaatggaaactcaaaaggaaaaaattcatgaagataccaaagaaattaatgagaagagcaatatactatcaaatgaaatgaaagctaagaataaagatgtaaaagatacagaaaagaaactgaataaaattacaaaatttattgaggagaataaagaaaaatttacacagctagatttggaagatgttcaagttagagaaaagttaaaacatgccacgagtaaagccaaaaaactggagaaacaacttcaaaaagataaagaaaaggttgaagaatttaaaagtatacctgccaagagtaacaatatcattaatgaaacaacaaccagaaacaatgccctcgagaaggaaaaagagaaagaagaaaaaaaattaaaggaagttatggatagccttaaacaggaaacacaagggcttcagaaagaaaaagaaagtcgagagaaagaacttatgggtttcagcaaatcggtaaatgaagcacgttcaaagatggatgtagcccagtcagaacttgatatctatctcagtcgtcataatactgcagtgtctcaattaactaaggctaaggaagctctaattgcagcttctgagactctcaaagaaaggaaagctgcaatcagagatatagaaggaaaactccctcaaactgaacaagaattaaaggagaaagaaaaagaacttcaaaaacttacacaagaagaaacaaactttaaaagtttggttcatgatctctttcaaaaagttgaagaagcaaagagctcattagcaatgaatcgaagtagggggaaagtccttgatgcaataattcaagaaaaaaaatctggcaggattccaggaatatatggaagattgggggacttaggagccattgatgaaaaatacgacgtggctatatcatcctgttgtcatgcactggactacattgttgttgattctattgatatagcccaagaatgtgtaaacttccttaaaagacaaaatattggagttgcaacctttataggtttagataagatggctgtatgggcgaaaaagatgaccgaaattcaaactcctgaaaatactcctcgtttatttgatttagtaaaagtaaaagatgagaaaattcgccaagctttttattttgctttacgagataccttagtagctgacaacttggatcaagccacaagagtagcatatcaaaaagatagaagatggagagtggtaactttacagggacaaatcatagaacagtcaggtacaatgactggtggtggaagcaaagtaatgaaaggaagaatgggttcctcacttgttattgaaatctctgaagaagaggtaaacaaaatggaatcacagttgcaaaacgactctaaaaaagcaatgcaaatccaagaacagaaagtacaacttgaagaaagagtagttaagttacggcatagtgaacgagaaatgaggaacacactagaaaaatttactgcaagcatccagcgtttaatagagcaagaagaatatttgaatgtccaagttaaggaacttgaagctaatgtacttgctacagcccctgacaaaaaaaagcagaaattgctagaagaaaacgttagtgctttcaaaacagaatatgatgctgtggctgagaaagctggtaaagtagaagctgaggttaaacgcttacacaataccatcgtagaaatcaataatcataaactcaaggcccaacaagacaaacttgataaaataaataagcaattagatgaatgtgcttctgctattactaaagcccaagtagcaatcaagactgctgacagaaaccttcaaaaggcacaagactctgtcttgcgtacagagaaagaaataaaagatactgagaaagaggtggatgacctaacagcagagctgaaaagtcttgaggacaaagcagcagaggtcgtaaagaatacaaatgctgcagagatttcaaaaatatcactgcatcctatagaagataatcctattgaagagatttcggttctaagcccagaggatcttgaagcgatcaagaatccagattctataacaaatcaaattgcacttttggaagcccggtgtcatgaaatgaaaccaaacctcggtgccatcgcagagtataaaaagaaggaagaattgtatttgcaacgggtagcagaattggacaaaattacttatgaaagagacagttttagacaggcatatgaagatcttcggaaacaaaggcttaatgaatttatggcaggtttttatataataacaaataaattaaaggaaaattaccaaatgcttactttgggaggggacgccgaactcgagcttgtagacagcttggatcctttctctgaaggaatcatgttcagtgttcgaccacctaagaaaagttggaaaaagatcttcaacctttcgggaggagagaaaacacttagttcattggctttagtatttgctcttcaccactacaagcccactcccctttacttcatggatgagattgatgcagcccttgattttaaaaatgtgtccattgttgcattttatatatatgaacaaacaaaaaatgcacagttcataataatttctcttcgaaataatatgtttgagatttcggatagacttattggaatttacaagacatacaacataacaaaaagtgttgctgtaaatccaaaagaaattgcatctaagggactttgttgaactttatgctgaagattcttcaagttgattcagtgtattactgatttttttctatttgtaaaggattatgagttgtataaaatacatactccctaaactagatcatgaaactggtttctgttttatgcagttgtcatttgtaaagtctaataaaatattctctataattgcttctagatta

SEQ ID NO: 3705 - DNA, 493 bp, Homo sapiens
  source 1..493: mol_type = genomic DNA
acaactggagcagccgggaacagctctgaccacagtggttccggggagaagcctttccaggacccatgtgtaggcacaactgttttccctgatcaggatacttgcggcactcaagaattctccgaagtttgaaggttatgaatggttatcactcaaggattcagaactaagcagaggaaagaaattcctaagggaacactgctcagaaagtactgcagcatgtcttcaaatgcctgaggatcaagttggaaaactagaagcaacagaaaacacaataagcgcaatggcggcggccgcggcggagcagcaacagttctacctgctcctgggaaacctgctcagccccgacaatgtggtccggaaacaggcagaggaaacctatgagaatatcccaggccagtcaaagatcacattcctcttacaagccatcagaaatacaacagctgctgaagaggctagacaaatggccgccgttctcctaagacgtctcttg

SEQ ID NO: 3706 - DNA, 4246 bp, Homo sapiens
  source 1..4246: mol_type = genomic DNA
gatgagattgatgattctttctcctggaaaacctttcatcacagagattcatctcagcattaaagggcagtatttaaagtcagttggcaagcagtggaataagatttttgtaaagaaaccttgtgcagcatggattctctaccagatgaattttttgtgaggcatcctgctgtggaggatcagaggaaggaagaaactgagaataagctagaaaaatcatctggtcaactgaacaaacaggaaaatgacatacctactgatcttgtccctgttaacctactattagaagtgaagaagttattaaatgcaattaatactctaccaaaaggtgtggttcctcacattaagaagttcttacaagaagatttttccttccaaactatgcagagagaagttgcagctaacagccagaatggtgaggaaattgttcctgctttgactttacgtttcttgattacacagctagaagcagcacttaggaacattcaagctggcaattataccgcacaccagattaatattggttattatttgacattactgtttttatatggagtagcactcactgaaagaggaaagaaagaggattatacagaagctgagaataaatttctggtgatgaagatgatgatccaagaaaatgaaatttgtgaaaactttatgtctttagtttattttggacgtggtttactgcgatgtgctcaaaagagatataatggaggactgctagaatttcataaaagcttacaagaaattggagacaaaaatgaccattggtttgacatagatcctacagaagatgaagatttacctacaacttttaaagatcttcttaataattttatcaagacaactgaaagcaatataatgaagcagacgatttgtagttacctagattgtgaacgatcttgtgaagctgacattttgaagaacaccagttataagggattttttcagttaatgtgcagtaaaagttgctgtgtttatttccataaaatttgctggaaaaagttcaagaatttaaagtatccaggtgaaaatgatcagagttttagtgggaaaaaatgtttgaaggaaggatgtacaggtgacatggtaaggatgctgcaatgtgatgtacctggaattgttaaaattttgtttgaagttgtgagaaaggatgaatatatcaccattgaaaatttaggagcaagttatagaaagttgatatctctgaaaataactgatactgatataagaccgaagatcagtttaaaatttaatacaaaagatgaaatgcctatcttcaagcttgattataattatttctatcatctgcttcatataattattatttctggtactgacattgttcgacaaatatttgatgaggctatgccacctcctcttttgaaaaaagagcttcttatacacaagaatgtgctggaatcctactacaaccatctttggaccaatcatcctttgggtggatcatggcatctgctttatcctcctaacaaggagttaccgcaatccaaacagtttgacttatgcctcctgttagctcttataaaacatttaaatgtgttccctgcacccaaaaaaggatggaatatggaaccgccatcttctgacatctctaaatctgcagacatcctgagactgtgcaaatacagggatatcctccttagtgagattttgatgaatggtctcactgagtcacagttcaattcaatttggaaaaaagtttcagatattcttctgcgccttgggatgatgcaagaggatattgacaaagtgaaggagaatcccattgagaatatctcccttgattaccatcagctatctgtctacctaggcataccagtaccagaaatcatacagaggatgttatcctgctatcaacaaggaattgctctacagtcaataacaggcagtcagcgtattgaaatagaagagttacagaatgaggaagaagaactaagtccacctctcatggagtacaatataaatgtgaaatcacaccctgagatacagtttgcagaaattaataaagatgggacctcaatacccagtgaatcttcaacagaatctcttaaagatctccaggaagttaagagtaaacaaaggaaaaagaagaagactaagaataaaaagaataaagactcaaaagaagaccaagtcccatatgtggtagaaaaggaagagcagttgaggaaagaacaagcaaatccacactcagtcagtagacttataaaagatgatgcaagtgatgttcaagaggattctgcaatggaagacaagttctatagcctggatgaattgcatattctggacatgatagagcagggctcagctggcaaagtaactacagactatggagaaactgaaaaggaaaggcttgctcgtcaaaggcagctttataaattgcactatcagtgtgaagatttcaaaagacagttgagaacagtgacttttcggtggcaagaaaaccaaatgcagattaaaaagaaagacaaaattatcgcatctcttaatcaacaagttgcttttggaatcaataaggtttccaaattacagcgtcaaatccatgctaaagataatgaaatcaagaaccttaaagagcaactttctatgaaaagatctcagtgggaaatggaaaaacataatctggaaagcacaatgaaaacatacgtaagcaaactgaacgcagaaactagcagagctttaacagccgaggtgtatttcttacagtgtcgtagggattttggtttgcttcatctagagcagactgaaaaggaatgtctcaatcagcttgccagggtgactcacatggcagcaagcaacctagaatcacttcaattaaaggctgcggtagacagttggaatgccattgtggcagatgttagaaacaagattgcattcctcaggacacagtacaatgaacaaataaacaaagtcaagcaaggatttgccttgagtaccttgcctccagtccagcttcctcctccaccacccagtcctgagatactgatgcagcagttcttaggaagacctcttgtgaaagaatctttctttagacccatacttactgttcctcaaatgcctgcagtttgcccgggagtcgtctctgcaactggccaacctagagcccccctgatgactggcatagcctgggctctgccagcgcctgtgggagacgctgtgcctcccagtgcaggtctgcggagtgatccctccatcatgaattgggagagaattacagacaggctgaaaactgcctttccacagcaaaccagaaaggaacttacagatttcttacggaaattgaaggatgcttatggaaaatccttgtctgaactgacatttgatgaaattgtttgcaagatttcccagtttattgaccccaaaaagtctcagagtcaaggaaaatcagtgtcaaatgttaattgtgtttcacctagtcattctccatcacagcctgatgctgcccagcccccaaaaccagcctggaggccactcacttcacagggtcctgccacatgggaaggagccagtaatccagatgaggaagaggaagaagaagagccttgtgtgatctgtcatgagaatctgtctccagaaaatctttcagttttgccttgcgctcacaaattccatgctcagtgcattagaccatggttgatgcaacaggggacatgtccaacgtgcagactccacgttttgctaccagaagaattccctggtcaccccagccggcagttgcccaagatctgatacaaggtcggggtgtctatgcaaaggaagctcagttttcttttattatgagctgcttgtttgagtggtgtaaaactatgtgctcttcaatatagtgctaaagaagccagctaattttatcaaagcagcagccaaagaagtcaggacaaatcttcaggacttgtgaaatgaactgaaagagcttgaagcagatggaattttaatagttacactatatatgctcttagtaggtttttttcttgtagtggaaacataactgttagcatatttcttaggatgttttttcttgtctttttaaattcttatttcactcatcctttactctcccctcaagtattctacactttaatttcctgaaataaatttaaggaaaagggaaatagtaaagaagtaggaatgggtgcagcacaccagcatggcacatgaatacacatgtaactaacctgcacattgtgcacatgtaccctaaaacttaaagtataataataat

SEQ ID NO: 3707 - DNA, 2730 bp, Homo sapiens
  source 1..2730: mol_type = genomic DNA
cttttaggagagcactgctgcagccggcagtggagagcctgggcagggagacagggagaaaactccggcagcagggtggtctctagggctgacctcggagcctggggacaggggagcctatgccgcactgaaggcgggacgctactcgtttgtgaacagccaggagtggacgctgagccgctccgtaccggagcttaaagtgggcatagtggggaacctgtctagcgggaagtcagccctggtgcaccgctatctgacggggacctatgtccaggaggagtcccctgaaggggggcggtttaagaaggagattgtggtggatggccagagttacctgctgctgatccgagatgaaggaggcccccctgagctccagtttgctgcctgggtggatgcagtggtgtttgtgttcagcctggaggatgaaatcagtttccagacggtgtacaactacttcctgcgtctctgcagcttccgcaacgccagcgaggtgcccatggtgcttgtgggcacgcaggatgccatcagcgctgcgaatccccgggttatcgacgacagcagagcccgcaagctctccacagatctgaagcggtgcacctactatgagacgtgcgcgacctacgggctcaatgtggagcgtgtcttccaggacgtggcccagaaggtagtggccttgcgaaagaagcagcaactggccatcgggccctgcaagtcactgcccaactcgcccagccactcggccgtgtccgccgcctccatcccggccgtgcacatcaaccaggccacgaatggcggcggcagcgccttcagcgactactcgtcctcagtcccctccacccccagcatcagccagcgggagctgcgcatcgagaccatcgctgcctcctccacccccacacccatccgaaagcagtccaagcggcgctccaacatcttcacgtctcggaagggtgctgacctggaccgggagaagaaggctgccgagtgcaaggtggacagcatcgggagcggccgcgccatccccatcaagcaggggatcctgctaaagcggagcggcaagtccctgaacaaggagtggaagaagaagtatgtgacgctctgtgacaacgggctgctcacctatcaccccagcctgcatgattacatgcagaacatccacggcaaggagattgacctgctgcggacaacggtgaaagtgccagggaagcgcctgccccgagccacacctgccacagccccgggcaccagcccccgtgccaacgggctgtccgtggagcggagtaacacacagctgggtgggggcacagaggcagaggagtcgtttgaatttgtggtggtgtccctcactgggcagacgtggcacttcgaggcttcaacggcggaggagcgggagctgtgggttcagagtgtgcaggcccagatccttgccagcctgcaaggctgccgcagtgccaaggacaagactcgactggggaaccagaacgcagctctggctgtgcaggccgtccgcaccgtccgcggcaacagcttttgtatcgactgcgatgcacccaatccagactgggccagcctgaacctgggtgccctgatgtgcattgagtgctcaggcatccaccgacacctgggggctcacctgtcccgggtgcgctcccttgacctcgatgactggccgcctgagctgctggctgtcatgactgccatgggcaatgccctcgccaacagcgtctgggagggggccttgggtggctactccaagccagggcctgatgcctgcagagaggagaaggaacgctggatacgggccaagtatgaacagaagctcttcctggccccactgccaagctcagatgtgccactggggcagcagctgctccgggccgtggtggaagatgacctgcggctgttggtgatgctcctggcacatggctccaaagaggaggtgaatgagacctatggggacggggacgggcggacggctctacatctctccagtgccatggccaacgttgtcttcacgcagctgctcatctggtacggggtggacgtgaggagccgggacgcccggggcctgactccactggcatatgctcgccgggccggcagccaggagtgtgcagacatcttgatccagcatggctgccctggggagggctgtggcttagcgcctacccccaacagagagcctgccaatggcaccaacccctctgctgagctgcaccgtagtcctagcctcctataaggcccaggaagagggcagaggggccagaaggactccatggcccaaagaccctcctccctgcaggcactgtgggaacagacacagagatggagaagcagggacatgctgagaggacgaagccaaggaaattagggaggagagtcaaagggatcaaggagagttggggatttgagctgcagcagagagggatgagggatttagccctctgccctaaggtgccattgaaaagggacaggacccttcggaggtgcctgtgaggagaggggagcaggacctctccctcctccagatccctgcctcctagtgccagcccctcacacgccttcatcctgaaacaggaagaggacggcaccaagttgggggtgctggatgaaagagacgaggggtgatctgtgagtcccatgtaaactttgtacattggaatatttatgtttgtgtacatatttgatgtgtgtgtgtatgatgagccaataaaccagactgtgtgcgtg

SEQ ID NO: 3708 - DNA, 1915 bp, Homo sapiens
  source 1..1915: mol_type = genomic DNA
atcagaaaagggagctcaggtaccttccagagagtgagacccagcgcccttgtctcgcacccagtaggctttcatccccgccatggcggagctgatccagaagaagctacagggagaagtggagaaatatcaacagctacagaaggacttaagtaaatccatgtcggggaggcagaaacttgaagcacaactaacagaaaataatatcgtgaaagaggaactggccctgctggatgggtccaacgtggtctttaaacttctgggtccggtgctagtcaaacaggagctgggggaggctcgggccacagtagggaagaggctggactatatcacagctgaaatatttctgaggacaatcccagacccaggagatgttccagactcatttttctgatattcagagagggcaagagtcttggcctatgtcacacagcagagtccaggactccagaactccaacctagcactctggccagaaagtcagccagaggaaggaaaactgggaatgaagagtcagaggtgagaagctaaagtcatgatctcaccaagggatcaagaggtcgatattggcggcttgtgacggtaaacacggcaccatcctcctcctcatcccagacggacacaggggcctggaggagcaaggaaggggaagtcagacagttccacaccaccccccattgccctcagccttcaccccaggccctgctcctccctctgtacccctcacctgtggtggcagggcatagtaccagcgagtgcgaggaagggttgggggagctggtgaccccaggtctcccccactggggcccagacagccccaccccagccgcctcagggccccggtggagtcgaaggggctgcagtggaggcgtggatggagtacaggaattctgatcctggagacccccaaagccccttctccccagagctgaacccacacacgacagagaagcagggtacaaagggcaggagagggaagcgagaggcagcaagccagaggcagcgactaggggtagctgaaacctcagtccaggcactgccgcatgccccgcccctcccggccaaggactataccagcccagagaattagtctttttcaggacccctttcaccctggtccctcgggtagcgcctccactatctcagccctaagggacccccgaaggtagcagctccaatcccagtacaggaaggaaaaggggaagtgggatgatagggggttgggggcggtagactcagagagtcacgtggccccagcccctcccccgaccgatcccgaaaaaccagccctgccagtcaacctgccctcacctaggatctggacctaggagtttagggcctcggggccccaaatccaaattctggcccctcctgaggcccgaaatcctgctcctggccaccaccattaatccctaatgaaaacagatgaccactctctacccaccctaggatctttcctccaggtcccagaaccgtggcttcccggcctctacccaggaccggggcggggcgggggggcggggggaagggggagagagggaaggaggggtcacgaaatctgagggttccctccccaatcccagagtcagaggagctggttactgtggaaacaaacccctccccgccaaacaaaaacaaggagggagacagggaccaagacacgactgctcagagaggtaggcacactcaggcaggcagaggtggagggccaaagacccgcagggacaggacagccagccagaagttccaggcaggaacagggcaggttcctgcgggcaggtcctgagtcacactgacagagaaccacggagacgccaggactccccgcagcagagaaacgggccgacacccagggaggcgcgagaataactgaggcaaggaggaggagatgtagggacccagagacaagagaaaa

SEQ ID NO: 3709 - DNA, 576 bp, Homo sapiens
  source 1..576: mol_type = genomic DNA
tagcaggaaggttcagggccctgcactgttggggctgctcagacatttgtgcaagggaggtgttttgttttggtgtttccatcacactcacagtgatttctccttttccccctttagtttgaaggatgacctctaggaagaaagtgttgctgaaggttatcatcctgggagattctggagtcgggaagacatcactcatgaaccagtatgtgaataagaaattcagcaatcagtacaaagccacaataggagctgactttctgaccaaggaggtgatggtggatgacaggctagtcacaatgcagatatgggacacagcaggacaggaacggttccagtctctcggtgtggccttctacagaggtgcagactgctgcgttctggtatttgatgtgactgcccccaacacattcaaaaccctagatagctggagagatgagtttctcatccaggccagtccccgagatcctgaaaacttcccatttgttgtgttgggaaacaagattgacctcgaaaacagacaagtggccacaaagcgggcacaggcctggtgctacagcaaaaacaacattccct

SEQ ID NO: 3710 - DNA, 641 bp, Homo sapiens
  source 1..641: mol_type = genomic DNA
gtagttgtatcttaaaggaagagtgaataagagggagaaaatagttacatgtactccctccttacagcctagaaaaaatgacagatctcgtagctgtttgggatgttgctttaagtgacggagtccacaagatcgaatttgaacatgggactacatcaggcaaacgagtagtatatgtagatggaaaggaagagataagaaaagagtggatgttcaaattagtgggcaaagaaacattctatgttggagctgcaaagacaaaagcgaccataaatatagacgctatcagtggttttgcttatgaatatactctggaaattaatgggaaaagtctcaagaagtatatggaggacagatcaaaaaccaccaatacttgggtattacacatggatggtgagaactttagaattgttttggaaaaagatgctatggacgtatggtgcaatggtaaaaaattggagacagcgggtgagtttgtagatgatgggactgaaactcacttcagtatcgggaaccatgactgttacataaaggctgtcagtagtgggaagcggaaagaagggattattcatactctcattgtggataatagagaaatcccagagattgcaagttaatgaattttcatcttaagaagtaaa

SEQ ID NO: 3711 - DNA, 949 bp, Homo sapiens
  source 1..949: mol_type = genomic DNA
ctctgcccgctcggttcctcagctcctcttcgtgtctttcccccgcggtggcgcggccctgcaccccacgcgtttgcggctgcggccggcggccgctctgctgggctccgggcgctgcagctcccggcgggcgtgtgcagcccgcagattcaggacgacccggctgcccggcttagcgcctttggagctccgcgctgaaggggccttgctccgcacaggcacggcacgcaagcttttggggtgcccagtggctctgttttcaagtcacagccggcccgcagggtgcggacctttccacatctcacttgggccgctagaaaatagaagaggcttcgtgacggagttatcagagacattgagaggcaaattcggaaaaaagaaaacattcgtcttttgggagaacagattattttgactgagcaacttgaagcagaaagagagaagatgttattggcaaaaggatctcaaaaatcatgacttgaatgtgaaatatctgttggacagacaacacgagtttgtgtgtgtgtgttgatggagagtagcttagtagtatcttcatctttttttttggtcactgtccttttaaacttgatcaaataaaggacagtgggtcatataagttactgctttcagggtcccttatatctgaataaaggagtgtgggcagacactttttggaagagtctgtctgggtgatcctggtagaagccccattagggtcactgtccagtgcttagggttgttactgagaagcactgccgagcttgtgagaaggaagggatggatagtagcatccacctgagtagtctgatcagtcggcatgatgacgaagccacgagaacatcgacctcagaaggactggaggaaggtgaagtggagggagagacgctcctgatcgtcgaatccgaggatcaggcatcagtggacttatcgcacgaccagagtgggg

SEQ ID NO: 3712 - DNA, 575 bp, Homo sapiens
  source 1..575: mol_type = genomic DNA
gctttcgcttcatcctagaggctaaatgggctcccctggactcgcctggcagaactaaccacctagaagaacgttattgtaagggggaaatgcaaacagggtgaagacaagaggcataggtgatggacactaaaacaaagaccctgccacccaccgggagggaagtgaaatctcacctcaacaagtgagtccgcagagcgagaaccgtgcgacagtgcgtctgccaatacctggaatgtaggtgttcgttgcagtgtggccttcccagccggcctctcagcacacccggccaggcagccagtgttcccagaggacacgctggggccagacgtggaggaccccggccacctcggggagggaaagagaccaagaaaagaacctctgtagccttgcttctgagagtgcaggtttgttacaggcccaacatgtgtagcaccagtgggtgtgacctggaagaaatccccctagatgatgatgacctaaacaccatagaattcaaaatcctcgcctactacaccagacatcatgtcttcaagagcacccctgctctcttctcaccaaagctgctgagaaca

SEQ ID NO: 3713 - DNA, 5030 bp, Homo sapiens
  source 1..5030: mol_type = genomic DNA
gacacactcctctacaacaccagagactcccaaacacaaggccttatattgactcatttcagctcacatcctggcgactctcaagagagaaacctcagagtgactaaaatctccataatgagaagacatgtacattcagtatctattttggcattttccccaatacatctctgctcatctgactcttatcttggcatctgcttcctggtggatctgaactgacccataagccacgcttactagtgattttccagaagatgaatccggcctcggcgccccctccgctcccgccgcctgggcagcaagtgatccacgtcacgcaggacctagacacagacctcgaagccctcttcaactctgtcatgaatccgaagcctagctcgtggcggaagaagatcctgccggagtctttctttaaggagcctgattcgggctcgcactcgcgccagtccagcaccgactcgtcgggcggccacccggggcctcgactggctgggggtgcccagcatgtccgctcgcactcgtcgcccgcgtccctgcagctgggcaccggcgcgggtgctgcgggtagccccgcgcagcagcacgcgcacctccgccagcagtcctacgacgtgaccgacgagctgccactgcccccgggctgggagatgaccttcacggccactggccagaggtacttcctcaatcacatagaaaaaatcaccacatggcaagaccctaggaaggcgatgaatcagcctctgaatcatatgaacctccaccctgccgtcagttccacaccagtgcctcagaggtccatggcagtatcccagccaaatctcgtgatgaatcaccaacaccagcagcagatggcccccagtaccctgagccagcagaaccaccccactcagaacccacccgcagggctcatgagtatgcccaatgcgctgaccactcagcagcagcagcagcagaaactgcggcttcagagaatccagatggagagagaaaggattcgaatgcgccaagaggagctcatgaggcaggaagctgccctctgtcgacagctccccatggaagctgagactcttgccccagttcaggctgctgtcaacccacccacgatgaccccagacatgagatccatcactaataatagctcagatcctttcctcaatggagggccatatcattcgagggagcagagcactgacagtggcctggggttagggtgctacagtgtccccacaactccggaggacttcctcagcaatgtggatgagatggatacaggagaaaacgcaggacaaacacccatgaacatcaatccccaacagacccgtttccctgatttccttgactgtcttccaggaacaaacgttgacttaggaactttggaatctgaagacctgatccccctcttcaatgatgtagagtctgctctgaacaaaagtgagccctttctaacctggctgtaatcactaccattgtaacttggatgtagccatgaccttacatttcctgggcctcttggaaaaagtgatggagcagagcaagtctgcaggtgcaccacttcccgcctccatgactcgtgctccctcctttttatgttgccagtttaatcattgcctggttttgattgagagtaacttaagttaaacataaataaatattctattttcattttctgcaagcctgcgttcttgtgacagattatacagaattgtgtctgcaggattgattatgcagaatacttttctctttcttctctgctgccccatggctaagctttatgggtgttaattgaaatttatacaccaattgattttaaaccataaaaagctgaccacaggcagttacttctgagggcatcttggtccaggaaatgtgcacaaaattcgacctgatttacagtttcaaaaactgtattgatgacagtagtaccaaatgctttaaaaactatttaacttgagctttaaaaatcattgtatggatagtaaaattctactgtatggaatacaatgtaattttgaatccatgctggctctgatggctcttattagtctgtatttataaaggcacacagtcctattgtagcttatctttcgttattttactgcagagcatctagacaacttagtccctccagcgggaaagtagcagcagcagcattagtcacaggtcttacactacagatcttgtgaaagagaccagtttggtactaattatgagcattttattcaaacaaaagtttttgaaatattacaactggggatttaaaaaattgcagcttagaatctgatggtttttttttttcttgatgttgtttgtttgtttttgagatcgagttttgctcttgttgtccaggctggaatgcaatggcacaatctcggctcactgcaacctctgccttctgggttcaagcgattctcctgccttagcctcccgagtagctgggattacaggcacctgccaccacgtccggctaattttttgtattttgagtagagacggggtttcaccataatggtcaggctgttctcaaactcctgatctcaggtgatccacccatctcggcctcccaaagtgctgggattactggcgtgagccaccgcacccggccttgatgtttattttataaagcactgtaattttgtagctgatgacaaaaggcagccaaatgtttttgataaatcagtggcaactgtatttttgtcttttgaaataactctgaaaacatcaggacaacatagatttcaacctgatagcacaccacacacagtgagctgttgctttttaaattctgaagccttgtcaggtttgcttcctagatttcaagtgtttaaaataattctatctatgaaactgaaggatgaagcagatctctgactgacatgtaaaaaaaaatgccctttgagggtgtatggtggagataaatgtttctgaattcagtaaaattgattcctaagtatattatcctaatcctgtttgctacagttggtataaaaaggcatgaaatatgtattcaatacctcttatgtaaccaaaaccatttttaattagcttttaaggactgagagagcatcatgttcaactggcatgcagtctgcctgcattgccaatgaagtcctcaactgtttaatattttgaactaatattatttataatctatgaatttaatcttttttgaaagactttaataatttgagtctctgagaggatactttcaatttccatgggggacttatttgttggggatcttaaataagattccttttgatctaccggaatatacatgtacagagtacattggatcatgttggaaagaaggcaagtgaaaaggtcagagatgaagtagcaaagttatggaatatcgtggaaaggatactagttgtgaaatggaaagagacaagttatagtaccccaaaagcaaaacaagcaggagatgcaagagatgccccaaaaggacaaagcaacaattttctgttgccacctttataccggaagactctgttgtagaagaaaagaaggctttggtgcaccttatgtgggaggaggaggggcagggcatgctgatgctgagcgtacaggcagacaagagcgtagcctgctgttgcctccatcactatgaaatgacttattttacctgaaggacccatggtttatgttcctctaattcctttcactctccctaagccctctgagagagatgaagatagatgattttattgctactaaattgaagggagcactatttctttttgtcttttgttagcaaaaaattgcaaaaagaattgtacattcttgctaaaaataaataaataaataaaaaattaaaaaaacaagggacctaacaaaactcagcagtgttactgtatttttaaaaaatatttttatagactcattttcaggttattaaatgtaagagaaacagatacccctcttttttaaagtaggtaaatcattgatgatttatattaccaatttttagaagtaattttctagtaagcttgtggcatcagaaaatactagaagatttttttagttaaattagttagaacatttatgaatgaatataataaatattttttcagaataaaatatggaccctttgtgtttactaatagataaagccagatataattttttgtttttaaggccacaaaatatggcctttgttaaagaacactaaagttagaaatctaaagttagagcaactttttaatggctatttcctattattgtaagtgttaaaacccctgcagaattcttgataaggtgctatttatactatatttcttattataagataactgtctttagtcttcttagtactagtctttttagtactaaatcaatcagtaaacatcatcatttcaccccaaaattttgtcacagaaaaggcgtatcaaatgaaaaataatttcagagatctttctttcaagatattttttcctgataaaatacattgtcttgaagtaaatacattgtcaaaacctaattgcaattctgttaaatctaagtaatttttagacagtgtttcaccgtattatttaggatgtgaaatgccatttctttcactgattacaccatatacaggaaacaggtaaaacagtgaaaactttattgtgctggttgatgccaacttggttgaaaagctctctgcagaagaagtgatctagactgacagaagtgttgctaattacaagttgtgttctcatgacgtaattagaaagtaacttctcaaagtacaacttttatgaaaaaaataagctgttaaaaaaaggaaatcgtaggttaatttaattgggaaaatgggcaattgacagagaccattttcctaacacatatatgtgctagtactttaactttttaaaattttacttctacgttttgtaatataaaaatttctattttaagtttagaatgttatacgtaccgaaagtatgcagccaaatcgatcagatcaaaccattttacctggagtttggtactggtttttacttctctgaatctgtataagaaaaataaagacaattgaacttcca

SEQ ID NO: 3714 - DNA, 849 bp, Homo sapiens
  source 1..849: mol_type = genomic DNA
attttaggcgccattttcgagtgaaggacccggagccgaaacaccggtaggagcggggaggtgggtactacacaaccgtctccagccttggtctgagtggactgtcctgcaggcacgtctagattttcccacttacataggtcttgttaagaaaccagtcctgccttcttgccactcgtgtctttcgatggctcccttcccgaagtcccgctgcctctaagcggagtgttaagcggggctctcggaagccggtggaccgagatttccccgggtggggcgggcgcggtgtagcggcccgcgggctgacttgctcccggctgtcccccggccccagcgaccatgccccgtaaaggcacccagccctccactgcccggcgcagagaggaagggccgccgccgccgtcccctgacggcgccagcagcgacgcggagcctgagccgccgtccggccgcacggagagcccagccaccgccgcagagactgcaagtgaggaacttgataatagaagtttagaagagattttgaacagcattcctcctcccccgcctccagcaatgaccaatgaagctggagctcctcggcttatgataactcatattgtaaaccagaacttcaaatcctatgctggggagaaaattctgggacctttccataagcgcttttcctgtattatcgggccaaatggcagtggcaaatccaatgttattgattctatgctttttgtgtttggctatcgagcacaaaaaataagatctaaaaaactctcagtattaatacataattctgatgaacacaaggacattcagagttgtacagtagaagttcattttcaaaagataattgataag

SEQ ID NO: 3715 - DNA, 623 bp, Homo sapiens
  source 1..623: mol_type = genomic DNA
gggggcgactttgtggggagcctagctgctgctgggcgtttaccgcgggagcccttagcggtctggagcttatgtggagaagtcgctgtgaagccacctataaatccatttactgaatttatggagaaggctgtaaatgatggaagtcattcagaagaactcttttgccatcttaaaactatatcagagaaagaagatttaccacggtgtaccagtgaaagtcatctcagctgcctgaagcaggacattctaaatgaaaagactgaattggaagcaacacttaaggaagcggagttggtaactcattctgtagaattgcttttgccactatttaaggacaccattgaaaagattaattttgaaaatgcgaatctttctgcattgaatttgaagatttctgaacagaaggaaatattaataaaagaattagacaccttcaaaagtgtaaaactagctttagaacatcttcttagaaagagagactacaaacaaacaggagacaatttatccagcatgttgctagaaaatctaactgataatgaaagtgaaaatactaatcttaagaagaaggtatttgaaaaggaggcccatatccaagaactttcttgtttgtttcagagtga

SEQ ID NO: 3716 - DNA, 3296 bp, Homo sapiens
  source 1..3296: mol_type = genomic DNA
gagcaactgccggcctccgcccccagccgcagccggtcactggcggcgccttccgcgccaagcttgggggccttttcggggtcctacatggcacggcttccgacccccggcccgggacggggctcgcaggccccagaggggcaggctggagaaggaggaggttaggtgtcttcaggagggttgctgagcccaaggacgcgccatcgccgcggagaaggagccggaccccttgggcggagcgcccaatgtgtggtccctcacgccgtcccgcaccttgctttttagggttctttttccgctttctgagcccttttataccttacgtttagaaggggaaaatcatcctcccacaccttctccccgactttttgccttttttgtcttgaagttacccaaaggtctgtgtattgttctcagtggtcccaagaattactcgaatatagttgtttttctgagggaggatggatggagataactatcctgatcccagtgtcactttttaaggcattcgcttcaagagacaagcagtttagaatcaggcagaactggattgcaaaatttatgggcagaccggaaaatgtctaatcaacaggagaagtatgaagctcagaatatagtcaattcaacagaagagagtgatgatgcttttgatactgtcactattccagttccctcagaagagcctcaagagtcagatcaaactgaagagcatgaatctggaatagaacaattcagtgagagccatgcaatacatgttgaggagcagagtgaccaaagcttttcaagcctggaaccagacaatgaacaactcatggaagaggttatatcaccaagacaagtttcatatactccgcaacatcatgaaaagcaatatgcaatgcagaggccaaatgatgatagtttggcatttctggataaaataaagtctgtaaaggaatctttgcaagaatcagtggaagattctctagcaacagtaaaagttgtacttattccagtgggccaggaaattgtaataccttttaaggttgataccattcttaaatatcttaaggaccatttttcacacttattaggtatcccacattctgtactgcagataagatactcaggaaaaattcttaaaaataatgagactctagtacaacatggagttaagccacaggaaattgtacaagtggaaatcttttctacaaatccagatctgtatccagtcagaagaatagatggattaactgatgtctctcaaatcataactgtcactgtccaaactggacttgatcaataccagcaggtacctgttgagattgtcaaatctgactttcacaaaccatttcttggtggattcagacataaagtaacaggagtagagtatcacaatgctggaacacaaactgtacctaaaaggattcccgaaagactcagtatattttgtagggatacgcagacagtttttcagaaaaaaaatctccaacaaactacaaatacaacatccacacagatgactaacattggtgtatatgtatcaaatatgactgataaactggtaacaccaggaaagtatttttcagcagcagaataccatgctcaaagactaaaggcggtgatagtgatacagacttactacaggcaatggcatgctaaaatcttcgtagagaatttaagaagacagaaaagcttaagactggaatgggaaacacagcaagaactaaggaagataagagaaaaagaagaatggataaaattggactatcaccggaggcataatcctaaaacaaatgaagattttgaatttctttataatgcattagaattctggcggcaagaagaacttacacgtattaaccaatcttttactggagctgaaaggaaagctgctctgtgtgaacttctggaaaaagagactcagataattgcttccattgggagacatagatacattgcttatatggcaaatcaggaagcagcaatacaagcttttttggataagtgttcagctccaaaaatatggagaacccctaatggcaaaacaattgagatggatacgcagttcaccatcagagccagagagctgcaaaatatctataagtgcattatgctgaaaaatatctcccaagatgagaggctggatgtgctgttaactcttaaacacactgtaaaggaacatgaatgtaaactaactcaggaaattctagaattgattgacagagaggttgaccttatgatgagaggagtcaaacatcataaccttgaaggactcagaaaaagaattgcgacactcttttttcattatatcaaaacacctctgtttaatcctgaagttgcaaaataccttaaggtccctcaagacccattgaaattttataagaagatttacttttgccacagttgccagctttatttgccttctacagaattttctgtatcatccacctcacgccgcatataccggtgtcgtaactgcattaaccttcagaatgaggctcaaaaacgagaatcatttttgaagtacaaatgtttacttcaacagctctactatacagaagctgattatgaagatgattctaaaattgctttcttgatgcagctacaagacattcagtacctgacagagaacatctgggcgtcccagtcagtcctcagtgcttgcgacaatctcagtgatctggtcatggtcagatggaataaatccctggagtggtccccctggaactgcattcttcttaccaaagatgaagcagctgctcatctcaagctaacaagtattgaagagggatatgaacgctcatttattcacaagatcaaacacaaacatatcctggctaagaactatttttctcaggttccagtgctggcttcatttatacttgatgatggtgaaattgatgagatcagatggaagtatcactcagacacaacacctaagattatagaatcccagaggcctcctcattaggtgatccaggagtatttgtttgatgatcggcattttgttcactgctaatagggtaatacagaggtcacagagtatggaaatggaatttaatctgtttattgattttgttttttgtttttcatagtattttgagttatataaagagaaaacatttctatataagtaagtattctttgttaggaagttggtgctaaattgaaatgcaattttgttactgaaattaatattttggggtaaagaaaacattttaaaatgtgttttcacattaaattttttaaattttttcaagtatattagagttaaaatctaacaaacagccaaataaaaactagacaactttcaa

SEQ ID NO: 3717 - DNA, 2291 bp, Homo sapiens
  source 1..2291: mol_type = genomic DNA
aaaaggggcgggcgagcacggcccgcgggcggcgttcgctggagctggtggaccgggcggctgaccgaggggcggacgcgcggcggggcagaccgctggggactgcgggcggcgctgtgtccgtcgccatgacagatcagacctattgtgaccgcctggtgcaggacacgcctttcctgacaggccatgggcgcttgagtgagcagcaggtggacaggatcatcctccagctgaaccgttactacccacagatccttaccaacaaggaggcggaaaagttccggaaccccaaggcatccttgcgtgtgcggctctgtgacctcctgagccacctgcagcggagcggtgagcgggactgccaggagttctaccgagccctgtatatccatgcccagcccctgcacagccgcctgcccagccgccacgctctgcgtaagttccacatcaccaaccatgcatgcttggtgctggcccggggagggcaccccagcctgccgttgatggcatggatgtcctccatgaccacccaagtctgctgcagcccaggcctggcatcccctctcgcctcagcccctccccagaggccaccctctggccccgaggggagagtgtggcaggcacaggcagtgcagatgttggtctctgtctcccactttctcccccttcctccgtctctctctcatggcagttttcacacagcatggggcatcttatacgtccactcttgcccttccttttctaacctcattccacggggatcccttcatgtctgtgtggacagcaaccttgttcccacagctgcatggcgctcctaggcggtcccagctggaattacccaaccccatgacggaccctttcattgcagcgatctgcacacgtgtgggtgtttccataggacattgtcaggcacggatggctggtccgaagcacgtgcatttcagttttgaggctcctgtcctcaggcagtgtggactcaggccctgggagtcatgtggatgccagtagcctgggcccacagagctgctgggatgtggggggcatatcaagttgaagatggcaactctgatctgacgcctctgtgctcagggcccctggaggaggggctactgccccttggcccttagacaacaggacagagaccagagggactgggcggcttgtcccaggctactgggctgtggtctctgaccccctggaggcctccccacgcctcacagaacacagtgcagacggtgggcggggagagctcgaggggaggcccagccctgcaggtgggactggctctccctccccagccacgagtatgccacagggggctttcaaaaccaggcagggccaagccttggccccactggaggtagagcaccttctgtggctcccgggtgcctttaggcccgtccaggagttggagcagaggagaagacccagactgtgcatagttccctgaggagggctagcctcaggtgccacagcctggttcggcctggcggccccaggaggcagcagcaaccttgggcttcctgcggggtgactaccttgccctccggccctgcccgttgactaactatgctctgtggttttgtttccagagaactcagattgcacagagctagactcgggcagccagagcggcgagctgagtaacaggggtaacacctccctgctgcccctccctctctctccctctctctccctctctctttaccctccccagggctccatctccgcctcaggggcttctccaccccaagtctggctccattcctggccttctgttggtgacagaccccccccctaaggtgctcgtttgggggctcttcaggcagcacctcagcctggcacccccactcccctgcgcagcccccaggcctcaggaccccacccctctgaggcccaggggagccctgttcacgctggtttctccccaggacccatgagcttcctggctggcctgggccttgctgtgggactggccctgctcctgtactgctatccgccagaccccaagggcctgccagggacccggcgcgtcctcggtttctcgcctgtcatcatcgacagacatgtcagccgctacctgctggccttcctggcagatgacctaggggggctctgacagaccctggacccagggcctcacctgccactcaaccaaagagtcctcgagccggcccgccaaggggactgctgcttctttttctaaatgcatatttttcattatttataatttgtgtaaaaaacacaccttcaccttacaaggtgctgaccatattaaatgttcaggttctctc

SEQ ID NO: 3718 - DNA, 2390 bp, Homo sapiens
  source 1..2390: mol_type = genomic DNA
aattgtaaatatctttaatgcttggaggttaagagaaacttgaactttgtagtaatggagattaaagctattctcaagattaggtatacctattcaataaaagaaaggaatatttgggagtattggggataagagaagctagacattgtgaattcaaggaaaaagaattatgagaggaggatgcattttagtttattttgtgattaaaatttttttagtttttgttgttttgacatgtgacactgtaattttggctataataaatgacagaatgtatcatttggtatattggttagggtttaggtagaaaattttttcctttatatagtgagtggtagcgtatacaatgtttgctcacttcggcaaagagtagctttagttttctgattagttataatagtgatgcttcccatcatttgatatgccttaaagtagtattttactcttgaggtattcctttaatccttaggtcttggagtactttatagatggtcattattttttatgattcctctgaaactaaaggcagagaatcacccaagcattacaaaaatgttgagcaaaataaaaattaaagcttggttcctgaacattatctgttttctggtaccacttaagaagtttcaaaggatgagaagactaagactaataactatttttttcttcatcttttctttcagtggcaggatgtggaaattgattttttttttattttcaccttaactgaatacttacttaattcttttgtttaaattgcagaatgccgggtctaagttgtagattttatcaacacaaatttcctgaggtggaagatgtagtgatggtgaatgtcagatccattgctgaaatgggggcttatgtcagcttgctggaatacaacaacattgaaggcatgattcttcttagtgaattatccagaaggcgtatccgttctatcaacaaactcatccgaattggcaggaatgagtgtgtggttgtcattagggtggacaaagaaaaaggatatattgatttgtcaaaaagaagagtttctccagaggaagcaatcaaatgtgaagacaaattcacaaaatccaaaactgtttatagcattcttcgtcatgttgctgaggtgttagaatacaccaaggatgagcagctggaaagcctattccagaggactgcctgggtctttgatgacaagtacaagagacctggatatggtgcctatgatgcatttaagcatgcagtctcagacccatctattttggatagtttagatttgaatgaagatgaacgggaagtactcattaataatattaataggcgcttgaccccacaggctgtcaaaattcgagcagatattgaagtggcttgttatggttatgaaggcattgatgctgtaaaagaagccctaagagcaggtttgaattgttctacagaaaacatgcccattaagattaatctaatagctcctcctcggtatgtaatgactacgacaaccctggagagaacagaaggcctttctgtcctcagtcaagctatggctgttatcaaagagaagattgaggaaaagaggggtgtgttcaatgttcaaatggagcccaaagtggtcacagatacagatgagactgaacttgcgaggcagatggagaggcttgaaagagaaaatgccgaagtggatggagatgatgatgcagaagaaatggaagccaaagctgaagattaactttgtgggaaacagagtccaatttaaggaacacagagcagcgcttcctggctgtaaatcctagacttgaaagttttccagtattgaaaacttcaaagctgaatattttttatttctaagtatttaaatgttctaacagatcagaacatgaaatgccctcctaaatgtcagctgttgtcacacagtagctccaacactttgagcatttttaagggagtggcctcatttcactagagacaaatctttaagaatagttctaaaattgggcttgtgatttccatttctgatgtctccagattggcacccctttctagttcaatgcctcacgagatttgccaggggcatccaaggcaaacaatcccaatctttctatataaaatgtattcaagcaaacatcaaataaatttctgggatatttaactataggcttcttccttcttgtcaccagttaaaagcattttaatactaagaccctaattcttttatctttattttagtcttgatgtggaactgtaggagcaggtgaataaaggatctctataacagatcctttcaaaagaagagttttagagaaaataaatttaactttaaccacagtgaaagttgacccttagcgggacaaagccttaaaatgcattgaaagaattagatcggttctgtgccttttatctatttgagattg

SEQ ID NO: 3719 - DNA, 1603 bp, Homo sapiens
  source 1..1603: mol_type = genomic DNA
agtccgggagctgctgcggccgcgctgtctgcttctcctgcgcctccttttcgcccagcactagcgccttaggccagctcgggggatgtgagagccgaagcccttagactgccaggcacagagtcgggtcgggatttgtcagccaagcctcggctccagctccgcaatctcgggactcacccgagcgacccaggcccgacggcaaatgaatccggcctcggcgccccctccgctcccgccgcctgggcagcaagtgatccacgtcacgcaggacctagacacagacctcgaagccctcttcaactctgtcatgaatccgaagcctagctcgtggcggaagaagatcctgccggagtctttctttaaggagcctgattcgggctcgcactcgcgccagtccagcaccgactcgtcgggcggccacccggggcctcgactggctgggggtgcccagcatgtccgctcgcactcgtcgcccgcgtccctgcagctgggcaccggcgcgggtgctgcgggtagccccgcgcagcagcacgcgcacctccgccagcagtcctacgacgtgaccgacgagctgccactgcccccgggctgggagatgaccttcacggccactggccagaggtacttcctcaatcacatagaaaaaatcaccacatggcaagaccctaggaaggcgatgaatcagcctctgaatcatatgaacctccaccctgccgtcagttccacaccagtgcctcagaggtccatggcagtatcccagccaaatctcgtgatgaatcaccaacaccagcagcagatggcccccagtaccctgagccagcagaaccaccccactcagaacccacccgcagggctcatgagtatgcccaatgcgctgaccactcagcagcagcagcagcagaaactgcggcttcagagaatccagatggagagagaaaggattcgaatgcgccaagaggagctcatgaggcaggaagctgccctctgtcgacagctccccatggaagctgagactcttgccccagttcaggctgctgtcaacccacccacgatgaccccagacatgagatccatcactaataatagctcagatcctttcctcaatggagggccatatcattcgagggagcagagcactgacagtggcctggggttagggtgctacagtgtccccacaactccggaggacttcctcagcaatgtggatgagatggatacaggagaaaacgcaggacaaacacccatgaacatcaatccccaacagacccgtttccctgatttccttgactgtcttccaggaacaaacgttgacttaggaactttggaatctgaagacctgatccccctcttcaatgatgtagagtctgctctgaacaaaagtgagccctttctaacctggctgtaatcactaccattgtaacttggatgtagccatgaccttacatttcctgggcctcttggaaaaagtgatggagcagagcaagtctgcaggtgcaccacttcccgcctccatgactcgtgctccctcctttttatgttgccagtttaatcattgcctggttttgattgagagtaacttaagttaaacataaataaatat

SEQ ID NO: 3720 - DNA, 613 bp, Homo sapiens
  source 1..613: mol_type = genomic DNA
ggacccgccctcaagttctggacaccccgggtgaagactgttaacgcggcggggattgggcgcctgcggcagcttgtgggcggtacccgagggagagttcgagtttttattggtgtggaaattaaaagaacacacatattttgactggggctttgatcaaccaaatgctaaaaagccacataaagaagatccctaatagtcatttctcaacaattatatagtcaactgatgtaacaatggtactaatattgggacgcagactaaacagagaggatcttggggtgcgtgattccccagcaactaagcgaaaagtttttgaaatggaccccaaatctctgacaggtcatgagttttttgacttctcttcaggatcatcccatgccgaaaacatactccagatatttaatgaatttcgtgatagccgcttattcacagatgttatcatttgtgtggaaggaaaagaatttccttgccatagagctgtgctctcagcctgtagcagctacttcagagctatgttttgtaatgaccacagggaaagccgagaaatgttggttgagatcaatggtattttagctgaagctatggaatgttttttgcagtatgtttatac

SEQ ID NO: 3721 - DNA, 1915 bp, Homo sapiens; identical to SEQ ID NO: 3708
  source 1..1915: mol_type = genomic DNA

SEQ ID NO: 3722 - DNA, 574 bp, Homo sapiens
  source 1..574: mol_type = genomic DNA
gttgtgagctgcggcagagactggtggctggaggagacgccggcgctggagagtgcgctgcgccgcccgccgctgagggaccgcggggttagccactgctggctgcttccagtgttcgccgagaggaagcccgggggagtgcgaccgcctcaaatccagccttcttgtttggtgggacgaccgtcggttctgtccgggaggaatgacggggtcaaggtgtggaaattaaaagaacacacatattttgactggggctttgatcaaccaaatgctaaaaagccacataaagaagatccctaatagtcatttctcaacaattatatagtcaactgatgtaacaatggtactaatattgggacgcagactaaacagagaggatcttggggtgcgtgattccccagcaactaagcgaaaagtttttgaaatggaccccaaatctctgacaggtcatgagttttttgacttctcttcaggatcatcccatgccgaaaacatactccagatatttaatgaatttcgtgatagccgcttattcacagatgttatcatttgtgtggaaggaaaagaatttcct

SEQ ID NO: 3723 - DNA, 2068 bp, Homo sapiens
  source 1..2068: mol_type = genomic DNA
agcggcgcggagactgcggggcgggccatggcggcgaacctgagccggaacgggccagcgctgcaagaggcctacgtgcgggtggtcaccgagaagtccccgaccgactgggctctctttacctatgaaggcaacagcaatgacatccgcgtggctggcacaggggagggtggcctggaggagatggtggaggagctcaacagcgggaaggtgatgtacgccttctgcagagtgaaggaccccaactctggactgcccaaatttgtcctcatcaactggacaggcgagggcgtgaacgatgtgcggaagggagcctgtgccagccacgtcagcaccatggccagcttcctgaagggggcccatgtgaccatcaacgcacgggccgaggaggatgtggagcctgagtgcatcatggagaaggtggccaaggcttcaggtgccaactacagctttcacaaggagagtggccgcttccaggacgtgggaccccaggccccagtgggctctgtgtaccagaagaccaatgccgtgtctgagattaaaagggttggtaaagacagcttctgggccaaagcagagaaggaggaggagaaccgtcggctggaggaaaagcggcgggccgaggaggcacagcggcagctggagcaggagcgccgggagcgtgagctgcgtgaggctgcacgccgggagcagcgctatcaggagcagggtggcgaggccagcccccagagcaggacgtgggagcagcagcaagaagtggtttcaaggaaccgaaatgagcaggggtcaacatgtgcttccctccaggagtctgccgtgcacccgagggagattttcaagcagaaggagagggccatgtccaccacctccatctccagtcctcagcctggcaagctgaggagccccttcctgcagaagcagctcacccaaccagagacccactttggcagagagccagctgctgccatctcaaggcccagggcagatctccctgctgaggagccggcgcccagcactcctccatgtctggtgcaggcagaagaggaggctgtgtatgaggaacctccagagcaggagaccttctacgagcagcccccactggtgcagcagcaaggtgctggctctgagcacattgaccaccacattcagggccaggggctcagtgggcaagggctctgtgcccgtgccctgtacgactaccaggcagccgacgacacagagatctcctttgaccccgagaacctcatcacgggcatcgaggtgatcgacgaaggctggtggcgtggctatgggccggatggccattttggcatgttccctgccaactacgtggagctcattgagtgaggctgagggcacatcttgcccttcccctctcagacatggcttccttattgctggaagaggaggcctgggagttgacattcagcactcttccaggaataggacccccagtgaggatgaggcctcagggctccctccggcttggcagactcagcctgtcaccccaaatgcagcaatggcctggtgattcccacacatccttcctgcatcccccgaccctcccagacagcttggctcttgcccctgacaggatactgagccaagccctgcctgtggccaagccctgagtggccactgccaagctgcggggaagggtcctgagcaggggcatctgggaggctctggctgccttctgcatttatttgccttttttctttttctcttgcttctaaggggtggtggccaccactgtttagaatgacccttgggaacagtgaacgtagagaattgtttttagcagagtttgtgaccaaagtcagagtggatcatggtggtttggcagcagggaatttgtcttgttggagcctgctctgtgctccccactccatttctctgtccctctgcctgggctatgggaagtggggatgcagatggccaagctcccaccctgggtattcaaaaacggcagacacaacatgttcctccacgcggctcactcgatgcctgcaggccccagtgtgtgcctcaactgattctgacttcaggaaaagtaacacagagtggc

SEQ ID NO: 3724 - DNA, 681 bp, Homo sapiens
  source 1..681: mol_type = genomic DNA
aaactcctggtacctaagcaccgatctgccttggagaacctgattctgagactccagcaggatgtcttatcaacagcagcagtgcaagcagccctgccagccacctcctgtgtgccccgcgccaaagtgcccagagccatgtccacccccgaagtgccctgagccctgcccaccatcaaagtgtccacagtcctgcccacctcagcagtgccagcagaaatgtcctcctgtgacaccttccccaccctgccagccaaagtgtccacccaagagcaagtaacagcttcaggattcatcaggagcatgaaaggataaggataattggctcacctcgttccacagctccacctgcatcttctcatcaaagccatccagggatacacagggagcttctttcctcttagcctgtgatcggcctgtgatgatctctgatagcaaaaggttttctttttgaggctgccatactgccactgtccaggtggagactgagcaaaggaagtcctgggctgtgccagctcccagagcttcagaagaaagagcagctctctccctgggaaccattagagaattctgttgatgttttctgtgtctgtctgtcccctgggcatgagcttccaccacctgtgcagttgtcactttcctttcactccctgaataaagaatctatgcatatatatttgt

SEQ ID NO: 3725 - DNA, 2330 bp, Homo sapiens
  source 1..2330: mol_type = genomic DNA
cactgagccgccgccgaggattcagcagcctcccccttgagccccctcgcttcccgacgttccgttcccccctgcccgccttctcccgccaccgccgccgccgccttccgcaggccgtttccaccgaggaaaaggaatcgtatcgtatgtccgctatccagaacctccactctttcgacccctttgctgatgcaagtaagggtgatgacctgcttcctgctggcactgaggattatatccatataagaattcaacagagaaacggcaggaagacccttactactgtccaagggatcgctgatgattacgataaaaagaaactagtgaaggcgtttaagaaaaagtttgcctgcaatggtactgtaattgagcatccggaatatggagaagtaattcagctacagggtgaccaacgcaagaacatatgccagttcctcgtagagattggactggctaaggacgatcagctgaaggttcatgggttttaagtgcttgtggctcactgaagcttaagtgaggatttccttgcaatgagtagaatttcccttctctcccttgtcacaggtttaaaaacctcacagcttgtataatgtaaccatttggggtccgcttttaacttggactagtgtaactccttcatgcaataaactgaaaagagccatgctgtctagtcttgaagtccctcatttaaacagaggtcaagcaataggcgcctggcagtgtcaagcctgaaaccaagcaataccgtcatgtttcagccaagcccagagccctaagattacaaacaactatggccggaacctcctcagctctccctctgcagagttccctaccctaagagaatgttaccacctgaacagtcctcggtgaatctgagaggagaggatggggtaaggcagaagcaccagctgtactactagaagggagcttttggtggtagatcccctggtgtctccaacctgactaggtggacagagctcaaagaggccctcttaccgctagcgaggtgataggacatctggcttgccacaaaggtctgttcgaccagacatatcctagctaagggatgtccaaacatcagaatgtgaggccaaccttctatcagagttaaacttttgacaagggaacaaatctcaaactgatccatcagtcatgtagctagctgtagagcttgcaacttaatagcagcagctgcccaatgccatgtgaagtaacaaactggtttttggtttttttttccccttcagttttaatgttatgtgtaatgtatttaaacccttatttaaataaaacttgttttcagaaatacctgacttgcagattatttatatatagtcgatcttgtgcatataaaggaaccatagaaatgggcagtggaggattcgtccacacccacagcttctcaacgggcctgaatttggccaagaaaaacctttatgagcttgtccctctctggtcaactggttttttgttcgtttgttttttgagacaggtttgcccttgttgcccaggctggagtgcagtggcacaatctcggctcactgcaacctccacctcaggttcaagcaattgtcgtgcctcagcctccctagtagctgggattacaggcaccatgcccagctaacttttgtatttttagtagagacagggtttctccatgttggccaggctggtcttgaacacctggcctcaagtgatctgcctgtcttggcctcccaaagtgctgggattacaggcatgagccaccatgcccagcaggtcaactgtttttgcaagcatttagccagagtcatgctgtgctgttaatcagtgtcctggagaatgggttgcttggaaatcttggcgccccctcagtagtaacagccttggtttaagggcgcagagtggagagtaaatgcaagggctataacaagggcattcatgctgtgggttaagatccacaaatcgctaggaatgtgtatactctgggtagtaagtttgtagtattagaaggtttaatgacaagtatttgaagagctgaagttaagtgttgggaggccatcccttatgaaggacaatgaatggcaagtaaaagaccaagttctgttcctgggtccattaatttagttaaaaaggcaaagttctttcagcacacatatctgcatgcagtcacgtgctgcctaaggatgcttcattcaacaatgagcctcacagccgtgctacacaataagattataatactgtatttttactgtaccttttaacattgtgttacaatggcctacaagaagcttgtgtggatggctttgaatgtggcccaacacgaactaataaattttgctaaaacatga

SEQ ID NO: 3726 - DNA, 2737 bp, Homo sapiens
  source 1..2737: mol_type = genomic DNA
attagctgggtgtggtggcgcgcacctccaccagtagtcccagctacacggaaggctgaggcgggaggatggcttgagcctagaagtgggaaggcagcagtgagccgtaatcgactctgggcgacagagcaagctatctatcgcttaaaaaaaaaaaaaaaaaaaaaaaaaaaaaggtgacttgcacctacggagagcttggagaaaacacggacaagtggaattttcccgcggatcaggagtctaaagaggcagtgtgaaatcgctgttgtgcgcttgcgcgcagtttcccgcatgctcagtagctgaggtagggatgccatccttctcaaaagacttattgacagtgccaaagctcggtactggacacaacgagggacctgggtctacgataacgcgcttttgctcctcctgaagtgtctttggtccaacgttgttccagagtgtaccatggcttccagtaacactgtgttgatgcggttggtagcctccgcatattctattgctcaaaaggcaggaatgatagtcagacgtgttattgctgaaggagacctgggtattgtggagaagacctgtgcaacagacctgcagaccaaagctgaccgattggcacagatgagcatatgttcttcattggcccggaaattccccaaactcacaattataggggaagaggatctgccttctgaggaagtggatcaagagctgattgaagacagtcagtgggaagaaatactgaagcaaccatgcccatcgcagtacagtgctattaaagaagaagatctcgtggtctgggttgatcctctggatggaaccaaggaatataccgaaggtcttcttgacaatgtaacagttcttattggaattgcttatgaaggaaaagccatagcaggagttattaaccagccatattacaactatgaggcaggaccagatgctgtgttggggaggacaatctggggagttttaggtttaggcgcctttgggtttcagctgaaagaagtccctgctgggaaacacattatcacaactactcgatcccatagcaacaagttggttactgactgtgttgctgctatgaaccccgatgctgtgctgcgagtaggaggagcaggaaataagattattcagctgattgaaggcaaagcctctgcttatgtatttgcaagtcctggttgtaagaagtgggatacttgtgctccagaagttattttacatgctgtgggaggcaagttaaccgatatccatgggaatgttcttcagtaccacaaggatgtgaagcatatgaactctgcaggagtcctggccacactgaggaattatgactactatgcaagccgagttccagaatctattaaaaatgcacttgttccttaaaggaaagtttcatttggccgggcgcggtggctcatgcctgtaatcccagcactttgggaggccgaggcaggtggatcacttgagctcaggagtttgagaccagcctgggcaatatcgtgagaccccatctctacaaaaatacaaattaactgggcatcctgtcatgcgcctgtcatcccagctacttgagaggctgaagcagaagaatctcttgagcccggaaggcagaggttgcagtgagctgagatcgtgccactgcactccagcctgagtgacaggagttaagccctgtctcagaaaaaaaaaaaacaaaaacccaaaaagtacttaaagtttcatttacttagctaggagaaagacttggttctcaaaataatacattttaagattaattgggtagaattagagttccacctttattcattgttgagcagtgatttatatttagttattatatttaggaatagaaaatagaattaaataatttaacttgattaatcaaccagaccaattttgacgtctggagaacttataaactcaatatgttatatttgttttcctgtatttaggtggagaaatgagaaaaagctttagttccaattgacagttcaggtcaatgttcaatgaacattcctatcttctaaaccagatttctctttttttttcctgagacggagtctcgctctgtagcctaggctagaatgtagtggcgtgatctcggctcactgcaagctccgcctcccgggttcatgccattctcctgcctcagcctcccgagtagctgggactgcaggcaccgccaccacgcctggctaattttttgtatttttagtagagaaggtgtttcaccgtgttagccaggatggtcttgatctcctgacatcgtgatctgtctgcctcggactcccaaagtgctgggattacaggtgtgagccaccgcacctggcctaaaccagatttctttagggcacaattttttctggaatctcactcttgtttttcacagtaattttaaaaacgtttctactccaattaagaatatatatgatgttattatatatgcttatgaaacagatttatgagaaaagttttttttaaataaattatttaatcctagctctttgttattcaccagctttttaaaaaagtgtttgaaaattatacattctcgactttggggattagtttattcttgtggcatcattataaggcttaattgtggaaagctaagtacttgcttctattccttccaatgagagattataacataaactattaaaattattctgctaatatacctagatttttatttttaggtctctgtccattgcttttaattaaaattatctgttttcaaatc

SEQ ID NO: 3727 - DNA, 3160 bp, Homo sapiens
  source 1..3160: mol_type = genomic DNA
gaggagcgatgggcagaaccagcacttccctcaggcactagacctgtcacgagtgaacttagttccctcctatactccttcactctaccctaagaacacagatctatttgagatgattgagaagatgcagggaagcaggatggatgaacaacgctgctccttcccgccgcccctcaaaacagaggaggactacattccatacccgagcgtgcacgaggtcttggggcgagaaggacccttccccctcatcctgctgccccagtttgggggctactggattgagggcaccaaccacgaaatcaccagcatccccgagacagagccactgcagtcgcccacaaccaaggtgaagctcgagtgcaaccccacagcccgcatctaccggaagcactttctcggcaaggagcatttcaattactactcactggacgctgccctcggccaccttgtcttctcactcaagtacgatgtcatcggggaccaagagcacctgcggctgctgctcaggaccaagtgccggacataccatgatgtcatccccatctcctgcctcaccgagttccctaatgttgtccagatggcaaagttggtgtgtgaagacgtcaatgtggatcggttctatcctgtgctctaccccaaggcttcccggctcatcgtcacctttgacgagcatgtcatcagcaataacttcaagtttggcgtcatttatcagaagcttgggcagacctccgaggaagaactcttcagcaccaatgaggaaagtcccgctttcgtggagttccttgaatttcttggccagaaggtcaaactgcaggactttaaggggttccgaggaggcctggacgtgacccacgggcagacggggaccgaatctgtgtactgcaacttccgcaacaaggagatcatgtttcacgtgtccaccaagctgccatacacggaaggggacgcccagcagttgcagcggaagcggcacatcgggaacgacatcgtggctgtggtcttccaggatgagaacactcctttcgtgcccgacatgatcgcgtccaacttcctgcatgcctacgtcgtggtgcaggctgagggcgggggccctgatggccccctctacaaggtctctgtcactgcaagagatgatgtgcccttctttggaccccccctcccggaccccgctgtgttcaggaaggggcctgagttccaggaatttttgctgacaaagctgatcaatgctgaatatgcctgctacaaggcagagaagtttgccaaactggaggagcggacgcgggccgccctcctggagacgctctatgaggaactacacatccacagccagtccatgatgggcttgggcggcgacgaggacaagatggagaatggcagtgggggcggcggcttctttgagtctttcaagcgggtcatccggagccgcagccagtccatggatgccatggggctgagcaacaagaagcccaacaccgtgtccaccagccacagcgggagcttcgcgcccaacaaccccgacctggccaaggcggctggaatatcactgattgtccctgggaagagccccacgaggaagaagtcgggcccgttcggctcccgccgcagcagcgccattggcatcgagaacatacaggaggtgcaggagaagagggagagccctccggctggtcagaagaccccagacagcgggcacgtctcacaggagcccaagtcggagaactcatccactcagagctccccagagatgcccacgaccaagaacagagcggagaccgcagcgcagagagcagaggcgctcaaggacttctcccgctcctcgtccagtgccagcagcttcgccagcgtggtggaggagacggagggtgtggacggagaggacacaggcctgcacgtggctggaggacagtgtcagcaccactagtgggggcagctccccagtgaggtggctccctcctgcccccctccccaggcccctctcgatcaccccacccagacgccggcaagttgggggaccctgcgtgtcccgagatcaagatccagctggaagcatctgagcagcacatgccccagctgggctgttagccgggccaccccctctgaaggtgaaactgagcagatgaggccacagaagcacaaggggaaggtgccgtgtcaagcccaggcagacgagacctctgccctgaagaccaacaccagcccgtgggctgccccctgcctccccaccctccccatggcccacccatctgggctgtctctgcagggcagagccgtccagacctgggatcagggaagctgctggcatcgtccccacccccagcctgggggtctgggctggggcagggattgctcagtggaagcaggactgggggtctggcttgccccctccctgggcctccatcacccctgagcatccctctggactcagagggaacaaggtgggagagagagtttgagacagctccgtgtggagagcttagcccctggaggcagcacaaggaggatgtgatatgtgggggagtgagcactgggttgggagccgggtcctggtttccaatttgggttctgctgtgtgactctgggcaagtcactctccctctctgggcatgtctgctacaaatggacaagattatttcagaggtcactgaagactgtgattacatgcacctgccttagaaggtaggattttcttcccagggacctcctatcaccctaccctgcttcttgaggtccctggagccccaggtgggctgaggggcagggagccggctgtgcccagtatgcctcctggaccctccagttctgccacaggtctgccgatgccctgtccactgcctacacatgacagacaagtaaccccctcatgggggatggggacctacctggctcctcagccagcacccagcttaacccctgccatcccatgctgggccctccaggccaagagtctcagctggccgagagtccaggccttgcctcccccgaccgccatggagggggcagcccggcacagctgctgggagcccttgtgtgtctggtcacactttttaggcgtcacgccaaaggccagcctcctggccccaatacccattttggaagcccctgtggccgtgtggatgtcggtaacagttgtataaaataaattctatttatcgctattgta

SEQ ID NO: 3728 - DNA, 541 bp, Homo sapiens
  source 1..541: mol_type = genomic DNA
aggcaggccacggagatacctcgtggaaggaggaacagcaagtgcatgggccgagtgtgggacttgcctggtgtgctcaaggtggaaggctttagggccaccatggcgcagcgcctggtgcgcgtgctgcagatctgtgctggccacgtgcccggtgtctcagctctgaacctgctgtccctgctgagaagctctgagggcccctccctggaggacctgtgagggtggctggcccctgggctgccccttctcatggcttcgtgctgactccataaacattctctgttgaggatgtccagtcagggcttgacaggcccaggctcagcccgccgtggctgggaaggttccctgcagtgccagtgctgcagcagggagagctgggcagaagcagcgagggggcccagctggcgagactgtagccccctcccactcccacactcactcttgcagagcctgtgtctttaagcagctggcgtgttacatctccatttaaggtttcctttgaacaaaaggtctgtggctaaaaaaagtttaaaaatca

SEQ ID NO: 3729 - DNA, 2505 bp, Homo sapiens
  source 1..2505: mol_type = genomic DNA
aatgctgccgtgcgccgcgggagccagggggcgtggggccatggtggtcttgcgggcggggaagaagacctttctcccccctctctgccgcgccttcgcctgccgcggctgtcaactcgctccggagcgcggcgccgagcgcagggatacggcgcccagcggggtctcaagattctgccctccaagaaagtcttgccatgattggataggacccccagataaatattcaaaccttcgacctgttcacttttacatacctgaaaatgaatctccattggaacaaaagcttagaaaattaagacaagaaacacaagaatggaatcaacagttctgggcaaaccagaatttgacttttagtaaggaaaaagaagaatttattcactcaagactaaaaactaaaggcctgggcctgagaactgaatcaggtcagaaagcaacattgaatgcagaagaaatggcggacttctacaaggaatttttaagtaaaaattttcagaagcacatgtattataacagaatgtatgacaacatgtccacaatggtgtacataaaggaagacaagttggagaagcttacacaggatgaaattatttctaagacaaagcaagtaattcaggggctggaagctttgaagaatgagcacaattccattttacaaagtttgctggagacactgaagtgtttgaagaaagatgatgaaagtaatttggtggaggagaaatcaaacatgatccggaagtcactggagatgttggagctcggcctgagtgaggcacaggttatgatggctttgtcaaatcacctgaatgctgtggagtccgagaagcagaaactgcgtgcgcaggttcgtcgtctgtgccaggagaatcagtggctacgggatgaactggccaacacgcagcagaaactgcagaagagtgagcagtctgtggctcaactggaggaggagaagaagcatctggagtttatgaatcagctaaaaaaatatgatgacgacatttccccatccgaggacaaagacactgattctaccaaagagcctctggatgaccttttccccaatgatgaagacgacccagggcaaggaatccagcagcagcacagcagtgcagccgcggctgcccagcagggcggctacgagatccccgcgcggctgcggacgctccacaacctggtgatccagtacgcctcgcaggggcgctacgaggtagctgtgcccctctgcaagcaggccctggaggacctggagaagacttcaggacacgaccacccggacgtggccaccatgctcaacatcctggccttggtgtacagggatcagaataaatacaaagatgcagctaacctactgaatgatgccttggctattcgtgagaaaactttgggcaaagatcatcctgcggtggcggcgactttgaataaccttgcagtcctttatggtaaaagagggaagtacaaagaagcagagccgttgtgtaaaagagctctggaaatccgagaaaaggttttggggaaggatcaccccgatgttgccaagcagttaaataacttggccttactgtgccagaaccagggcaagtatgaagaagtagaatattattatcaaagagccctcgagatctaccagacaaaactgggacctgatgaccccaacgtggctaagacgaaaaataacctggcatcctgctatttgaaacaaggaaagttcaagcaagcagaaacactgtacaaagagattctcactcgtgcacatgaaagggagtttggttctgtagatgatgaaaataaacccatctggatgcatgctgaagaaagagaagaatgcaaaggaaagcaaaaggatgggacatcttttggagagtatggcggctggtacaaagcctgcaaagttgatagtccaactgttacaaccactctaaaaaaccttggggcactttacagacgtcaaggcaaatttgaagctgcagaaacgttagaagaagctgctatgaggtctcgtaaacagggtcttgacaatgttcacaaacagagggtggcagaagtgctcaatgaccctgagaacatggagaagcgcaggagccgtgagagcctcaacgtggacgtggtcaagtacgagagtggccctgacggaggggaggaagtgagtatgagcgtagagtggaacgggatgaggaaaatgaagctcgggctggttaactgacttgctcagcgtcccatggcctagccgcccgtgactctcacactgtctcctgcatgacgggtggcgcctcccgcagcttcccttctctctccagtgctgcccgctgtgtctagcagcctctaggatcttgtcagagctgcacctctctgtgaactggccattcctttcggtgctgctgtcctttttgggggggttcctgatttctgtatacatgtagctttgccagatatgtacttagtaatataaactgtattaataaaatccatttactgtgtaatacacgagtttaaaaattaagagcgatt

SEQ ID NO: 3730 - DNA, 577 bp, Homo sapiens
  source 1..577: mol_type = genomic DNA
accgactgactcagtgacctcggggtcgttaggcctccacgtcctcgctggagctgcggacctcagtcgtccatccacacctcccccctgccgcccccgcccatctcactctcccaaccctgggcaccagggcaggtcgacagcccgaggcactcctctactgcgtttccaggcccaggagacccactccagcgccgcggttccttgcgacccggcagccgttcagcagacctcccattctttcctgcatcatcgggcattgtggaggcaccctacggtgattcctctcagagcctgtttgtagaccgggcaaggtcccccaggccaggatgtcaggcctggtgttggggcagcgggatgagcctgcaggccaccggctcagccaagaggagatcctggggagcacacggctggtcagccaagggctagaggccctacgcagtgaacaccaggccgtgctgcaaagcctgtcccagaccattgagtgtctgcagcagggaggccatgaggaagggctggtgcatgagaaggcccggcagcttcgccgttctatggaaaacattgagctcgggctgag

SEQ ID NO: 3731 - DNA, 542 bp, Homo sapiens
  source 1..542: mol_type = genomic DNA
gttgtgagctgcggcagagactggtggctggaggagacgccggcgctggagagtgcgctgcgccgcccgccgctgagggaccgcggggttagccactgctggctgcttccagtgttcgccgagaggtaccgggggtgacagctccgggaccggccgaaaggcgaggaaccggaagcccgggggagtgcgaccgcctcaaatccagccttcttgtttggtgggacgaccgtcggttctgtccgggaggaatgacggggtcaagccacataaagaagatccctaatagtcatttctcaacaattatatagtcaactgatgtaacaatggtactaatattgggacgcagactaaacagagaggatcttggggtgcgtgattccccagcaactaagcgaaaagtttttgaaatggaccccaaatctctgacaggtcatgagttttttgacttctcttcaggatcatcccatgccgaaaacatactccagatatttaatgaatttcgtgatagccgcttattcacagatgttatcatttgtgtggaa

SEQ ID NO: 3732 - DNA, 2039 bp, Homo sapiens
  source 1..2039: mol_type = genomic DNA
atgaacttccaggcgggcggggggcagagcccgcagcagcagcagagcctggcggctccggggggcggcggcgctgccgcgcagcagctcgtctgcggcgggcagttcggcggcgcggggcccggggccgggggcggcggcggcccctcgcagcagctggccggcgggcccccccagcagttcgcgctctccaactccgcggccatccgggccgagatccagcgcttcgagtccgtgcatcccaatatctacgccatctacgacctgatcgagcgcatcgaggatttggcgctgcagaaccagatccgggagcacgtcatctccatcgaggactcgtttgtgaacagccaggagtggacgctgagccgctccgtaccggagcttaaagtgggcatagtggggaacctgtctagcgggaagtcagccctggtgcaccgctatctgacggggacctatgtccaggaggagtcccctgaaggggggcggtttaagaaggagattgtggtggatggccagagttacctgctgctgatccgagatgaaggaggcccccctgagctccagtttgctgcctgggtggatgcagtggtgtttgtgttcagcctggaggatgaaatcagtttccagacggtgtacaactacttcctgcgtctctgcagcttccgcaacgccagcgaggtgcccatggtgcttgtgggcacgcaggatgccatcagcgctgcgaatccccgggttatcgacgacagcagagcccgcaagctctccacagatctgaagcggtgcacctactatgagacgtgcgcgacctacgggctcaatgtggagcgtgtcttccaggacgtggcccagaaggtagtggccttgcgaaagaagcagcaactggccatcgggccctgcaagtcactgcccaactcgcccagccactcggccgtgtccgccgcctccatcccggccgtgcacatcaaccaggccacgaatggcggcggcagcgccttcagcgactactcgtcctcagtcccctccacccccagcatcagccagcgggagctgcgcatcgagaccatcgctgcctcctccacccccacacccatccgaaagcagtccaagcggcgctccaacatcttcacgatatgtgccactgtttccaacttttcatcaacaaaaaggcctttccaactccttccaaattagaagaccagttggtgacacacagcacctctggacatgccccctgtgcggggccggaggcgggccgggccctgggactgctctcagatgagaagcggccgccgagctccccactccagagacccacgggaacctttgtaactaaccccacccccagggaaggctaggagcgccggagcccgcgctgggggctgccggggaccaggcccggccggacgctgcaggctcgctgcatggagaagaaggcagctcggccccacgcccggcgctggccagcgcgacgaggcccagaggggcgggggagtccaagcccgcccggcccggctgctcctggggggcgctttcctgcccctcccctcctctgctccttcctgcatggacctctgccgttcctgctcctgctccggaagccgccgccgccgccgcgcttgccttgccccctctttttggcctccccctatttcctaggatccgcattcgggtggactctgccccaggagcttgacagggtgcagggcctcttctggcctctctcctctctctgtccatccactgtgccccttgggccacgccgacgcgctcggtgccacgtgccgtgtggtgtctgtgccgcagacgggccatctgcccgctcacttgtggactttgcgctcccggttgtcgcgccctgtgctcccgaccagcagccccaccgtccacctcctcgcccccgcttctcttacgcccccgccccgggcgtgctcctcgcgccctcggcctctctgtccttgctcttttgtaaggggcgggcccggctcagtgacctgtgctgctctgtatggtgccgtgtgtaagaataaacccgttggaat

SEQ ID NO: 3733 - DNA, 1760 bp, Homo sapiens
  source 1..1760: mol_type = genomic DNA
ccgcagctgccttcggcgccgccagccccgccatggctgcgccctgcgcggaagagtgctggccctggggaagccccttcctcacccaggcttcacacatttgaccctggctctctctcaggaggacccctcgctggaaaggcattttaagggccaccgagatgcagttacctgtgtggacttcagtatcaacacaaagcagctggccagtggctccatggactcatgcctcatggtctggcacatgaagccgcagtcacgcgcctaccgcttcactggccacaaggatgccgtcacctgtgtgaacttctctccttcgggacacctgcttgcttccggctcccgagacaagactgtccgcatctgggtacccaatgtcaaaggtgagtccactgtgtttcgtgcacacacagccacagtgaggagtgtccacttctgcagtgatggccagtccttcgtgacagcctctgacgacaagacagtcaaagtgtgggcaactcatcgccagaaattcctgttctccctgagccagcatatcaactgggtccgctgtgccaagttctcccccgacgggcggctcatcgtgtctgccagtgatgacaagactgttaagctgtgggacaagagcagccgggaatgtgtccactcgtattgtgagcatggcggctttgtcacctatgtggacttccaccccagtgggacgtgcattgccgctgccggcatggacaacacagtgaaggtgtgggacgtgcggactcaccggctgctgcagcattatcagttgcacagtgcagcagtgaacgggctctctttccacccgtcgggaaactacctgatcacagcctccagtgactcaaccctgaagatcctggacctgatggagggccggctgctctacacactccacgggcatcagggaccagccaccactgttgccttttcaagaacgggggagtattttgcttctggaggctctgatgaacaagtgatggtttggaagagtaactttgatattgttgatcatggagaagtcacgaaagtgccgaggcccccagccacactggccagctccatggggaatctgccagaagtggacttccctgtccccccaggcagaggcaggagtgtggagtctgtgcagagccagccccaggagcccgtgagtgtgccccagacactgactagcacgctggagcacattgtgggccagctggatgtcctcactcagacagtctccattctggagcagcggttgacactgacagaagacaagctgaagcagtgtctggagaaccagcagctaatcatgcagagagcaacaccatgatcaggggagcaggaatcaggagctcggtggatttgcaggtggcaggccagggatttgtaccatgggacttgggtaaataaaggggactgaactctgtgggaatcacatccatactggagccctggatttttgcagttctgccctccaccttgctatctgcaccaggaggctctccacctggcagccagaggtccccagtgggccgggctcacacacaaatgatgcttcagacccgaatgagaggaccacattttgcttaatgtaaaggagccacttgaaaatgtctgctccttcggggtcctgagattgtggctccccctctggaggaggtggctccacgatgccttgattttcactcatcatttggacatgtgactggcttttcctacctctgccatggtgtagaaattgattgcacattgattggatgagc

SEQ ID NO: 3734 - DNA, 1915 bp, Homo sapiens; identical to SEQ ID NO: 3708
  source 1..1915: mol_type = genomic DNA

SEQ ID NO: 3735 - DNA, 572 bp, Homo sapiens
  source 1..572: mol_type = genomic DNA
cattagagaagaagcaggcagcttgagacaggtggagctggatcaagctgtgaacgtgatttgctggaagctggttgacgatgtgtcacactgtgtaagggaatcgcatggagatgggcattccgaactgttaatggggacatgggactccagttgtctctgatcacttgtgtggattttcctggcgtagaacgacagaagccgctagtaagtcgccaagacctacagcaggaattctgcaccaaagggcataaaatcttgttattttaatttgcatctgggagaatgtctgagcaaggagacctgaatcaggcaatagcagaggaaggagggactgagcaggagacggccactccagagaacggcattgttaaatcagaaagtctggatgaagaggagaaactggaactgcagaggcggctggaggctcagaatcaagaaagaagaaaatccaagtcaggagcaggaaaaggtaaactgactcgcagccttgctgtctgtgaggaatcttctgccagaccaggaggtgaaagtcttcaggatcagactctctgaaaactgcaaatggaaag

SEQ ID NO: 3736 - DNA, 1654 bp, Homo sapiens
  source 1..1654: mol_type = genomic DNA
agtcggcggccggactgggaagatggacgcagctactctgacctacgacactctccggtttgctgagtttgaagattttcctgagacctcagagcccgtttggatactgggtagaaaatacagcattttcacagaaaaggacgagatcttgtctgatgtggcatctagactttggtttacatacaggaaaaactttccagccattgccattcatcattgttgtataccctggagctggaaggagatggggactggttctcagccttgcctctcaccggcggagaactgaggccggaggggggacaggccccacctcggacacaggctggggctgcatgctgcggtgtggacagatgatctttgcccaagccctggtgtgccggcacctaggccgagattggaggtggacacaaaggaagaggcagccagacagctacttcagcgtcctcaacgcattcatcgacaggaaggacagttactactccattcaccagatagcgcaaatgggagttggcgaaggcaagtccataggccagtggtacgggcccaacactgtcgcccaggtcctgaagaagcttgctgtcttcgatacgtggagctccttggcggtccacattgcaatggacaacactgttgtgatggaggaaatcagaaggttgtgcaggaccagcgttccctgtgcaggcgccactgcgtttcctgcagattccgaccggcactgcaacggattccctgccggagctgaggtcaccaacaggccgtcgccatggagacccctggtacttctcattcccctgcgcctggggctcacggacatcaacgaggcctacgtggagacgctgaagcactgcttcatgatgccccagtccctgggcgtcatcggagggaagcccaacagcgcccactacttcatcggctacgttggtgaggagctcatctacctggacccccacaccacgcagccagccgtggagcccactgatggctgcttcatcccggacgagagcttccactgccagcacccgccgtgccgcatgagcatcgcggagcttgacccgtccatcgctgtggggtttttctgtaagactgaagatgacttcaatgattggtgccagcaagtcaaaaagctgtctctgcttggaggtgccctgcccatgtttgagctggtggagctgcagccttcacatctggcctgccccgacgtcctgaacctgtccctagattcttctgatgtagagcgactggaaagattcttcgactcagaagatgaagactttgaaatcctgtccctttgaaaatcctggggtcgggggtggcacctgtgagagcctggggctcctggtgccgctgcgtttcatccatcccgcccgctcgcctgccgagggctgcgccccgtgctgcctccccccagagggccacccgctgtgctcgtggactgaggctgcgctgcccgggaggccttactgcttggtgtcagactgcccagctcagagtgcccgtcagggcctgtgcatccgcacgcggagccgtctgttaggagcttccagagtgttctctcgacactgccagccccgtgttagcacctgggcctcagtcccacttgctcccaggcgccggttctgtggttggtttggaattaaagtcctgtttgaag

SEQ ID NO: 3737 - DNA, 2238 bp, Homo sapiens
  source 1..2238: mol_type = genomic DNA
gacatagcaagacctctgttccactgtgcaccactttatttgcttccacactcaccttgtagggaagaggcagaccctaagagcttgatttctaccttcaagtgaattctttacttcagaaacaactcaggttgctggttggatttcccttctgaaatatttaaaataatatttagaaaaaataatgtcagagcacagcagaaattcagatcaagaagaacttctcgatgaggagattaatgaagatgaaatcttggccaacttgtctgctgaagaactgaaagaactgcagtcggaaatggaagtcatggcccctgaccccagccttcccgtgggaatgattcagaaagatcaaactgacaagccaccgacaggaaacttcaatcataaatctcttgttgattatatgtattgggaaaaggcatccaggcgcatgctggaagaggaacgagttcctgtcacctttgtgaaatccgaggaaaagactcaagaagagcatgaagaaatagaaaaacgtaataaaaatatggcccagtatttaaaagaaaagctcaataatgaaatagttgcaaataaaagagaatcaaagggcagcagcaatatccaagaaacagatgaagaagatgaagaagaagaagatgatgatgatgacgacgaaggagaagatgatggtgaagagagtgaagaaacgaacagagaagaggaaggcaaagcaaaggaacaaattagaaattgtgagaacaactgccagcaggtaactgacaaagcattcaaagaacagagagacagaccagaggcccaagaacaaagtgagaaaaaaatatcgaaattagatcctaagaagttagctctagacaccagctttttgaaggtaagtacaaggccttcaggaaaccagacagacctggatgggagcttgaggagagttaggaaaaatgatcctgacatgaaggaactcaacctgaacaacattgaaaacatccccaaagaaatgttactggactttgtcaatgcaatgaagaaaaacaagcacatcaaaacattcagtttagccaatgtgggtgcagatgagaatgtagcatttgccttggctaacatgttgcgtgaaaatagaagcatcaccactctcaacatcgagtccaatttcatcacaggtaaagggattgtggccatcatgaggtgtctccagtttaatgagacgctaactgagcttcggtttcacaatcagaggcacatgttgggtcaccatgctgaaatggaaatagccaggcttttgaaggcaaacaacactctcctgaagatgggctaccattttgagcttccgggtcccagaatggtggtcactaatctgctcaccaggaatcaggataaacaaaggcagaaacgacaggaagagcaaaaacagcagcaactcaaggaacagaagaagctgatagccatgttagagaatgggttggggctgccccctgggatgtgggagctgttgggaggacccaagccagattccagaatgcaggaattcttccagccaccgccacctcggcctcccaacccccaaaatgtcccctttagtcaacgcagtgaaatgatgaaaaagccatcgcaggccccgaagtacaggacagaccctgactccttccgggtggtgaagctgaagagaatccagcgcaaatctcggatgccggaagccagagaaccacccgagaaaaccaacctcaaagatgtcatcaaaacgctcaagccagtgccgagaaacaggccacccccattggtggaaatcactcccagagatcagctgctaaacgacattcgtcacagcagtgtcgcctatcttaaacctgtgcaactgccaaaagaactggcgtaagaggcaacagagccatctagaagaacaagaaatggaaatagtgactcttggattacagcatggagactatgtcagcagcaatactttaggatccacgtggcagaactggaaacaatgctaccatctgataagggtatttgtaaaaggcagaatgtttgggccatgaagaagtaggggctgaagaggaaggtggaaggagataaaatataatatttagaggcaatattttctacttgcaatcaatttgagtgactcaggtgaaatttagagtcatatttcccgaagcagaagttaaagaaaattttttaaacatttgctttattattgttttcttctggtaaataataaatataacagaagtgttaactatt

SEQ ID NO: 3738 - DNA, 578 bp, Homo sapiens
  source 1..578: mol_type = genomic DNA
aggatttgcactttctccttttcttcagaatgtgtatctgcctaagcagtgtgataacttttttcccagactggatcgatattccttagctggtcctgttgcagcaggagtccggtgactggagagaggaagctcttgggcagcattttccccaatacatctctgctcatctgactcttatcttggcatctgcttcctggtggatctgaactgacccataagccacgcttactagtgattttccagaagatgaatccggcctcggcgccccctccgctcccgccgcctgggcagcaagtgatccacgtcacgcaggacctagacacagacctcgaagccctcttcaactctgtcatgaatccgaagcctagctcgtggcggaagaagatcctgccggagtctttctttaaggagcctgattcgggctcgcactcgcgccagtccagcaccgactcgtcgggcggccacccggggcctcgactggctgggggtgcccagcatgtccgctcgcactcgtcgcccgcgtccctgcagctgggcaccggcgcgggtgctgcgggtagccccgcgcagcagca

SEQ ID NO: 3739 - DNA, 660 bp, Homo sapiens
  source 1..660: mol_type = genomic DNA
gggcgcgtcgaagatcttgtacctgtcgttcgcagtggctcactttcccaagccatgggcagcaggaagaaggaaattgccctgcaggtcaacatcagcacccaagagctttgggaggaaatgctcagttccaaaggactaactgttgttgatgtctatcaaggctggtgtggcccctgcaaacctgtggtgagcctcttccagaagatgaggatcgaggtcggcctggaccttctgcactttgcattagcagaggcagatcgtcttgatgtcctcgaaaagtacagagggaagtgcgagccaacctttctgttttatgcaggaggagaactggtggctgtggttagaggagcaaatgccccactgctgcagaaaaccatcctagaccagctggaggccgaaaagaaagtgctggctgaaggcagagaacggaaagtgattaaagatgaggctctttctgatgaagatgaatgtgtttcccatggaaagaataatggtgaagatgaggacatggtttcatcagagaggacctgtaccttggccatcattaaaccagatgcagtggcccatggaaagactgatgagattatcatgaagattcaggaagctgggtttgaaattctaacaaatgaagagagaaccatgacagaggcagaagtg

SEQ ID NO: 3740 - DNA, 581 bp, Homo sapiens
  source 1..581: mol_type = genomic DNA
ctctctgctctcgcggccgactcgcaagatggcgccgcagaaagacaggaagcccaagaggtcaacctggaggtttaatttggaccttactcatccagtagaagatggaatttttgattctggaaattttggtaccttccctagtgaatatctagggttctcttccctagttttgcattttttctgttttaaaataggagcaatttctacgggagaaggttaaagtcaatggcaaaactggaaatctcgggaatgttgttcacattgaacgcttcaagaataaaatcacagttgtttctgagaaacagttctctaaaaggtatttgaaataccttaccaagaaataccttaagaagaacaatcttcgtgattggcttcgagtggttgcatctgacaaggagacctacgaacttcgttacttccagattagtcaagatgaagatgaatcagagtcggaggactaggcaaaggctccccttacagggctttgcttattaataaaataaatgaagtatacatgagaaataccaagaaattggcttttagtttatcagtgaataaaaaatattatactcttgaac

SEQ ID NO: 3741 - DNA, 607 bp, Homo sapiens
  source 1..607: mol_type = genomic DNA
acagccgaagggagcgggcgagcggcgacggcggcggcggcgggcacagattaattaaaagaagaatgaactataatccttgaagataactgggcaattttttaagtcggaggctgttcttactggtgtgaggatttacacacgtcttcagtttttcagcacagaccagcagaccatcatttttagaggaaatactccctctgccctcctttttggtttccttggtgaagagtgtaccatggaaaacctccagacaaatttctccttggttcagggctcaactaaaaaactgaatgggatgggagatgatggcagccccccagcgaaaaaaatgataacggacattcatgcaaatggaaaaacgataaacaaggtgccaacagttaagaaggaacacttggatgactatggagaagcaccagtggaaactgatggagagcatgttaagcgaacctgtacttctgttcctgaaactttgcatttaaatcccagtttgaaacacacattggcacaattccatttaagtagtcagagctcgctgggtggaccagcagcattttctgctcggcattcccaagaaagcatgtcgcctactgtatttctgcct

SEQ ID NO: 3742 - DNA, 580 bp, Homo sapiens
  source 1..580: mol_type = genomic DNA
agttggctgggtccgggcttggggactgcaacgcgggtaagggactcagcctgggcttgccagctgtggggatgaggcgaagcatccatcctcttggcagttaagtggctggtcctgatctgagggatctgcaaatttggctcatggaaagaggtggctgaattctgcgtctcccattaaacggatactggcgttgttgatacgggtttcgcatggaccctgtcctgtgccagggtttttaatctagctattaaaggaactggagaataacaagtaagggttgcaaggtcgctgacaggcgtgggaaacttgtgaaggattagaatgctaagtggctttcagcttttttcacactaagtcttctgtgcttcaccatctacataatgaatcccagtatgaagcagaaacaagaagaaatcaaagagaatataaagaatagttctgtcccaagaagaactctgaagatgattcagccttctgcatctggatctcttgttggaagagaaaatgagctgtccgcaggcttgtccaaaaggaaacatcggaatgaccacttaacatctacaacttccagccctgg

SEQ ID NO: 3743 - DNA, 2126 bp, Homo sapiens
  source 1..2126: mol_type = genomic DNA
atggtactaatattgggacgcagactaaacagagaggatcttggggtgcgtgattccccagcaactaagcgaaaagtttttgaaatggaccccaaatctctgacaggtcatgagttttttgacttctcttcaggatcatcccatgccgaaaacatactccagatatttaatgaatttcgtgatagccgcttattcacagatgttatcatttgtgtggaaggaaaagaatttccttgccatagagctgtgctctcagcctgtagcagctacttcagagctatgttttgtaatgaccacagggaaagccgagaaatgttggttgagatcaatggtattttagctgaagctatggaatgttttttgcagtatgtttatactggaaaggtgaagatcactacagagaatgtacagtatctctttgagacatcaagcctctttcagattagtgttctccgtgatgcatgtgccaagttcttggaggagcaacttgatccttgtaattgcttaggaatccagcgctttgctgatacccattcactcaaaacactcttcacaaaatgcaaaaattttgcgttacagacttttgaggatgtatcccagcacgaagaatttcttgagcttgacaaagatgaacttattgattatatttgtagtgatgaacttgttattggtaaagaggagatggtttttgaagccgtcatgcgttgggtctatcgtgccgttgatctgagaagaccactgttacacgagctcctgacacatgtgagactccctctgttgcatcccaactactttgttcaaacagttgaagtggaccaattgatccagaattctcctgagtgttatcagttgttgcatgaagcaagacggtaccacatacttgggaatgaaatgatgtccccaaggactaggccacgcaggtccactggctattctgaggtgatagttgtcgttggaggatgtgagcgagttggaggatttaatcttccatacactgagtgctacgatcctgtaacaggagaatggaagtctttggctaagcttccagaatttaccaaatcagagtatgcagtctgtgctctaaggaatgacattcttgtttcaggtggaagaatcaacagccgtgatgtctggatttataactcacagttaaatatttggatcagagttgcctctctcaataaaggcagatggcgtcacaaaatggctgtcctccttggtaaagtatatgttgtcggtggctatgatgggcaaaacagacttagcagcgtagaatgttatgattccttttcaaatcgatggactgaagttgctccccttaaggaagccgtgagttctcctgcagtgactagctgtgtaggcaaactgtttgtgattggtggaggacctgatgataatacttgttctgataaggttcaatcttatgatccagaaaccaattcttggctacttcgtgcagctatcccaattgccaaaaggtgtataacagctgtatccctaaacaacctgatctatgttgccggtggactgaccaaggcaatatactgttacgatccagttgaagattactggatgcacgtacagaatacattcagccgtcaggtaataacataaagcagtacaaaagaaaaataaatctaagagggaccaagtacataatcattattaatacactggaatttcaattttaaaatatttcaggctgggcgtggtggctcacgcctgtaatcccagcactttgggaggccgaggtggatagatcacttgaggtcaggagttcaagaccagcctggctaatatggtgaaaccccgtctctactaaaaaattatggccaggcgtggtggttcatgcctgtaatcccagcactttgggaggctgaggcaggccaatcacctgaggtcgggagttcgagaccagcctgaccaacatggagaaaccccgtctctgctaaaaatacaaaattagctgggcgtggtggcgcattgcctgtaatcccagctactagggaggctgcggcaggagaattgcttgaacccgggaggtggaggtcgcggtgagccgagatcgagccattgcactccagcctggacagcaagagcgaaactccgtctcaaaaataaataaa

SEQ ID NO: 3744 - DNA, 1780 bp, Homo sapiens
  source 1..1780: mol_type = genomic DNA
ctctttgaggctttctgatgcctagagtgagctcaactcaaaggtttccagcctcacactcgcctcacattcccccacagtcacattgcgctctgtgattctgaggaatacagtgtgccagcatccgatccagtctcctttcacctgcaggtgttccagaaacttcaaaatgcgtctggaagaactgaaaagattgcagaatcctctagaacaagttaatgatggaaaatattcatttgaaaacattcagcgagcatggcgagagtacctgcagcggcaggagcccctggggaagaggagcccgtccccaccctctgtctcctcagagaagctgagcagctctgtcagcatgaacaccttctccgacagcagcacacccgattaccgagaggatgggatggatctaggcagtgacgccggcagcagcagcagcagcagccgcgccagttcacagtccaactccaccaaagtgaccccttgctccgagtgcaaatcttcatcgtcgccggggggcagcctggacttggtgtctgccctggaggactatgaggagcccttcccggtctaccagaagaaggtgattgatgagtgggcgccggaggaggacggggaggaggaggaagaggaggacgagcgcgaccagcgagggtaccgggatgaccgctctccggcccgggaaccgggggacgtaagcgccaggacccgcagcggcggcggcgggggcaggagcgccaccaccgccatgccgcccccggtgcccaacggcaacctccaccagcacgacccccaggacctcaggcacaatggcaacgtggtggtggctggccggccgagctgttcccggggcccccgccgggcgatccaaaagccccagccggctgggggccggcgcagtggccgcggcccggcggctggggggctctgccttcagcccccagacggcgggacgtgcgtccccgaagagcccccggtgccacctatggattgggaggcgctggagaagcatctggccgggctgcagttccgggagcaggaggtacggaaccagggccaggcgaggaccaactccacctccgcacagaaaaatgagagagagtctatcagacagaagttggcacttggaagcttctttgatgatggcccaggaatttataccagctgtagcaaaagtgggaagccaagcctttcctcccgactgcagagtgggatgaacttgcagatatgctttgtcaacgacagtggcagtgataaggacagtgatgctgatgacagtaagactgaaaccagcttggacacccccttgtctcccatgagcaaacagagttcttcctattctgatagagacactactgaagaggagtctgaatccttggatgacatggacttccttacaaggcaaaagaaattgcaagctgaagccaaaatggcccttgccatggccaaaccaatggccaaaatgcaagtagaagtggagaaacagaacaggaaaaagtctcccgtcgctgatcttctgccacacatgcctcatataagtgaatgcttgatgaaaagaagtttaaaacccaccgacctgagagacatgactattgggcagctacaagtgatagtcaatgatctccattcccagatagaaagcttgaatgaagagttggtccagctgcttctcatccgagatgagctgcacacagagcaggatgccatgctggtggacattgaagacttgaccagacatgctgaaagtcagcagaagcacatggcagagaaaatgcctgcaaagtga

SEQ ID NO: 3745 - DNA, 2096 bp, Homo sapiens
  source 1..2096: mol_type = genomic DNA
cttctgagtgggggcggggactgctggagttgcggggcctgcctggggtagggcggggcaggacagcttggagatagggcccggaattgcgggcgtcactctgctcctgcgacctagccaggcgtgagggagtgacagcagcgcattcgcgggacgagagcgatgagtgagaacgccgcaccaggtctgatctcagagctgaagctggctgtgccctggggccacatcgcagccaaagcctggggctccctgcagggccctccagttctctgcctgcacggctggctggacaatgccagctccttcgacagactcatccctcttctcccgcaagacttttattacgttgccatggatttcggaggtcatgggctctcgtcccattacagcccaggtgtcccatattacctccagacttttgtgagtgagatccgaagagttgtggcagccttgaaatggaatcgattctccattctgggccacagcttcggtggcgtcgtgggcggaatgtttttctgtaccttccccgagatggtggataaacttatcttgctggacacgccgctctttctcctggaatcagatgaaatggagaacttgctgacctacaagcggagagccatagagcacgtgctgcaggtagaggcctcccaggagccctcgcacgtgttcagcctgaagcagctgctgcagaggttactgaagagcaatagccacttgagtgaggagtgcggggagcttctcctgcaaagaggaaccacgaaggtggccacaggcagagaacagcattgacttcatcagcagggagctgtgtgcgcattccatcaggaagctgcaggcccatgtcctgttgatcaagtaagtctggacccatccccttcagccacccgccaaggagacatgggcgccaggaatctccgggagggggccctggcatgaggctccaagttctctgcgtgtcgaccacatcgctaaggctcaagatcttttttgggaagcccccctggcagcagggtcatggaaggaggaaggtcagaggaggggagggctcgggcagcaggggatgggccggggctgtcccatgcctttccacaggtgtcagcggggggcatgcccaggtaaggctccataaccagtgagcccagtctcggctgactgcaacctctgtctcctggattcaaacgattctcctgcctcagcctcccgagtagctgggactacaggcgcccgccaccaggcctggcttatttttgtatttttagtagagacgaggtttcgccatgttggccaggctgctctccatctcctgacctcatgatccgcccgcctcggcctcccagtgttgggattacaggcgtgagccaccgtgcgtggcccaccatagacgatttttaagccataaaaagaaacgaagcactgacacgggctccagcatggatgagcctttaaaacatcgcgctaagtggacgaattcagacacaaccgtctacgtgttgtatggctgcattcacgttcaagtcaagtccaaatagggcacactgcagagacaaagccagagcagtccacggatattttgattcaagacagaattactctgagaaggagtccctgtcgttcatgatagacacgatgaaatccaccctcaaagagcagttccagtttgtggaagtcccaggcaatcactgtgtccacatgagcgaaccccagcacgtggccagtatcatcagctccttcttacagtgcacacacatgctcccagcccagctgtagctctgggcctggaactatgaagacctagtgctcccagactcaacactgggactctgagttcctgagccccacaacaaggccagggatggtggggacaggcctcactagtcttgaggcccagcctaggatggtagtcaggggaaggagcgagattccaacttcaacatctgtgacctcaagggggagacagagtctgggttccagggctgctttctcctggctaataataaatatccagccagctggaggaaggaagggcaggctgggcccacctagcctttccctgctgcccaactggatggaaaataaaaggttcttgtattctc

SEQ ID NO: 3746 - DNA, 439 bp, Homo sapiens
  source 1..439: mol_type = genomic DNA
agctttgggagcttgggctaccctgtaacgtctaaatgcctgtgcactgtgggattgatgacctcccacaactggagcagccgggaacagctctgaccacagtggttccggggagaagcctttccaggacccatgtgtaggcacaactgttttccctgatcaggatacttgcggcactcaacagaggaaagaaattcctaagggaacactgctcagaaagtactgcagcatgtcttcaaatgcctgaggatcaagttggaaaactagaagcaacagaaaacacaataagcgcaatggcggcggccgcggcggagcagcaacagttctacctgctcctgggaaacctgctcagccccgacaatgtggtccggaaacaggcagaggaaacctatgagaatatcccaggccagtcaaagatcacattcctcttacaagccat

SEQ ID NO: 3747 - DNA, 3761 bp, Homo sapiens
  source 1..3761: mol_type = genomic DNA
attgtaactcttcctgtagaacctgttcatgtccagggtgagtaaactagggtagaaatgtcttcctaaaacagcctccggtgaaattcgtccttggattcaaagcaacttacttcctaggaagtatcaggcaaatcccaactgccctccattttagaaaggtctcttttctgggaaaatctgccactgagaactttgccctcctctccctgatgggaggaaggagtagaattagggaggtgtcactcaggagagttgctgatgtcagtagtgtgtcagccgtgggaggctcagtttgtgaaattgagttacacctaagtgtcttatgaaactcagttcagaactcaccggagctgccgtctgggaggggggagggcggaagaaccctgaggtttttcctcacatttctgtcccatttttggaacctctggatttaaagaaatgaaaacctcaagtttgtggagattttaagaaatggttattccaatggaaacagctggagaacttatatttccgtgagaaaaaatttgctgttgaagttcatgatccacgaaggatttcagtttcaagaagaacctttgggcaaagtggcttgtttgtgcaaacatggtatgctaactcttctctcatcaagtccatttgggtaatggcaattagtcagcatcagttttacttggaccggaagcaaagcaaagcaaaaattccttcagccaggagtttagatgagattgcaatggatttgacagagacaggaacacaaagggcctccaagctggtgacactggagacgaaaagtcagttcatcatggcaagtaatggcagtttaatctcctcaggttctcaagactcagaagttagtgaagagcaaaagagagaaaaaatccttgaactaaagaagaaggagaaactattacaagaaaaacttctgaaaaaagttgaggagcttaagaagatctgtctgcgggaggctgagctcacaggcaaaatgccaaaggagtatcccctgaacataggcgagaagcctcctcaggtcagaagacgtgtgggtactgcgttcaaattagatgacaacttgctgccgagtgaagaagatcctgctttgcaagaactggagagtaattttctaatacaacaaaagctggtggaagctgcaaagaaacttgccaatgagccagacctttgtaaaactgtgaagaaaaagcgaaagcaagattacacagatgcgatgaaaaagcttcaggagattgaaaatgcaataaacgaataccgaattaggtgtggaaagaaacccagccagaaagcaacagtgttaccagaagacataatcccctcagagagtagctctttgtctgacaccaccacctatgatgatcccagtgatgccttcacttttcctgggcagcgatcaagttcagtacctcattctccaagaattcttccccccaagtctcttggtattgagcgaatccatttcagaaagtcgtccatcaatgaacagtttgtggataccaggcagtccagagaaatgctgtccacacacagcagcccttacaaaactctggagaggcggccccagggaggacgaagcatgcccaccacgccagttcttacccgaaacgcctacagcagcagccacttggaacccgaatcttcatctcagcactgccgccagcggagtggaagcctggagtcccagtcccacctgctctccgagatggacagcgataagccatttttctccctctccaaatcccaaagaagcagcagcacagaaatcctcgatgacgggtcttcttatacaagccaatcaagcacagagtattactgtgtgacaccagttaccggcccctattacaccacccagaccctggacactcgcaccaggggtcggaggaggtcaaagaaacagaatgtttctacttcaaattcaggaagcatgcccaacctagcacaaaaggatagtttgaggaatggtgtttactcaaagagtcaggagccaccgtcttccagttactacattgccgggtacacaccctatgcagagtgtgacttttattacagtggtggttatgtctatgagaatgacaccgagggacagtatagtgtcaacccttcctaccggtcctcagcccactatggatatgagcgccagagggactacagcagatcctttcacgaagatgaggtcgaccgggtaccccataacccatatgcaactctccggctgccaaggaaggctgctgcaaaatcggagcacatcaccaaaaacatccacaaggccttagttgccgagcacttgcgtggctggtaccagcgggcctctgggcagaaggatcagggacacagcccgcagaccagctttgactcagacaggggatcacagagatgcctggggtttgcggggctgcaagtaccttgttctccaagcagtcgtgcatcctcgtactcttcagtgtcttctacaaatgcttctgggaactggaggacccagttaaccatagggctgtcggattacgagactccagcacattcttcttacaccagctgctatggcaatgtctataatcctttaccctctccaagcagacaatacacagaaatcagtcaactggatggtacagatggaaaccagctggaagacaacctggagagtagtgagcagagactcttttggcatgaagattcaaagcctggaacattagtctgaactgcagttggacctcctgaccaagcactgcgttctcacactagtgtgccttgcaaattgtatttgtcttccgagaggatgttcgttttagaaacctaaagacatcaaaggttgaagagaagacttagttgccctggaagtgaatcagtgaatcacacaccaagccccacaaagcccctaaaggaggatttggcctttcaaactctaggcactaacgtaactgtagggtctgcccacatgttgaagtattgccaagagaggactcagtgtgaagccttcatcaatagcaagcactttttaagggagtaaaagttgttaaaggcaaacctcaaaaacatgaaagggcattcaggatgtcccatggcaataagaacaggggaaatctcagagcacaattcagcaggatgagagaaggggaaccagaagctccggagtcattgctcacttcagagtttgaattcgtgagctgacaaagagtaacatgctctttctacacagacatggacaatttagacagtattggaaaattacttgaagctggattttcatgaagttctgaatgagtgtaaatgttttttaggatactataaagagtgatgtttttcataagcaccataaaatgggttctggaaaaactgattaccttagcatcctgtaatataacttatggtagcagattggggaaaatgaagcagcccactgaataattgacaaagtctgcttggagaacattctaaggtacaatatcatggagctcctttttcctttctccactaattgcgtgatgagctattgttctggctgttaattctccaactcggctgtcatttgaagtggcagacttaatatggaaagtttttataattatgagtttgaaaaagcattttaagatgatacagaaagtatccaaaacaacagaaaaaaaaagccacgtcattttagatgaattgcgtgccttaaaatggtgaacgttagaaaattaaacaagtctggattccacaagtagttccaagtcaccaagtgacaaaaacaaggttaacattaaaaaagaaaa

SEQ ID NO: 3748 - DNA, 648 bp, Homo sapiens
  source 1..648: mol_type = genomic DNA
accgggagtgtggctggtttctgttgcctgttttgatactcttctcctggtgggtgtgtacactggcactgagctgcagtaggatttttccttggatagtctggtctggagctgggacagcagctgctgctgtggaaaggccagctggcaagatgatggaagaaatctccattatggtagcctatgacgcccatgttttcagccagctgcacgatgaagacttcctcactagtctggtggccatcagcaagcccaggtctatggtaccaaccaagaagctgaagaaatatgagaaagaatatcagacaatgcgagagagtcagctgcaacaggaagacccaatggatagatacaagtttgtatatttgtaggtaactccagctgttgcatttatactgggaatcttcataagaagctgagagaaagagaggggaaaaagaaagtggctttctactttcaaaaatgaaacaaaaaggaaaaatggcaaagtactgttttagctgtgcatgtcatatccacaaagacttttagcaggtgaactgttccaagactgacacaaggatgtttcaaacttgcctctgtctgtagaaaatgttaaaaataccaactcacttggaaggaaaaataaaaatcacaaaggtatattga

SEQ ID NO: 3749 - DNA, 2076 bp, Homo sapiens
  source 1..2076: mol_type = genomic DNA
aggtattgctccggagggtgttactcgttagcgtcagtttttcattaaagggcagtatttaaagtcagttggcaagcagtggaataagatttttgtaaagaaaccttgtgcagcatggattctctaccagatgaattttttgtgaggcatcctgctgtggaggatcagaggaaggaagaaactgagaataagctagaaaaatcatctggtcaactgaacaaacaggaaaatgacatacctactgatcttgtccctgttaacctactattagaagtgaagaagttattaaatgcaattaatactctaccaaaaggtgtggttcctcacattaagaagttcttacaagaagatttttccttccaaactatgcagagagaagttgcagctaacagccagaatggtgaggaaattgttcctgctttgactttacgtttcttgattacacagctagaagcagcacttaggaacattcaagctggcaattataccgcacaccagattaatattggttattatttgacattactgtttttatatggagtagcactcactgaaagaggaaagaaagaggattatacagaagctgagaataaatttctggtgatgaagatgatgatccaagaaaatgaaatttgtgaaaactttatgtctttagtttattttggacgtggtttactgcgatgtgctcaaaagagatataatggaggactgctagaatttcataaaagcttacaagaaattggagacaaaaatgaccattggtttgacatagatcctacagaagatgaagatttacctacaacttttaaagatcttcttaataattttatcaagacaactgaaagcaatataatgaagcagacgatttgtagttacctagattgtgaacgatcttgtgaagctgacattttgaagaacaccagttataagggattttttcagttaatgtgcagtaaaagttgctgtgtttatttccataaaatttgctggaaaaagttcaagaatttaaagtatccaggtgaaaatgatcagagttttagtgggaaaaaatgtttgaaggaaggatgtacaggtgacatggtaaggatgctgcaatgtgatgtacctggaattgttaaaattttgtttgaagttgtgagaaaggatgaatatatcaccattgaaaatttaggagcaagttatagaaagttgatatctctgaaaataactgatactgatataagaccgaagatcagtttaaaatttaatacaaaagatgaaatgcctatcttcaagcttgattataattatttctatcatctgcttcatataattattatttctggtactgacattgttcgacaaatatttgatgaggctatgccacctcctcttttgaaaaaagagcttcttatacacaagaatgtgctggaatcctactacaaccatctttggaccaatcatcctttgggtggatcatggcatctgctttatcctcctaacaaggagttaccgcaatccaaacagtttgacttatgcctcctgttagctcttataaaacatttaaatgtgttccctgcacccaaaaaaggatggaatatggaaccgccatcttctgacatctctaaatctgcagacatcctgagactgtgcaaatacagggatatcctccttagtgagattttgatgaatggtctcactgagtcacagttcaattcaatttggaaaaaagtttcagatattcttctgcgccttgggatgatgcaagaggatattgacaaagtgaaggagaatcccattgagaatatctcccttgattaccatcagctatctgtctacctaggcataccagtaccagaaatcatacagaggatgttatcctgctatcaacaaggaattgctctacagtcaataacaggcagtcagcgtattgaaatagaagagttacagaatgaggaagaagaactaagtccacctctcatggagtacaatataaatgtgaaatcacaccctgagatacagtttgcagaaattaataaagatgggacctcaatacccagtgaatcttcaacagaatctcttaaagatctccaggaa

SEQ ID NO: 3750 - DNA, 697 bp, Homo sapiens
  source 1..697: mol_type = genomic DNA
ttatctgtctcctcgtttccttttccctctattctttctcccaccatctcgccctctcaccctgtaaccctcttacccacttcctccgactttaaataaaaggctgatctgaccttctttttgcagaagatgaatccggcctcggcgccccctccgctcccgccgcctgggcagcaagtgatccacgtcacgcaggacctagacacagacctcgaagccctcttcaactctgtcatgaatccgaagcctagctcgtggcggaagaagatcctgccggagtctttctttaaggagcctgattcgggctcgcactcgcgccagtccagcaccgactcgtcgggcggccacccggggcctcgactggctgggggtgcccagcatgtccgctcgcactcgtcgcccgcgtccctgcagctgggcaccggcgcgggtgctgcgggtagccccgcgcagcagcacgcgcacctccgccagcagtcctacgacgtgaccgacgagctgccactgcccccgggctgggagatgaccttcacggccactggccagaggtacttcctcaatcacatagaaaaaatcaccacatggcaagaccctaggaaggcgatgaatcagcctctgaatcatatgaacctccaccctgccgtcagttccacaccagtgcctcagaggtccatggcagtatcccagccaaatctcg

SEQ ID NO: 3751 - DNA, 1185 bp, Homo sapiens
  source 1..1185: mol_type = genomic DNA
tctgccgggttccgggaaaaggagctcctgctgccactgctcttccggagcctgcagcatggggcccctgccgcgcaccgtggagctcttctatgacgtgctgtccccctactcctggctgggcttcgagatcctgtgccggtatcagaatatctggaacatcaacctgcagttgcggcccagcctcataacagggatcatgaaagacagtggaaacaagcctccaggtctgcttccccgcaaaggactatacatggcaaatgacttaaagctcctgagacaccatctccagattcccatccacttccccaaggatttcttgtctgtgatgcttgaaaaaggaagtttgtctgccatgcgtttcctcaccgccgtgaacttggagcatccagagatgctggagaaagcgtcccgggagctgtggatgcgcgtctggtcaagggtgagtgtggggctctgggaatcctctgggaggaccttggatgactttctgaccttccccaggcacgttttcagggtcatgatcctgcccccgcccgggggatctactgtcctcccagtcacacccctctccccgcaccgccttcctgctgtcttctcttcttcccagaatgaagacatcaccgagccgcagagcatcctggcggctgcagagaaggctggtatgtctgcagaacaagcccagggacttctggaaaagatcgcaacgccaaaggtgaagaaccagctcaaggagaccactgaggcagcctgcagatacggagcctttgggctgcccatcaccgtggcccatgtggatggccaaacccacatgttatttggctctgaccggatggagctgctggcgcacctgctgggagagaagtggatgggccctatacctccagccgtgaatgccagactttaagattgcccggaggaagcaaactcttcgtataaaaaaagcaggccatctgcttaacccttggctccaccataaggcactgggactcggatttctctatctgatagaggtattttctgtggccctgggagctgtctgtctttcccctacccccaaggatgccaggaagacgtccaccattagccatgtggcaacctttacttctatgcctcacaagtgcctttcagagagccccaattctgctttcccacaaaataaacctaatgccatcaggcaaaaca

SEQ ID NO: 3752 - DNA, 1505 bp, Homo sapiens
  source 1..1505: mol_type = genomic DNA
attactacagggcaggaagggcacgttctcatcagcatggatcagctggaaaatgcaaaaatggagcacacaaatgcatctttcgataccttcttctgtgagacaagagctgggaagcatgtgcctagagcactcttcgtggacttggagccaactgttatagatgggatccggacgggccagcaccgttcactcttccaccccgagcagctccttagcggaaaggaggatgctgctaacaattacgcgcgaggccgttactctgtggggtcggaggtcatcgaccttgtgctggagaggacccggaagctggcagaacagtgtggtggacttcagggatttttgattttccgaagctttggaggaggcactggttcagggtttacgtctctcttaatggagaggctcacaggagaatatagcagaaagactaagctggagttctcggtctacccagcccccaggatctccactgctgtggtagagccttataactctgtcctcaccacccactccaccacagagcacacggactgtaccttcatggtggacaacgaggccgtctatgatatatgccatcgtaaactcggtgttgaatgcccctctcatgccagcatcaatagattggtggttcaggtggtatcttccatcactgcctccctccggtttgaagggcccttgaatgtagacctaattgaattccagaccaacctggtaccttatccgagaatacatttccccatgacagccttcgcccccatcgtctctgctgacaaagcctaccatgagcagttctctgtgtcagacatcaccactgcctgctttgagtcctccaaccagctggtcaagtgtgatcctcggcttgggaagtacatggcctgctgcctactctatagaggggatgtggtccccaaggaagtgaatgcagcaatcgcagccacgaagtcgaggcactctgttcagtttgtagattggtgtccaactggtttcaaggtgggcatcaacaatcggccgcccacggtgatgccgggtggggacctggccaaagtccaccggtccatctgcatgctgagcaacaccacggcgattgtggaggcctgggcccgcctggaccacaagtttgacctcatgtacgccaagagagcatttctgcactggtacctcagagaaggcatggaagaagcagagttcttggaggccagggaagatctggcagccctggagagggactatgaggaagtggcgcaaagtttctgaggcatgtatgatgggtgcaaatgaatgtcaagttaaaatggcatgttttcttttcaagccgttatatgcctagtgggtagttcccctgatgagcagaaaaatgaactcaaatcaggcaagactctaggttccacactaaattaagtgggtcagtaccaacaatgaacacattatttcctggtctactggtacaagtcagctctgctacctgggagcctttggaagcttagagtcctttgaactgctga

SEQ ID NO: 3753 - DNA, 2602 bp, Homo sapiens
  source 1..2602: mol_type = genomic DNA
accgactgactcagtgacctcggggtcgttaggcctccacgtcctcgctggagctgcggacctcagtcgtccatccacacctcccccctgccgcccccgcccatctcactctcccaaccctgggcaccagggcaggtcgacagcccgaggcactcctctactgcgtttccaggcccaggagacccactccagcgccgcggttccttgcgacccggcagccgttcagcagacctcccattctttcctgcatcatcgggcattgtggaggcaccctacggtgattcctctcagagcctgtttaccgggcaaggtcccccaggccaggatgtcaggcctggtgttggggcagcgggatgagcctgcaggccaccggctcagccaagaggagatcctggggagcacacggctggtcagccaagggctagaggccctacgcagtgaacaccaggccgtgctgcaaagcctgtcccagaccattgagtgtctgcagcagggaggccatgaggaagggctggtgcatgagaaggcccggcagcttcgccgttctatggaaaacattgagctcgggctgagtgaggcccaggtgatgctggctctagccagccacctgagcacagtggagtcggagaaacagaagctgcgggctcaggtgcggcggctatgccaggagaaccagtggctgcgggatgagctggctggcacccagcagcggctacagcgcagtgaacaggctgtggctcagctggaggaggaaaagaagcacctggagttcctggggcagctgcggcagtatgatgaggatggacatacctcggaggagaaagaaggcgatgccaccaaggattccctggatgacctctttcctaatgaggaggaagaggaccccagcaatggcttgtcccgtggtcaaggtgctacagcagctcagcagggtggatatgagatcccagcaaggttgcggacgttgcacaacctggtgatccagtacgcagcccaaggtcgctatgaggtggccgtgccactctgtaagcaggcactagaggacctggagcgcacatcaggccgtggccaccctgatgtcgccaccatgctcaacatccttgctttggtgtatcgtgaccagaataagtataaggaagctgcccacctgctgaatgatgcccttagcatccgggagagcaccttgggacctgaccatcctgctgtggctgccacactcaacaatttggctgtgctctatggcaaaaggggcaagtacaaggaggcagagcctctgtgccagcgggcactggagattcgagaaaaggtcctgggcacgaatcatccagatgtggcaaaacagctgaacaacctggccctcttgtgccaaaaccagggcaagtatgaggccgtggaacgctactaccagcgagcactggccatctacgaggggcagctggggccggacaaccctaatgtagcccggaccaagaacaacctggcttcctgttacctgaaacagggcaaatatgctgaggctgagacactatacaaagagatcctgacccgtgcccatgtacaggagtttgggtctgtggatgatgaccacaagcccatctggatgcatgcagaggagcgggaggaaatgagcaaaagccggcaccatgagggtgggacaccctatgctgagtatggaggctggtacaaggcctgcaaagtgagcagccccacagtgaacactactctgagaaacctgggagctctgtataggcgccagggaaagctggaggctgctgagaccctggaggaatgtgccctgcggtcccggagacagggcactgaccctatcagccagacgaaggtggcagagctgcttggggagagtgatggtagaaggacctcccaggagggccctggagacagtgtgaaattcgagggaggtgaagatgcttctgtggctgtggagtggtccggggatggcagtgggaccctgcagaggagtggctctcttggcaagatccgggatgtgctccgcagaagcagtgaactcttggtgaggaagctccaggggactgagcctcggccctccagcagcaacatgaagcgagcagcctccttgaactatctgaaccaacctagtgcagcacccctccaggtctcccggggcctcagtgccagcaccatggacctctcttcaagcagctgacattcaacccggcccccaggtctgctgggtccccccacccccacagccctcacagcattccccattgctcctggctcttccccacccctaggtgggacagtgaaggggagcagtttaaccagaagattgctgctgcccttagggtctcagctccctcctcaggaatccctcttaggaaggaccctcaggacaccctctctgcaccctgtggtcctctagagtagctagctctgaggccccaaggtgggtacaaagcaggtatggccctcagagatgcagcctgctgctggcttttcagtcagagggttgggggctggccagccaagctgccttgccctggccgctcttactccctccctctgctgtctcacttcaggtccatgtatttcacttttcttaaataaaagaatcaggtaa

SEQ ID NO: 3754 - DNA, 992 bp, Homo sapiens
  source 1..992: mol_type = genomic DNA
cgggggcggggcctggaggagcctacaccgactctggaggaagactggagcctttgcggcggcgctgcccctcccctggtccccgcgagctcggagggcccggctggtgctgcgggggccccgggaggttgaaaactaagcatggggaagagctgcaaggtggtcgtgtgtggccaggcgtctgtgggcaaaacttcaatcctggagcagcttctgtatgggaaccatgtagtgggttcggagatgatcgagacgcaggaggacatctacgtgggctccattgagacagaccggggggtgcgagagcagatagcagagagtcttttcagcgtgtggagctgctcaagaaggagattgacaaatccaaggacaagaaggaggtcaccatcgtggtccttggcaacaagtgtgacttacaggagcagcggcgtgtagacccagatgtggctcagcactgggccaagtcagagaaggtgaagctgtgggaggtgtcagtggcggaccggcgctccctcctggagccctttgtctacttggccagcaagatgacgcaaccccagagcaagtctgccttccccctcagccggaagaacaagggcagcggctccttggatggctgaagagctgccgttcctctttcacgatcccagccccatttcagtgtctggggctctggtagatgtgttgagggcaaagtagaggacaagctgtctttcccagtcagccagggagctccccgccaggccacgccccagccactttgctccctctcacctctgggaagtgcaaatactcttggttgacatccccttcctcagccctcccagcctactccccatcccagcttttagaggatctgctccactgtctcctggggcagttgtgggtcactgtcccttccagctgccccagacaggaagcagagtcaccacgcagcagtgtcccttcttgggtctgagttcctattataggtaggggccccaccctctggg

SEQ ID NO: 3755 - DNA, 465 bp, Homo sapiens
  source 1..465: mol_type = genomic DNA
aggaagagtgaataagagggagaaaatagttacatgtactgtgagtagaatttcttagccctccttacagcctagaaaaaatgacagatctcgtagctgtttgggatgttgctttaagtgacggagtccacaagatcgaatttgaacatgggactacatcaggcaaacgagtagtatatgtagatggaaaggaagagataagaaaagagtggatgttcaaattagtgggcaaagaaacattctatgttggagctgcaaagacaaaagcgaccataaatatagacgctatcagtggttttgcttatgaatatactctggaaattaatgggaaaagtctcaagaagtatatggaggacagatcaaaaaccaccaatacttgggtattacacatggatggtgagaactttagaattgttttggaaaaagatgctatggacgtatggtgcaatggtaaaaaattggaga

SEQ ID NO: 3756 - DNA, 1196 bp, Homo sapiens
  source 1..1196: mol_type = genomic DNA
gcactggaggcagtgattttggggcagagaattttgcaacacgtggtagtgaactgtgaggagtttgaggggtctgaagactgaaagagtcgaatggtttgttggcaggacctagaagaatcccttaggatgaagctgagtcttaccaagagcagaacatcatgaagtcttgacagaatataaagaaggagttggaaagtttatagtctgtgtctgtgtggagtgttgcaggacgagtggaaatgactgtttccaagttcatggcaattcagaaggcccttcagccagactggttccagtgcctctccgatggagaagtatcttgtaaggaagcaacttccataaaaagggtcagaaagtctgttgaccgatcacttcttttcttggataactgtctgcggctgcaggaagagtcagaggttcttcagaagagtgtgatcattggagtgattgaaggtggagatgtgatggaagagaggctgaggtcagcacgagagacagccaagcggcctgtgggtggcttccttctggatggttttcaaggaaatccaacaaccctggaggctagactacgcttgctgtcatcagtcactgcagagctgccggaggacaagccaaggctcatatctggtgttagtcggccagatgaggtgctcgagtgtattgaaagaggagtggacttatttgagagttttttcccttatcaagtaacagagcggggatgtgccctgactttcagttttgattaccagccgaatcctgaagagacactactacaacaaaatggaacacaagaagaaataaaatgtatggatcaaataaagaaaattgaaacaactggttgcaaccaagaaataacatcatttgaaattaatctgaaggaaaaaaagtaccaggaggactttaacccgctggtgagaggatgttcctgttactgctgtaagaatcacactcgggcatacatccaccatctgctggtgaccaatgagctgctggccggagtcctgcttatgatgcacaactttgaacactactttgggtttttccattacatccgggaagcactaaaaagtgacaaactggcacagttgaaagagctcatccacaggcaagcatcttgagatcttgcaaatacaagtctcactcttcacactgagcctgtaccactgttgtaacatgggaagacgtgaagaaga

SEQ ID NO: 3757 - DNA, 1928 bp, Homo sapiens
  source 1..1928: mol_type = genomic DNA
ggcttcttggcgcgatgaggttccggttctgtggtgatctggactgtcccgactgggtcctggcagaaatcagcacgctggccaagatgtcctctgtgaagttgcggctgctctgcagccaggtactaaaggagctgctgggacaggggattgattatgagaagatcctgaagctcacggctgacgccaagtttgagtcaggcgatgtgaaggccacagtggcagtgctgagtttcatcctctccagtgcggccaagcacagtgtcgatggcgaatccttgtccagtgaactgcagcagctggggctgcccaaagagcacgcggccagcctgtgccgctgttatgaggagaagcaaagccccttgcagaagcacttgcgggtctgcagcctacgcatgaataggttggcaggtgtgggctggcgggtggactacaccctgagctccagcctgctgcaatccgtggaagagcccatggtgcacctgcggctggaggtggcagctgccccagggaccccagcccagcctgttgccatgtccctctcagcagacaagttccaggtcctcctggcagaactgaagcaggcccagaccctgatgagctccctgggctgaggagaagggtgttccaggcctgtgtggagccgccctgcccgtatggagtcacgccctctgaactgctcttcgggaggcagccctggttctaggatgctgaggccctggcccggactctggcctcccagatccccagctgcctcacttctctcttgagaacttggctcagggctcctgaggacctttcccagcattaccttcccttcccttgaaagtagagatgaggtttctccatgttggtcaggctggtctcgaactcctgacctcaggtgatccacccaccttgccctcccaaagtgctgggattacaggcgtaagccactgcgcccagccactgccatcatctttaggaagagagaagtgaccatgcctgaaccagtcattggcaagaggaacggtgttatggactgaatgttcatgttcctccagaattcatatgctgaagcctctgtccacacatgcacaccagatgagggccatgtgcgcacacgaggtggctgtctacaaggccagaaagagggctgtcaacaggaactgcgtctgctggcaccttgatcttgaacttcccagcctccagaactgtgagaaagaaatctctatggtgtaagccactagtctgtggcattgttatagcagctcgagaagactaaggcagatgggcttccaggactggcccagaccagccagggctccttgtagaaaaggctgatgccagggttggcacatggagggtacaaggaggactcgcctggagtatcttaaggaacctatcgaagaataatggcttgttccactggccaaagatgggacaatttgaacatcaaaagagatacttactgactccactcctgacttctgcttctgaaaaaatgaagtaggtgttttccctattcctcccactaagtacagttaacaaccctggatgttacatataaaacaaacaaaaagactccgagcgatggagagaaggcaccctagcctggctgggatcctcaggacctgaggctccacagagagaaattcctggaatctggaccccatggcccagtcaggttacacaaaactgatcatcacagatctgtagaactatacaaaagtgctaacattcatgattagggtctcagaaggtaaggaggaagagagtggaatggaaaaagtattcaaaaaaataatcactaaaggccaggtgcagtggcccatgcctgtaatcccagcactttgggaggtgggacaattgctttagaccttgcaactggcctgagcaacacagggagactcagtttctccaaaaaaataaaaaattagccgatcatg

SEQ ID NO: 3758 - DNA, 591 bp, Homo sapiens
  source 1..591: mol_type = genomic DNA
aagtatgaaacaatgacgatttcatgatggctcattgttctttggtattgtgccttacgtgagctggggactaactctaaatcagtttttatttcacttaggtggttccggggagaagcctttccaggacccatgtgtaggcacaactgttttccctgatcaggatacttgcggcactcaacagaggaaagaaattcctaagggaacactgctcagaaagtactgcagcatgtcttcaaatgcctgaggatcaagttggaaaactagaagcaacagaaaacacaataagcgcaatggcggcggccgcggcggagcagcaacagttctacctgctcctgggaaacctgctcagccccgacaatgtggtccggaaacaggcagaggaaacctatgagaatatcccaggccagtcaaagatcacattcctcttacaagccatcagaaatacaacagctgctgaagaggctagacaaatggccgccgttctcctaagacgtctcttgtcctctgcatttgatgaagtctatccagcacttccctctgatgttcagactgccatcaagagtgagctactcatgattattcagatgg

SEQ ID NO: 3759 - DNA, 1725 bp, Homo sapiens
  source 1..1725: mol_type = genomic DNA
cactaaactagcaacaggatcaaaagatacaacagttatcatatggcaagttgatccggatacacacctgctaaaactgcttaaaacattagaaggacatgcttatggcgtttcttatattgcatggagtccagatgacaactatcttgttgcttgtggcccagatgactgctctgagctttggctttggaatgtacaaacaggagaactaaggacaaaaatgagccagtctcatgaagacagtttgacaagtgtggcttggaatccagatgggaagcgctttgtgactggaggtcagcgtgggcagttctatcagtgtgacttagatggtaatctccttgactcctgggaaggggtaagagtgcaatgcctttggtgcttgagtgatggaaagactgttctggcatcagatacacaccagcgaattcggggctataacttcgaggaccttacagataggaacatagtacaagaagatcatcctattatgtcttttactatttcaaaaaatggccgattagctttgttaaatgtagcaactcagggagttcatttatgggacttgcaagacagagttttagtaagaaagtatcaaggtgttacacaagggttttatacaattcattcatgttttggaggccataatgaagacttcatcgctagtggcagtgaagatcacaaggtttacatctggcacaaacgtagtgaactgccaattgcggagctgacagggcacacacgtacagtaaactgtgtgagctggaacccacagattccatccatgatggccagcgcctcagatgatggcactgttagaatatggggaccagcaccttttatagaccaccagaatattgaagaggaatgcagtagcatggatagttgatggatgttggttcctgcaaacaagaactgaccctatcacctctgcctcacagtgggtaaatatatcatacatctcttgaaagggaaaatatccatgtcagtttctttcacagtagaagaatggctgcttttgaatggggaggaaagaagacatttttcttaatatcctttttgtcccatctctaaaatgtataaatattttgatttggttttactttaatttctcattcataatttcgcaactgtccttttgggttgccctccaacacattacttccatttcagaaaccatatctgatttaatataaactgctaacttaagaagaggtgaatttgcatttacacttagacactttctaaaaacagggtgaacttaattgaaatttttcagtgttgttaagctattgttatagtagctgccctatagttacaaaaataaaaactataaaaacccatcccctatctacttaatccagatagcctggatttaacaaaaccaatagtataaaaatgtgtgtgtgtgttctgtgtgtgtgtgagagagagagtacttgattcattaaaaagtcctggaaacagctgttctaggatcttgtcatttttactgaaagtctcgtgcacatgtgaagtgccctctgagtttaaggtttggttaatactggtatatttttataagattgaaattgtgtccccatctttaacttaaacattttcattatcagggtcaatgtgctagaactgaattgtaacatttttaggcacagatggaaaaaaatgttattggctccttgaaaatgtgtgtgtgtggcgaggggaatagatccacaaaagcatgtatgt

SEQ ID NO: 3760 - DNA, 2166 bp, Homo sapiens
  source 1..2166: mol_type = genomic DNA
ggcccgcggagtccagcgaagtttggcggaacatggcggaagcgtctggggcacgcaggagcgcggggcggcggcggccggagcccgaggagctgtagcagccttagtcgccgccgccgcggggcgaggtcgccgccatggcccgctggatcccgaccaagaggcagaagtacggggttgcgatctataactacaatgcttctcaagatgtggagctctccttgcagatcggtgacacagttcacatcctggagatgtacgagggttggtacagaggatataccctccaaaataaatctaaaaagggcattttccctgaaacatatatccatttgaaagaggcaactgtggaagacctggggcagcatgaaaccgtgattcctggcgagctccccctggtgcaggagctcacgtccactctgcgagaatgggctgtcatctggcgaaagctctacgtgaacaacaagctcaccctcttccgccagctgcagcagatgacgtacagcctgatcgagtggcggtcccagatcctgtctgggacgctccccaaggatgaactggcagagctcaagaagaaagtcacagccaaaattgatcatgggaacagaatgctggggttagatctggtggtgcgagatgacaatgggaacatcctagaccctgacgaaaccagcaccattgccctcttcaaggcccatgaggtggcctccaaaaggattgaggaaaagatccaagaagagaagtcaatcctgcagaacctcgatttgcggggccagtccatcttcagtaccatccacacctatggcctctatgtgaacttcaagaactttgtctgcaacatcggggaagatgcagagttgtttatggccctctacgacccagaccagtccacttttatcagtgagaactatctaattcgttggggcagtaacgggatgcccaaggaaatagagaagctcaataacctccaagcagtgtttacagaccttagcagcatggacctcatccggccccgcgtcagccttgtgtgccagattgtccgcgtgggccatatggagctgaaggaaggcaagaagcacacctgtggactccgaagaccttttggagtggcagtgatggatattactgatatcatacatgggaaggtggatgatgaagaaaagcagcattttattccctttcagcagtaagtactttggcatgtgtcccaggtgacttgagacctggattagccattcaattgtcttttaacacagaaacaggtgttagaaaccattttctcagagaaggaaagattctaagctgcaagattgtcagataggagctgaacagaagactttattcaaagtccttgatgttggactcccattgaagagggtaaactgaactttcctgattctatagaaagcatcaaaggaatataaaagggcacatatctgtctgctctggaatgcagagagggtgccgtccttgtgtcagcaatgccaaaatatatgtgcagtctattgcatgaaacaggcatcatggatgacacggaatcacgtgggctagcatagggcttctcagactgcatcatgcatatgaatcaggggaacttgttaggctgcaggggagttctgcctctgacaagctcccaggtgatgctgatgtagctggtctgagggccacactgtctgtagcgagggtttaggagatgagagagtgaagggctgacccacccatgggccagtgttcctgcatgttgggggaaagccagcctgggagcatgtgaaaggatccttgcagagctttactgaggccctccatattgagctgcaggagctggagccatgggtaggccattgaggagctgttgggagcagattcaagccgtgtcactctgaagaagtgcaggtgtgaacgtcatgacctgctccagcacctgcacaggcagtggaggcctagtggaggccaagagcattgccgggaccaagtcccaccaggggccatcgtgccagtcagagggcatcatctcagctcacttgcagctgccactgcagacaagtagaacaaactgagaattccacaaaccagccagagtcatatatttgagttaatatatcactttttacaaatgatatcacaaattagtggagaaagatacattatgcaaaaaaaaaaaaaaaa

SEQ ID NO: 3761 - DNA, 555 bp, Homo sapiens
  source 1..555: mol_type = genomic DNA
gacctcccacaactggagcagccgggaacagctctgaccacatttttatttcacttaggtggttccggggagaagcctttccaggacccatgtgtaggcacaactgttttccctgatcaggatacttgcggcactcaacagaggaaagaaattcctaagggaacactgctcagaaagtactgcagcatgtcttcaaatgcctgaggatcaagttggaaaactagaagcaacagaaaacacaataagcgcaatggcggcggccgcggcggagcagcaacagttctacctgctcctgggaaacctgctcagccccgacaatgtggtccggaaacaggcagaggaaacctatgagaatatcccaggccagtcaaagatcacattcctcttacaagccatcagaaatacaacagctgctgaagaggctagacaaatggccgccgttctcctaagacgtctcttgtcctctgcatttgatgaagtctatccagcacttccctctgatgttcagactgccatcaagagtgagctactcatgattattcagatggaaacaca

SEQ ID NO: 3762 - DNA, 549 bp, Homo sapiens
  source 1..549: mol_type = genomic DNA
agcacctttgttcctactatagtcttcctttatttaagtcagttcatctccctctcgctttgcccacaaccttagctttgagtttagtgatctaagctccctgcctgctggtcactctctctctccagctaagccacagggtcactcttacttttgtcccttcacttggattcccaccactctctgagaaagttgctcagcttctctgtctcatctttacaccagctgaactctgttgtttctccctagaccgggcaaggtcccccaggccaggatgtcaggcctggtgttggggcagcgggatgagcctgcaggccaccggctcagccaagaggagatcctggggagcacacggctggtcagccaagggctagaggccctacgcagtgaacaccaggccgtgctgcaaagcctgtcccagaccattgagtgtctgcagcagggaggccatgaggaagggctggtgcatgagaaggcccggcagcttcgccgttctatggaaaacattgagctcgggctgagtgaggcccaggtgatgctggctctagc

SEQ ID NO: 3763 - DNA, 588 bp, Homo sapiens
  source 1..588: mol_type = genomic DNA
gttgtgagctgcggcagagactggtggctggaggagacgccggcgctggagagtgcgctgcgccgcccgccgctgagggaccgcggggttagccactgctggctgcttccagtgttcgccgagagccacataaagaagatccctaatagtcatttctcaacaattatatagtcaactgatgtaacaatggtactaatattgggacgcagactaaacagagaggatcttggggtgcgtgattccccagcaactaagcgaaaagtttttgaaatggaccccaaatctctgacaggtcatgagttttttgacttctcttcaggatcatcccatgccgaaaacatactccagatatttaatgaatttcgtgatagccgcttattcacagatgttatcatttgtgtggaaggaaaagaatttccttgccatagagctgtgctctcagcctgtagcagctacttcagagctatgttttgtaatgaccacagggaaagccgagaaatgttggttgagatcaatggtattttagctgaagctatggaatgttttttgcagtatgtttatactggaaaggtgaagatcactacagag

SEQ ID NO: 3764 - DNA, 1917 bp, Homo sapiens
  source 1..1917: mol_type = genomic DNA
agatcagaaaagggagctcaggtaccttccagagagtgagacccagcgcccttgtctcgcacccagtaggctttcatccccgccatggcggagctgatccagaagaagctacagggagaagtggagaaatatcaacagctacagaaggacttaagtaaatccatgtcggggaggcagaaacttgaagcacaactaacagaaaataatatcgtgaaagaggaactggccctgctggatgggtccaacgtggtctttaaacttctgggtccggtgctagtcaaacaggagctgggggaggctcgggccacagtagggaagaggctggactatatcacagctgaaatatttctgaggacaatcccagacccaggagatgttccagactcatttttctgatattcagagagggcaagagtcttggcctatgtcacacagcagagtccaggactccagaactccaacctagcactctggccagaaagtcagccagaggaaggaaaactgggaatgaagagtcagaggtgagaagctaaagtcatgatctcaccaagggatcaagaggtcgatattggcggcttgtgacggtaaacacggcaccatcctcctcctcatcccagacggacacaggggcctggaggagcaaggaaggggaagtcagacagttccacaccaccccccattgccctcagccttcaccccaggccctgctcctccctctgtacccctcacctgtggtggcagggcatagtaccagcgagtgcgaggaagggttgggggagctggtgaccccaggtctcccccactggggcccagacagccccaccccagccgcctcagggccccggtggagtcgaaggggctgcagtggaggcgtggatggagtacaggaattctgatcctggagacccccaaagccccttctccccagagctgaacccacacacgacagagaagcagggtacaaagggcaggagagggaagcgagaggcagcaagccagaggcagcgactaggggtagctgaaacctcagtccaggcactgccgcatgccccgcccctcccggccaaggactataccagcccagagaattagtctttttcaggacccctttcaccctggtccctcgggtagcgcctccactatctcagccctaagggacccccgaaggtagcagctccaatcccagtacaggaaggaaaaggggaagtgggatgatagggggttgggggcggtagactcagagagtcacgtggccccagcccctcccccgaccgatcccgaaaaaccagccctgccagtcaacctgccctcacctaggatctggacctaggagtttagggcctcggggccccaaatccaaattctggcccctcctgaggcccgaaatcctgctcctggccaccaccattaatccctaatgaaaacagatgaccactctctacccaccctaggatctttcctccaggtcccagaaccgtggcttcccggcctctacccaggaccggggcggggcgggggggcggggggaagggggagagagggaaggaggggtcacgaaatctgagggttccctccccaatcccagagtcagaggagctggttactgtggaaacaaacccctccccgccaaacaaaaacaaggagggagacagggaccaagacacgactgctcagagaggtaggcacactcaggcaggcagaggtggagggccaaagacccgcagggacaggacagccagccagaagttccaggcaggaacagggcaggttcctgcgggcaggtcctgagtcacactgacagagaaccacggagacgccaggactccccgcagcagagaaacgggccgacacccagggaggcgcgagaataactgaggcaaggaggaggagatgtagggacccagagacaagagaaaa

SEQ ID NO: 3765 - DNA, 2010 bp, Homo sapiens
  source 1..2010: mol_type = genomic DNA
gcgcagaggcgtcacgcactccatggtaacgacgctcggcccgaagatggcggccgaatggggcggaggagtgggttactcgggctcaggcccgggccggagccggtggcgctggagcgggtcataaataaagttcatcttaaggcaaatcatgtggtcaagagagatgttgatgagcatttaagaatcaagactgtctatgataaaagtgttgaagagttgctccctgagaaaaagaatcttgtaaagaacaagcttttcccacaagcgatttcttatttagagaagacttttcaggtccgtcgacctgcgggcactatcttacttagcagacaatgtgcaacaaaccaatacctccggaaggaaaacgatcctcacaggtactgcaccggggagtgtgccgcacacacaaagtgcggccccgttattgttcctgaggaacatctccagcaatgccgggtctaccgtgggggtaagtggcctcatggagcagtgggtgtgccagaccaagaaggcatctcagatgcagactttgttctttacgttggtgctctggccaccgagagatgcagccatgaaaacatcatctcttatgcagcctattgtcagcaggaagcaaacatggacaggccaatagcaggatatgctaacctgtgtccaaatatgatctctacccagcctcaggagtttgttgggatgctgtccacagtgaaacatgaggttattcatgccctgggtttctctgctgggctgtttgcattctaccatgataaagatggaaatcctctcacttcaagatttgcagatggcctcccaccttttaattatagtctgggattatatcaatggagtgataaagtagttcgaaaagtggagagattatgggatgttcgagataataagatagttcgtcacactgtgtatctcctggtaacgcctcgtgttgttgaggaagcacgaaaacattttgattgtccagttctagagggaatggaacttgaaaatcaaggtggtgtgggcactgagctcaaccattgggaaaaaaggttattagagaatgaagcgatgactggttctcacactcagaatcgagtactctctcgaatcactctggcattaatggaggacactggctggtataaagcaaattacagcatggctgagaagttagactggggccgaggaatgggctgtgactttgtcaggaagagctgtaaattctggattgatcagcagagacaaaagagacagatgctgagcccttactgtgacacgctcagaagtaacccactgcagctaacttgcagacaggaccagagagcagttgccgtgtgtaatttgcagaagttccctaagcctttaccacaggaataccagtactttgatgaactcagtggaatacctgcagaagatttgccttattatggtggctccgtggaaattgctgactactgccctttcagtcaggaattcagttggcatttaagtggtgaatatcagcgcagctcagattgtagaatattggaaaatcaaccagaaatttttaagaactatggcgctgaaaagtatggacctcattccgtttgtctaattcagaaatcagcattcgttatggagaagtgtgagaggaagctgagttacccagactggggaagcggatgctatcaggtttcttgttctcctcaaggtctgaaagtttgggtccaagatacttcatatttgtgtagtcgggctgggcaggtcctccctgtcagtatccagatgaatggctggattcacgatggaaacctgctctgcccatcatgttgggacttctgtgagctctgtcctccagaaacagatcctccagccactaacctgacccgagctctgccacttgatctttgttcctgttcctcgagcctggtggtcaccctctggcttctgctaggcaatctgtttcctctgctggctggatttcttctgtgtatatggcactaggaatggaaaagtggatcttcaagatattct

SEQ ID NO: 3766 - DNA, 1799 bp, Homo sapiens
  source 1..1799: mol_type = genomic DNA
agattgctagtttcctcacagagctccagtccacactcggccctgaacgcggagttgaatcagctggctgaagctgagtgcctctcttttcctttcttgggaacaggaaaggtgctgtggagaggaattggggcgggatcattcaggggaaggtgacagcagatggtgggaaggccggagtcagcaagccaagtgtcaggggcagagtgagcctcagaaaacagcagctgcccggtgccagagcaaggaaaggccagggaggctgggcggggcagtgtctgtgggacagagtggggcaagaacacacacggccgggcacagcctcttagccagctctccatgtcagtatgagcagtaaccagggaactgggcaattggcacatcagcctatcagaattcatgggaggttatttcttaagtgaaattctaaagagttaaaggatgaatttggacagtgatggaatggatgacatcatcagtcaagaatcctcattggatatggaggggaattataaaaaggcacagaaaaatgagagagagtctatcagacagaagttggcacttggaagcttctttgatgatggcccaggaatttataccagctgtagcaaaagtgggaagccaagcctttcctcccgactgcagagtgggatgaacttgcagatatgctttgtcaacgacagtggcagtgataaggacagtgatgctgatgacagtaagactgaaaccagcttggacacccccttgtctcccatgagcaaacagagttcttcctattctgatagagacactactgaagaggagtctgaatccttggatgacatggacttccttacaaggcaaaagaaattgcaagctgaagccaaaatggcccttgccatggccaaaccaatggccaaaatgcaagtagaagtggagaaacagaacaggaaaaagtctcccgtcgctgatcttctgccacacatgcctcatataagtgaatgcttgatgaaaagaagtttaaaacccaccgacctgagagacatgactattgggcagctacaagtgatagtcaatgatctccattcccagatagaaagcttgaatgaagagttggtccagctgcttctcatccgagatgagctgcacacagagcaggatgccatgctggtggacattgaagacttgaccagacatgctgaaagtcagcagaagcacatggcagagaaaatgcctgcaaagtgaaaagaagccattcaaccagagaacaagctagaatttattttgcttctgtggttgtaaaaatgctgttgctaaaggtggcgcagaaacaaatatcagtgttagtcattgataatgtctgaagcttaatgtccagtgattggcctttgcttcttaatttattttaattttttacttgtgccacttaatatcaggcattttaataaaatattgttacaaaaaatgtacagtactgacaccaccacaaatcatggttaataaaagagagtagttttaactttatttttatttgtttagagattttaagttggaacagtattttcccattgactacttttcattcttcactgtagttttaaagaagaactgtaaatgacggtgctatacaagtcaaaaaatacatgcctgcctcgtagtgaagttgtagctctccgtaatatgtatattttactcagttttcaacattttgtgaatgttgactacctgaagttcctttttagatgtgctattaacattctgttggattcagagggttccttgaaagttttatgtataaatatgtaaaataaaaattaaaa

SEQ ID NO: 3767 - DNA, 2056 bp, Homo sapiens
  source 1..2056: mol_type = genomic DNA
cccggcgccagcggccgcgtcggcgcggatgtccccgcccgcctctggttcgggcctcagcgagattactggaggattagatccggatcccgtccccgggcagcggccgccgcggccagcgccgccccgcgagttgcgagctccgggctggccctgctctgacaggctcgccccgccccacacgacacgcctgccactcctgcccccaggtcgctgaagagttcgaaaccgtgctcagcaccgcgtttggggcatgtgagaccgagaggctttgggaaactgacgccgctgtgagaacgagtttagcggagtctatggacgctgcgagcttgtggccacaagagggcgccccggagcacggcccagtccccgcccccgctggatggggcccggcctcttcccagcgttcctcctccggccccaggtcaccgccagcacgcgcctgcttcccgtctgcgcgagtccacgcagctccccaggcccttcaccagcacagcagcagcaggcatggcagcaagcgtggagcagcgcgagggcaccatccaggtgcagggccaggccctcttcttccgagaggccctgcccggcagtgggcaggctcgcttctctgtactgctgctgcatggtattcgcttctcctccgagacctggcagaacctgggtacactgcacaggctggcccaggctggctaccgggctgtggccattgacctgccaggtctggggcactccaaggaagcagcagcccctgcccctattggggagctggcccctggcagcttcctggcggctgtggtggatgccttggagctgggccccccggttgtgatcagtccatcactgagtggcatgtactccctgcccttcctcacggcccctggctcccagctcccgggctttgtgccagtggcccccatctgcactgacaaaatcaatgctgccaactatgccagtgtgaagactccagctctgattgtatatggagaccaggaccccatgggtcagaccagctttgagcacctgaagcagctgcccaaccaccgggtgctgatcatgaagggggcggggcacccctgttacctggacaaaccagaggagtggcatacagggctgctggacttcctgcaggggctccagtgaagcccagcactgctgcagggggtgggctgcctgcctgctctgagctctctcttgcacgctctctcttctctcccaggctctggctcatgcacatgcaacaggtgcgtctgtctatatgtctgggttcttgtcttttgtggtctgtttgtcttttctacctctttctcttgcagtgatagactgagggggtaaaatcaagagaaaaaactctcaggaatcaaggaacataatcctgtggagggtaatccattacatgagcttctcctgttcttccactttcctgcctggctttcactccttcccctgctctgcccagcctttccctcccacccactcctccttctgcaaatgccctgaaggccagcccttaccccaacacccacttccccacctccttaggccccagatacatacatgcccacatgcacgcttacatgtttagagccatccttgtttccaaatatgacccttcgcttgagggcaactgcataggtacatctaactctggactggcatgcacattgtcatgtgcagctttgcatatacacacatgcatacatgagcctccacacaagcacttgcacacatgtggactcctaaccatgctaacctcactggctgggaaggtggggaccccatgggccagcccttgcaggaggcccttttgcaaggcttagggtgtggccagccctgaaagctacttggacacaggtttcagctggccccagcccagaagtgacccccagaaagggagggccaccgctttgccccctgcttttacccttccttctgggtgctctacacctcaggttaccaggcctgaggcatctcagccaagcttgtttcctgctctgaggcttgtggggtgggagccagagtggaggtcggtgaaataaagtgatgcaattagacccca

SEQ ID NO: 3768 - DNA, 597 bp, Homo sapiens
  source 1..597: mol_type = genomic DNA
aatgtgtttgagaaaactgttttcctcggacatgcaggcgtggactccttacttcaggtaaggtgacagcagcttgacagagagtgccttccctcccacggcatttgggacgaggctgaaggaaagacacaggcggggttacgggaaacccattctctgcgccatctgggcaagctgaagtcagtttttccgctttctcacgagacacgtctgcctctatgaaccagcgcagccatctgggcaccacctacctggacacggccaaaggcgcggtagagaccttcatgaagctccgtgcccgggaccctgccagcagaggagacaggtatatgctggtcactttcgaagagccgccctatgctatcaaggctggatggaaagaaaaccatgcaacgtttatgaatgaattgaaaaaccttcaggctgaaggacttacgactcttggccaatccctaaggacagcttttgatttattaaatttaaatagattagtaactggcatagacaactatgggcagggaagaaacccttttttcttggagccagcaataattatcacaattactgatgggagcaagttgactaccaccagtggag

SEQ ID NO: 3769 - DNA, 1755 bp, Homo sapiens
  source 1..1755: mol_type = genomic DNA
aggcgcagtcccgcgttccctcggcggctgccggcgtagtgagcccgccgccgtggagtgtagcggaaagggctcgccgtcctcctccgtttctcgctgcttcgggacgcgctctctgcggctctgtgagcgcccctgagcgccggcagcggccgcggtgggttcttcaggttatcttatgatgaggcttttgctatggctaatgatcccttggaaggcttccatgaagtaaaccttgcttcacctacttctccggaccttcttggtgtgtatgaatcaggaactcaagagcagactacctcaccaagtgtcatctaccggccacacccttcagctttatcctctgtacctatccaggcaaatgcattagatgtttctgaacttcctacacaacccgtgtattcatcccccagacgtttaaattgtgcggaaatatctagtatcagctttcatgttacagacccagccccttgctctacctctggagtcacagctggattaactaaattaactacaagaaaggacaactataatgcagagagagagtttttacagggtgctactataacagaggcttgcgatggcagtgatgatatttttgggttgagtactgatagtctgtctcgtttacgaagcccatctgttttggaagttagagaaaagggctatgaacgattaaaagaagaactcgcaaaagctcagagggaactgaagttaaaagatgaagaatgtgagaggctttcaaaagtgcgagatcaacttggacaggaattggaagaactcacagctagtctatttgaggaagctcataaaatggtgagagaagcaaatatcaagcaggcaacagcagaaaaacagctaaaagaagcacaaggaaaaattgatgtacttcaagctgaagtagctgcattgaagacacttgtattgtccagttctccaacatcacctacgcaggagcctttgccaggtggaaagacaccttttaaaaaggggcatacaagaaataaaagcacaagcagtgctatgagtggcagtcatcaggacctcagtgtgatacagccaattgtaaaagactgcaaagaggctgacttatccttgtataatgaattccgattgtggaaggatgagcccacaatggacaggacgtgtcctttcttagacaaaatctaccaggaagatatctttccatgtttaacattctcaaaaagtgagttggcttcagctgttctggaggctgtggaaaacaatactctaagcattgaaccagtgggattacaacctatccggtttgtgaaagcttctgcagttgaatgcggaggaccaaaatcacttctgtatgtaacttttttacatacattcgatacattcagcagggactcgtgaaacagcaggatgttgatcagatgttttgggaggttatgcagttgagaaaagagatgtcattggcaaagctgggttatttcaaagaggaactctgatgctctgcgtgggaccatgcctgaactccccgaataactgaaaaatggctgaatatttttatggttacttgatatttatttccaaggagtgagcctaagacttttttccccttttgcaaattgctctaagaagtaccatgatttcttttaaactgatctatgctgtgtttgcttattctttagttgaacacactatgaagaattccaggtgtactagtgaatgtaatttatagttgccaaaaaaaaaaaaaacctgaaataaataaatgttagattg

SEQ ID NO: 3770 - DNA, 825 bp, Homo sapiens
  source 1..825: mol_type = genomic DNA
cttgtacctgtcgttcgcagtggctcactttcccaagccatgggcagcaggaagaaggaaattgccctgcaggtcaacatcagcacccaagagctttgggaggaaatgctcagttccaaaggactaactgttgttgatgtctatcaaggctggtgtggcccctgcaaacctgtggtgagcctcttccagaagatgaggatcgaggtcggcctggaccttctgcactttgcattaattaaagatgaggctctttctgatgaagatgaatgtgtttcccatggaaagaataatggtgaagatgaggacatggtttcatcagagaggacctgtaccttggccatcattaaaccagatgcagtggcccatggaaagactgatgagattatcatgaagattcaggaagctgggtttgaaattctaacaaatgaagagagaaccatgacagaggcagaagtgcgacttttctaccaacacaaagctggagaggaggcatttgagaagctggtacatcacatgtgcagtggaccaagccacctcctgatcctcaccaggactgagggcttcgaggacgtggtcactacctggcgaaccgtcatgggcccccgtgaccccaatgtggccaggagggagcagccagaaagtctccgagctcagtacggcacagaaatgcccttcaatgccgtccatggaagccgggacagagaagatgctgacagagaactggcattgctcttccccagtttgaaattttcagacaaagatacagaagcccctcagggtgagtccagtacacagccaaggttgaagatcactgacctagactaa

SEQ ID NO: 3771 - DNA, 3844 bp, Homo sapiens
  source 1..3844: mol_type = genomic DNA
gcagtactccctgattggctctgcactggaggcagtgattttggggcagagaattttgcaacacgtggtagtgaactgtgaggagtttgaggggtctgaagactgaaagagtcgaatggtttgttggcaggacctagaagaatcccttaggatgaagctgagtcttaccaaggtagttaatggctgtcgcctaggaaaaataaaaaacctgggcaaaacaggggaccacaccatggatattccaggctgccttctgtataccaagactggctccgccccacacctcacccatcacacgctgcataatatccacggggttcctgccatggctcagcttacgctgtcatccctagcagaacatcatgaagtcttgacagaatataaagaaggagttggaaagtttataggcatgccagaatcactcttgtactgctccctgcacgatccagtcagcccctgcccggctggttatgtaacaaacaagtctgtgtctgtgtggagtgttgcaggacgagtggaaatgactgtttccaagttcatggcaattcagaaggcccttcagccagactggttccagtgcctctccgatggagaagtatcttgtaaggaagcaacttccataaaaagggtcagaaagtctgttgaccgatcacttcttttcttggataactgtctgcggctgcaggaagagtcagaggttcttcagaagagtgtgatcattggagtgattgaaggtggagatgtgatggaagagaggctgaggtcagcacgagagacagccaagcggcctgtgggtggcttccttctggatggttttcaaggaaatccaacaaccctggaggctagactacgcttgctgtcatcagtcactgcagagctgccggaggacaagccaaggctcatatctggtgttagtcggccagatgaggtgctcgagtgtattgaaagaggagtggacttatttgagagttttttcccttatcaagtaacagagcggggatgtgccctgactttcagttttgattaccagccgaatcctgaagagacactactacaacaaaatggaacacaagaagaaataaaatgtatggatcaaataaagaaaattgaaacaactggttgcaaccaagaaataacatcatttgaaattaatctgaaggaaaaaaagtaccaggaggactttaacccgctggtgagaggatgttcctgttactgctgtaagaatcacactcgggcatacatccaccatctgctggtgaccaatgagctgctggccggagtcctgcttatgatgcacaactttgaacactactttgggtttttccattacatccgggaagcactaaaaagtgacaaactggcacagttgaaagagctcatccacaggcaagcatcttgagatcttgcaaatacaagtctcactcttcacactgagcctgtaccactgttgtaacatgggaagacgtgaagaagaaataatctgagctttaattatttatatttggatataaggtctgcttaaataaagaatctttgtaccaaactgcccacatgagggtgaagagatttcctcaaaagacttaaatgacctggattgatcagagagaattgaactgtgacctttaagacttctagactaattcttttagttgatagagattcatttagtcaaagacaaaagctttaactgtgagggcacagccttgaagtgggagtgatgagattctgagggacccatgaattggattgaggcttgaggggaaatggtgtgagacgaatgggctctggacatatgcctgttgatttgagaagaaatctggctggtttgagggtttcctttagttcaccctcatactctcaggagactcttctggatacttttgtcttccaccctgccctggcagtgcagccaatcagaaatggctcttgtgacttaactgggcttggatatccctggaatgtggggcttgaacattgctcctgtgatgatcatctgtcccaggtcacactccttcatttgaccacatggcctatttgcaacttctttttagagccaatgtaattgcctgttaggagccagaagtttgcccagctgctttcttctggttgtacagatccattgtggtctgccttccaggctcattaatagtctaactacgtaataactgaagacctatctcttgtgaagattcattctcaatgtgttcacttggacagagccctgcctggcctaacgattagagggttagtctccatcctgctcagatatgactcctgggcaattcacttaacttctccatggctgcttcctgctgaataaatagggacaggcataatggataggaatgaatgaacttttaagatactgtctagctctaaaattggaagaacaaaaagttttagattagagtcatagccttaatagccctagttgtcatcctgggagacaggcaacagtagagatatttgagagcctaaagagaggtttggcctgtgggtttttaagtggttattgaattggtatcaggagatcctgaggctggtaggggaaggtaattctttctaagttacctctgtatttttcaagttttctataaggaatacacatacacccacatgcacacaccatagtttttatacaaacagcaataacaaaaccaaaaagatgcccctttttttgtagggataagaaatacatttgttttatacttctatgctatattttgctattcaaaatttagtgggcattacttaacattgtttctaattattttgtggctgctgtatgttttatgtgttgggagcccattgtattaggccgttcttggattgctataaagaaatacctgagactgggtaatttggttttttggttttttggggttttttttgagacggagccttgctctgtcgcccaggctggagtgcagtggcgcgatctcggctctatgcaacctccacctcctgggttcatgccattctcctgcctcagcctcccgagtagctgggactacaggcgcccgccaccatgcctggctaattttttatatttttagtagagatggggtttcaccgtatgagccaggatggtctcgatctcctgacctcatgatccacaagactgggtaatctgtaaagaaaagaggtttaattggctcatggctctgcaggctttacaggaagcatggtactggcatctgcttggtttctggggaggcctccggaagcttatagtcatgacagaaggtgaagggggagcaggcacatcacatgacaaaagcaggaacaagactcagagcaagaagtcacttatcaccaaggggatggcccaggccattcatgagggatccacctttgtgctccaaacacctcccaccaggccccacctccagtattggggattacatttcaacttgaggtttgggcgggaacaaatagtcaaattatattacccatctacatggttttctttttcttagtatgggagtgtccatgaataaattcatgggcatcctcataactcttccatgaatggcaaggggtacttatggaaaacagttttccaaagatctgattgttttgaaatgtgttagattggacttgttcaaatgttcatatttttgttctatgctaaatgcatcgttaggggagtagtggtaaatattccagaatccatatgaaattcatgagtttatttatgtctaaaacactgaaaactgtgtccaatatcgttcagtttcctgggtctttttcttattagcacatttgagaaaaatattcctttcctttattgtagtaaatctattaaaggcaatagccaataaaacatttttaattttaaaaa

SEQ ID NO: 3772 - DNA, 474 bp, Homo sapiens
  source 1..474: mol_type = genomic DNA
tccggcgcccgcgaggccccgagtcctcctccggagggcggctgcgggcctgccctcttctcctaaccagacacgtctgcctctatgaaccagcgcagccatctgggcaccacctacctggacacggccaaaggcgcggtagagaccttcatgaagctccgtgcccgggaccctgccagcagaggagacaggtatatgctggtcactttcgaagagccgccctatgctatcaaggctggatggaaagaaaaccatgcaacgtttatgaatgaattgaaaaaccttcaggctgaaggacttacgactcttggccaatccctaaggacagcttttgatttattaaatttaaatagattagtaactggcatagacaactatgggcagggaagaaacccttttttcttggagccagcaataattatcacaattactgatgggagcaagttgactaccaccagtggagtccaggatgag

SEQ ID NO: 3773 - DNA, 503 bp, Homo sapiens
  source 1..503: mol_type = genomic DNA
caggtagtgcccgctggagctcgcgcgctcatccggcaccactccagggctccaggctcctcgggcttccggagtcgagacgtgaagatgaatccggcctcggcgccccctccgctcccgccgcctgggcagcaagtgatccacgtcacgcaggacctagacacagacctcgaagccctcttcaactctgtcatgaatccgaagcctagctcgtggcggaagaagatcctgccggagtctttctttaaggagcctgattcgggctcgcactcgcgccagtccagcaccgactcgtcgggcggccacccggggcctcgactggctgggggtgcccagcatgtccgctcgcactcgtcgcccgcgtccctgcagctgggcaccggcgcgggtgctgcgggtagccccgcgcagcagcacgcgcacctccgccagcagtcctacgacgtgaccgacgagctgccactgcccccgggctgggagatgaccttcacggccactggcca

SEQ ID NO: 3774 - DNA, 2445 bp, Homo sapiens
  source 1..2445: mol_type = genomic DNA
ctctttgaggctttctgatgcctagagtgagctcaactcaaaggtttccagcctcacactcgcctcacattcccccacagtcacattgcgctctgtgattctgaggaatacagtgtgccagcatccgatccagtctcctttcacctgcaggtgttccagaaacttcaaaatgcgtctggaagaactgaaaagattgcagaatcctctagaacaagttaatgatggaaaatattcatttgaaaatcaccagctggccatggatgcagagaataatattgaaaagtatcccctcaatctacagcccttggaatcaaaggtgaaaatcattcagcgagcatggcgagagtacctgcagcggcaggagcccctggggaagaggagcccgtccccaccctctgtctcctcagagaagctgagcagctctgtcagcatgaacaccttctccgacagcagcacacccgattaccgagaggatgggatggatctaggcagtgacgccggcagcagcagcagcagcagccgcgccagttcacagtccaactccaccaaagtgaccccttgctccgagtgcaaatcttcatcgtcgccggggggcagcctggacttggtgtctgccctggaggactatgaggagcccttcccggtctaccagaagaaggtgattgatgagtgggcgccggaggaggacggggaggaggaggaagaggaggacgagcgcgaccagcgagggtaccgggatgaccgctctccggcccgggaaccgggggacgtaagcgccaggacccgcagcggcggcggcgggggcaggagcgccaccaccgccatgccgcccccggtgcccaacggcaacctccaccagcacgacccccaggacctcaggcacaatggcaacgtggtggtggctggccggccgagctgttcccggggcccccgccgggcgatccaaaagccccagccggctgggggccggcgcagtggccgcggcccggcggctggggggctctgccttcagcccccagacggcgggacgtgcgtccccgaagagcccccggtgccacctatggattgggaggcgctggagaagcatctggccgggctgcagttccgggagcaggaggtacggaaccagggccaggcgaggaccaactccacctccgcacagaaaaatgagagagagtctatcagacagaagttggcacttggaagcttctttgatgatggcccaggaatttataccagctgtagcaaaagtgggaagccaagcctttcctcccgactgcagagtgggatgaacttgcagatatgctttgtcaacgacagtggcagtgataaggacagtgatgctgatgacagtaagactgaaaccagcttggacacccccttgtctcccatgagcaaacagagttcttcctattctgatagagacactactgaagaggagtctgaatccttggatgacatggacttccttacaaggcaaaagaaattgcaagctgaagccaaaatggcccttgccatggccaaaccaatggccaaaatgcaagtagaagtggagaaacagaacaggaaaaagtctcccgtcgctgatcttctgccacacatgcctcatataagtgaatgcttgatgaaaagaagtttaaaacccaccgacctgagagacatgactattgggcagctacaagtgatagtcaatgatctccattcccagatagaaagcttgaatgaagagttggtccagctgcttctcatccgagatgagctgcacacagagcaggatgccatgctggtggacattgaagacttgaccagacatgctgaaagtcagcagaagcacatggcagagaaaatgcctgcaaagtgaaaagaagccattcaaccagagaacaagctagaatttattttgcttctgtggttgtaaaaatgctgttgctaaaggtggcgcagaaacaaatatcagtgttagtcattgataatgtctgaagcttaatgtccagtgattggcctttgcttcttaatttattttaattttttacttgtgccacttaatatcaggcattttaataaaatattgttacaaaaaatgtacagtactgacaccaccacaaatcatggttaataaaagagagtagttttaactttatttttatttgtttagagattttaagttggaacagtattttcccattgactacttttcattcttcactgtagttttaaagaagaactgtaaatgacggtgctatacaagtcaaaaaatacatgcctgcctcgtagtgaagttgtagctctccgtaatatgtatattttactcagttttcaacattttgtgaatgttgactacctgaagttcctttttagatgtgctattaacattctgttggattcagagggttccttgaaagttttatgtataaatatgtaaaataaaaattaaaactttgtttc

SEQ ID NO: 3775 - DNA, 524 bp, Homo sapiens
  source 1..524: mol_type = genomic DNA
attgttctttggtattgtgccttacgtgagctggggactaactctgtatccttaaggaggcatcacttgattagagttgcccaaaagaatgtgggttattatcctaaaggtctgtgttgccatcctgaaacagtcagaaatcagtttttatttcacttaggtggttccggggagaagcctttccaggacccatgtgtaggcacaactgttttccctgatcaggatacttgcggcactcaacagaggaaagaaattcctaagggaacactgctcagaaagtactgcagcatgtcttcaaatgcctgaggatcaagttggaaaactagaagcaacagaaaacacaataagcgcaatggcggcggccgcggcggagcagcaacagttctacctgctcctgggaaacctgctcagccccgacaatgtggtccggaaacaggcagaggaaacctatgagaatatcccaggccagtcaaagatcacattcctcttacaagccatcagaaatacaacagctgctgaagagg

SEQ ID NO: 3776 - DNA, 3812 bp, Homo sapiens
  source 1..3812: mol_type = genomic DNA
agtgccccccgcgccccgctccggcagctccacgctcgcgcccgccatgccggagcagttcagcgtcgccgagttcctggccgtcaccgcggaggacctcagctccccggctggggccgccgccttcgccgccaagatgccccggtaccgaggggcggcgctggcgcgggaggagatcttggaaggagaccaagccatcctgcagagaataaagaaggctgtgcgggcaatccatagctccggccttggccatgtggagaatgaagagcagtaccgagaggccgtggaatccttaggcaacagccacctgtcccagaacagccatgagctgtccacaggcttcctaaacttggccgtgttcacccgcgaggttgctgcgctcttcaagaacctgattcagaacttgaacaacattgtctctttccccctggacagtctgatgaaggggcagctgagggacggtcgacaggattccaaaaaacagctggagaaggcatggaaggactatgaagccaaaatggccaagctggagaaggagcgcgatcgggccagggtgacaggagggatccctggggaggtggcccaggacatgcagagagagcggcgcatcttccagctgcacatgtgtgagtatctgctcaaagccggggagagccagatgaagcaaggtcctgacttccttcagagcctcatcaagttcttccacgcccagcacaactttttccaagatggctggaaggctgcccagagcctgttccccttcatcgagaagctggcggcctcagtacatgcactccatcaggcccaggaggacgagctacagaagctgacccagctccgggactccctccgagggacactgcagcttgagagcagagaggaacacctgagccggaagaactcaggatgtggctatagcatccaccagcaccaaggcaacaagcagtttgggacggagaaagtgggctttctatacaagaaaagtgacggaattcgaagagtctggcagaaaaggaagtgtggagtcaagtatggctgcctgaccatctcacacagcacgataaaccggcccccggtgaagctgaccctgctgacgtgccaagtgaggccaaaccctgaggagaaaaagtgcttcgacctggtgacccacaaccggacgtaccactttcaggcagaggacgagcacgagtgtgaggcgtgggtgtcagtgttgcagaacagcaaggacgaagccctgagcagcgccttcctcggggagcccagcgctggcccggggtcctgggggtccgccggccatgatggggagccgcacgacctcacaaagctgctcatcgcggaggtgaagagcaggcctgggaatagccagtgctgcgactgcggggctgcagaccccacgtggctcagcaccaacctgggcgtgctcacctgcatccagtgctcgggcgtccaccgcgaactgggcgtgcgcttttcgcgcatgcagtcactcaccttggacctgctgggcccctccgagttgttgctggccttgaacatgggaaacacgagcttcaatgaggtcatggaggcccagctaccctcacacggcggccctaaaccctcagctgagagtgacatgggcacccgcagggactacattatggccaagtatgtggagcataggtttgcacgccggtgcacacctgagcctcagcgactctggacagccatttgcaacagggacctcctgtcggtactggaggcctttgccaatgggcaggactttggacagccgctgccagggcctgatgcacaggcacctgaagaactcgtcttgcatttggctgtcaaagtcgccaaccaggcttccctgcctctggtggatttcatcatccagaacggtggtcacctggatgccaaggctgctgacgggaacacggctctgcactacgcagcactctacaaccagcccgactgcctcaagctgctgctgaaggggagagctttggttggcacagtaaatgaagcaggcgagacagctctggacatagccaggaagaagcaccacaaggagtgtgaggagctgctggagcaggcccaggcggggacctttgccttccctctacatgtggactactcctgggtaatttccacagagcctggctctgacagtgaggaggatgaggaagagaagcgctgcttgctgaagctcccggcccaggctcactgggccagtgggaggctggacatcagcaacaagacctatgagactgtcgccagcctgggagcagccacccctcagggcgagagtgaggactgtcccccgcccttgccagtcaaaaactcttctcggactttggtccaagggtgtgcaagacatgccagtggagatcgttctgaagtctccagcctgagttcagaggcccctgagacccctgagagcctgggcagtccagcctcctcctccagtctgatgagccccttggaacctggggatcccagccaagccccacccaactctgaagagggcctccgagagcccccaggcacctccagacccagcctgacatccgggaccaccccttcggagatgtacctccccgtcagattcagctccgagagcactcgctcctatcggcggggggcgcggagccctgaagatggtccctcagccaggcagcctctgcccagaaggaacgtgccggttggcatcactgaaggagatggctcaaggactgggagtctcccagcaagttctgtgcaacttttgcaagactagctccttgctggcccccacatgccccatgctaggccccaatgttcagagctgggacttgagctcacaaaactggggagctgagacatttgttctcttggatctcactctctctgtcccttgtgcctctgtagctggccttcttcctgccacaggccatgcctctaccaaggacacatggcctttccctgttaggactgatggcggttctttcctatctcattacccgctaggggcctgggagccctgtggctggatctgagtgctcctgagctggcttcagctgcagaactctcagtccctcatcagatcgagactctatttcccccgtcagtctgggggcttcacaagggcaggagagccctccatcactgacttccagatcagggaccctgccaagtagggactgtcttctcagccagccatttattagtctaatattccttcactaaattccaactctatgtctggacctgtgttaggcacttcagataccacacgagtaagacaagggccctgcaggggtggtcctttggtggaaagctggtcttaagggttgggcttgggaataggcagggtcagattccagggcatggctctggactcagctggtttatacctatatgaccattacaattgtctacagatcacatccattctggctggtcaacatgcatgctgtactggctgttaaataaaaatattctgaatgtcactccttttgagggacagcacagccttccctaggcattctcctatattccccaatgagaaagcagatacacctaagccatcatcaaccactaacatctcaacttgccagttgctgggtgctgggccctggcaggaatgggccaagccaagcaggggagactagagagcaccaatggccaacacagctgcctggctggggaggctgtgctgtttcccctggagacctgactggtctgtggttcccacaggaacagggttgtcttttgagcccccagtgtctggtttcattcatctcagacttgttatttcactcatctctaataaaggattggggggtcagttt

SEQ ID NO: 3777 - DNA, 583 bp, Homo sapiens
  source 1..583: mol_type = genomic DNA
ttttaggcgccattttcgagtgaaggacccggagccgaaacaccggtaggagcggggagcgaccatgccccgtaaaggcacccagccctccactgcccggcgcagagaggaagggccgccgccgccgtcccctgacggcgccagcagcgacgcggagcctgagccgccgtccggccgcacggagagcccagccaccgccgcagagactgcaagtgaggaacttgataatagaagtttagaagagattttgaacagcattcctcctcccccgcctccagcaatgaccaatgaagctggagctcctcggcttatgataactcatattgtaaaccagaacttcaaatcctatgctggggagaaaattctgggacctttccataagcgcttttcctgtattatcgggccaaatggcagtggcaaatccaatgttattgattctatgctttttgtgtttggctatcgagcacaaaaaataagatctaaaaaactctcagtattaatacataattctgatgaacacaaggacattcagagttgtacagtagaagttcattttcaaaagataattgataaggaaggggat

SEQ ID NO: 3778 - DNA, 7917 bp, Homo sapiens
  source 1..7917: mol_type = genomic DNA
gaagcttgaagacattatgctaagtgaaataagccagtcacaaaagaacaaatattgtattatttcagttatataaagtttctagactagtcaaattcatagaaactaggatgatagttgctagggtcagggagaagaggggatggaaaggtattgtttaatggatgcagagtttcagtttgagaagatgaataaaagaaaaaaatgacattaaattttgtcaagatagcatattgaaaatataatagaaaaatatttgtttatctgctataatatattatgtcataggtgttatcttcaggaaggcacactggacctgctaaattaacaaatggaaagaaagcgtaagtacttgaagacgtttacaacttcagatttcaaggaatttttcaggtctttgggctggatgacatgtcgtctaccccagaaaattaggtaggcctctaccatcacaagctctgaggaacaatttttcatgtctacccatgttaatcattttagtatttaacagtctttctgatcttcagaatgtgtttataaattcatcttgtacatggttggacaagctttcttgtctttgctggaaagaaaatgactacttactaatatattttgggaaaaatatttgtaagaatattaataagcttgttttccaggacctatttaagaaaaataccacgttttaatgcagattctggctattccatccattctgattcagaaagtcaggtaagattgaatagatacaatacacactattttaattagttttcaaatagtagctaaaaagtaggaataaaatgcaaagtattaattgctctaaggaagtatgaagtctgttgctttaaaacatcttttctaccaataatagtttgtaaataaacaaattttaaaactacataatttatattttttcctacactaacagtcatatacaaatgtattctaaatgactttatttcttacaggctgaaactgtacacgggcttgatggttgtgcttctttgctgagggacattttgagaaatgaagattcaggttttttttttttaattctttgctgatcaccttatctcaagtcattattttgatgtaacaaatttttgttttattaataggttcagaaacagcatatttagaaaacagatctaattctagacctttagaaagcaaaagatacggatcaaaaaagaaaagacatgaaaaacatactattcctttggtagtccagaaagaaacatgtaagccttttttctcttagttatttaaagataatccttaattgtgggtattttgatcaattatcaggattatacagttgattttcattttaataatcagtattagttaggtttatgtgtgcttatgcctttctgtattcagcttctaatcactgagtagtccactttgcttgctatcattttctcaagaagaaaaatagaaaaagagactgtcagggttttgtaggagaaaaagttcaaactcagaatgacatttgggaggtatatagagtgatcttagtttcccctgccacttgttttcatagataatcataaattggttgtatttcaagtgtatacttctagtagttgctttaaaattattatatttatatatatatatatcctaagttggtcaagctgaacttgtcaagctacacagttaggatacatggtacataggaaggtaaaatcggatgaataaggaaaggctgctgctgattggtggtgagtatagccaagggtactttacaccctcacggctaacttttcctagtttagaacaagaaagttttgattatgttgtcccttggaggcctagaaaacaagatagcccaaaatgaagatgaaaaagtccacagtgggaattcagatggactagaattagactagccagttctatagttcaggtgggccagaaatgtcagcactgtagtacgtgcttagattcagcttgggcaaggaatgaagtttagaaagtcatataaagcagtagccctataaagagatcaggatttaagcaaggaggctgagaaagtgtcagtagagcattcatgggactagaggttgatgtttcagatagtcccaaggtagagaactaaggcaagggaaacctaactcatcttggaggccagtaatgatagctttatattatcttgacctgtgctattcaagatggtagccactggccacatgtggctattcagcacttgaaatgtgactagtacaaccaaggaattgaattttaatgttatttaatttaatttaatttaaaattaaattagaaaactgataattgatccagttattataaaacttttaagtatgtttggaataacttgggcatgtgaacctaccttttcaagtgtaaattttattaaatctaaatatagaccaagtatttctgatgagaatttagcatctagattgtgctttgtgtaaaatatatgctagatttagaagatttaatacaaaatttcagttatttatattatacactgaaatgttaatattttggatatattgatttaaatattatgaaaagtaattttacctattttatatggttactggaaatttcaagttacatatatggtttgtattatatttctattggacagcattggtctaagctcaatacactacagccagttttataagtaatgtttagttattttattgtgtaaataagattttattagaatgcagccaagctaatttattaatgtgtttttattagctgtttttgtgctgcagtgtcagagttgagtagttttgacagagatcatctggcctgctaaacctaaaatatttatttgacctttgaagaaagagtgctaaaccctggccttaactctttaaagcagaggcctttttattggggcccaactgagaaagaaaggagcggtagcacctgttcctccagtctcctactttttgtctgtaggcaggttatttcttatccagggcacctttcctcaaggaactattatttgcaatatatgtgactggcagtgggtgtcatggtatcaacttactggatcctgacttaactgcctctgtcggtcagagttccaacaagaaacagatggcaacactcaaattgaggtaattttaggagggtttatttacaaagggactcataaaggtatgaatagggtataggaaaaccacaggttttgcctactaggtcatgcgagcctagtgctagcagcagagcagcagagctgttatcatctctaggccataagggattaggagagagagaggttactggatctagaaagagatactgtttatagaatacgctaccttgagaagagcagtgagcttcattgaaatgacgaaggcagcccaaggtggccttatagaaagggagcaggaataagtgtatatcctgacttcatgcttcttcctttccttgatatgccaagactcccattggattgaacccaactgaagccctactgatgtatatcaggtctgggatttgactcttacaagctagtaagttagtcttactgtgtcatggatgctagcagaagacaagactgctgggtcagagacaaaggactttattactcacagcacaggaagcagtatgtgcatcagcatattgtgttggttctcattcaccctagttcccattggggtgatatggtggacccatatggatgctgcacatgccttaggtttaggttgcagctgaggaacactgagcttggggaatccgtcactttggtagtaagcagtaatcaagcctgtgcttgtcccagagggaaacattacctcatccttcaaggttgctcactgcagacacaaccctgagaagcggcccaggtaaggagtttaggtcaaagccttgcttttttggtatatacagcaagacatattgaaggactgtctttttgcagcccatatggatcagcattccagggagaccagggtgaagaccagtagaggtgggtttggattggcagatggaagattctggcattctgggtccatagcgttaaattcttatttggattacagccgaatcagcagttctggcctgtgatcagggtgcaatattcttattgttctttctcccatattttcttaatcagaaggaaggacctacttccacaggacaatcttctttagggttgcaatattagaaattagtttctagttgtgtgtgtgtgtggttggcagctgttaaccaataatacaagattttgctttgttaccacaatgctcaaaaatacacaaaatccaagctcataacttgttctctttaccgtctccaagtgaagtaatcataaagaactttaagcgatctattacagcatgttaactagtatccatgtattattttacttttaacacacattatcttgctattttgtgttaactgtcttctggggagtggcctccttatgtactttctatctgggatgatatgatcattgaatgcctacctgatcactgaatgcctatggagtcagcatcttcagataataagaaacagatacctaatgaagcttctgctagaagtgaaagagacacatcagacctagagcaaaactggtcattgcaagatcattatagaatgtattcacccataatataccaagccctctgtgagcacgtgcagactcagatgtcactgatgaatgacttgacttcaaagaacatccctaatggaattcctgctgtaccatgccatgctccctctcattctgaatctcaggcaactcctcattctagttatggcttatgtacctccaccccagtctggtcacttcagcggccaccctgccctccaaaggttcattctgaagttcaaactgatggcaacagtcagtttgcatcacaaggtaaaacagtttctgcaacctgtactgatgttctacggaattcatttaataccagtcctggagttccatgtagcctgcccaaaactgacatatcagctattccaacattgcagcaactgggccttgttaatggaattctgccacaacaaggaattcataaggaaacagacctactaaaatgtattcaaacatatttgtctctttttcgatctcatggaaaagaaacgcatctggacagtcagacacaccgaagccctactcagtcacaaccagctttcttggccactaatgaagaaaaatgtgccagagagcaaattagagaggccacaagtgaaagaaaggatttaaacatacatgtgcgagatacaaaaacagtgaaggatgtacagaaggcaaaaaatgtgaacaagacagctgaaaaagttagaattataaaatatttgttgggagagctcaaggccctggtagcagaacaagaggattcagaaattcagaggttgattacagaaatggaggcatgtatatctgtacttccaacagtaagtggaaacacagatattcaagttgagatagcactggccatgcaaccattaagaagtgagaatgctcagttacgaaggcagttgagaattttgaaccagcaactcagagaacaacagaaaactcaaaaaccatctggtgctgtggattgcaaccttgaattgttttctcttcagtcattgaatatgtcactgcaaaatcaattggaggagtcactaaagagccaggaattactgcagagtaaaaatgaagagctgttaaaagtgattgaaaatcagaaagatgaaaacaaaaaatttagtagtatatttaaagacaaagatcaaactatacttgaaaataaacagcaatatgatattgagataacaagaataaaaattgaattggaggaagccctagtcaatgtgaaaagctcccagtttaagttagaaactgctgaaaaggaaaaccagatattggggataacattacgtcagcgtgatgctgaggtgactcgactaagagaattaaccagaactttacagactagcatggcaaagcttctctccgatcttagtgtggacagtgctcgctgcaagcctgggaataaccttaccaaatcactcttgaacattcatgataaacaacttcaacatgacccagctcctgctcacacttccataatgagctatctaaataagttagaaacaaattacagttttacacattcagagccactttctacaattaaaaatgaggaaaccatagagccagacaaaacctatgaaaatgttctgtcctccagaggccctcaaaatagtaacactaggggcatggaggaagcatctgcacctggaattatttctgccctttcaaaacaggattctgatgaagggagtgaaactatggctttaatagaagatgagcataatttggataatacaatttacattccttttgctagaagcactcctgaaaagaaatcaccactttctaagagactatcccctcagccacaaataagagcagctacaacacagctagtcagcaacagcggacttgctgtctctggaaaagaaaataaactgtgtacacctgtaatctgttcctcttcaacaaaggaagcagaagatgcacctgaaaaactttccagagcatctgatatgaaggacacacagctcctcaagaaaataaaggaagcaattggtaagatccctgctgccaccaaggagccagaggaacaaactgcatgtcatggcccatcaggttgtcttagcaacagccttcaagtgaaaggcaatactgtctgtgatggtagtgttttcacttctgacttgatgtctgactggagcatctcttcgttttcaacgttcacttctcgtgatgaacaagacttcagaaatggccttgcggcattagatgccaacatagctagactccagaagtctttaaggactggtcttctggagaaatgaattcagaagaaaactcatcaggtgcttctttttaaaactagaacttggctatattgaatgtgtatttttctttagtgaaatgatgttttatgttattatgtgtgaagtaatatattgtacaagtaataaatgtattgttgagatatattgacactgaggagcttataaaaacaagtcatcttaagttcacaattgctacaagaagaaagttgtggataactaggaaattattgtaagtaatgttttatttcagtacttagcaattagagttcttttattaagatgtatctgctggattaagggtacaggttgaaatagttctgtggctgtcctaagaaataatgggaaaagaatctctggatgtaagtttttctgttgaaactagagggttttttttttctgtttacatatacttttttttaatagcaatgtgtttttattaaacatgctgtgtgccacaggccagtgttgttggtgaaatatataaacatttatttaaagagaaaagttaccagtatctacacctcttaaaaaacattgattggtctaaaaaatatatagataacatcctaagttaacatatggcttcttaaaacttgggcacttttatttgtttttatcccaaattcatgttttaaggcctttaaagaatagtcagactgataaagaagtgctaacagataagctatagttggggaaatttgtgggttttttttaaataagaaatgtttatttttgtccttatatttaaacatgatggaatttgtaaatcttggcattgattgtaattctgcctttttggaagaattttttctcccagcatgttagctgagaatattctctattttataaataatatgaagtaggttggtctctctgcttctctataccaggacttcttagctcagtatcatctcccttcatgtaagcagcacgttttaactcttaggaagctgaatgttgtgttatcactaatactttgtacaggtcacctgcctactctaattgtccttagtacttggacaggctttatcattaaagagtgttctcctaatcccagaa

SEQ ID NO: 3779 - DNA, 772 bp, Homo sapiens
  source 1..772: mol_type = genomic DNA
ggaagctctgagtcactgaatagcaaagaaaaatatgaaagcaagaggaattgctttcacatctagaaaatgttgcaagataatctgaaatcttctggtgctggtgaatgcatgaagaggttcacagtatcttttaaagtacttctgaaaagataaggagtttaaaaggtgggtgtgtacactggcactgagctgcagtaggatttttccttggatagtctggtctggagctgggacagcagctgctgctgtggaaaggccagctggcaagatgatggaagaaatctccattatggtagcctatgacgcccatgttttcagccagctgcacgatgaagacttcctcactagtctggtggccatcagcaagcccaggtctatggtaccaaccaagaagctgaagaaatatgagaaagaatatcagacaatgcgagagagtcagctgcaacaggaagacccaatggatagatacaagtttgtatatttgtaggtaactccagctgttgcatttatactgggaatcttcataagaagctgagagaaagagaggggaaaaagaaagtggctttctactttcaaaaatgaaacaaaaaggaaaaatggcaaagtactgttttagctgtgcatgtcatatccacaaagacttttagcaggtgaactgttccaagactgacacaaggatgtttcaaacttgcctctgtctgtagaaaatgttaaaaataccaactcacttggaaggaaaaataaaaatcacaaaggtatattgagcaca

SEQ ID NO: 3780 - DNA, 880 bp, Homo sapiens
  source 1..880: mol_type = genomic DNA
gagattttgggaatccactgagaaaattcaagttggtgttcttgggggagcagagcgtgccctgggttccctgactgctctggccttccatgggtgttctgcgggactgctggcagcccttccggactcctccctctctgctacctgctcaggttggatgtggcatatgaccagaaactggccattggtcgggaagacgtctctgattacgaggttcatgtacgacagcttcgacaacacataccaggcaaccattgggattgacttcttgtcaaaaaccatgtacttggaggaccgcacggtgcgactgcagctctgggacacagctggtcaggagaggttccgcagcctgatccccagctacatccgggactccacggtggctgtggtggtgtacgacatcacaaatctcaactccttccaacagacctctaagtggatcgacgacgtcaggacagagaggggcagtgatgttatcatcatgctggtgggcaacaagacggacctggctgataagaggcagataaccatcgaggagggggagcagcgcgccaaagaactgagcgtcatgttcattgagaccagtgcgaagactggctacaacgtgaagcagctttttcgacgtgtggcgtcggctctacccggaatggagaatgtccaggagaaaagcaaagaagggatgatcgacatcaagctggacaaaccccaggagcccccggccagcgagggcggctgctcctgctaatgcagagccgacctgtggcttcccatgacactccttgcttgttgtgttgcttcctattggctagcttcctaaggggggagggaaccgagttatcaagatgggaggatttttcttttctctctgtctttaggagta

SEQ ID NO: 3781 - DNA, 2053 bp, Homo sapiens
  source 1..2053: mol_type = genomic DNA
acaatacttaagtcctggcaagtcataagtggggaaaatgtctctcccaagattccaaagagtaaactttgggccatatgataattacattccagtcagtgaattaagcaaaaaatcatggaatcagcaacactttgccctgttatttcccaaaccacaacggccaggaaccaaaaggagatcaaaaccttctcaaatacgggacaacacggtttctataattgatgaagaacaattaagaggagatcgtagacaaccattatggatgtaccgttctttaatgagaatttctgagagaccatctgtttatttagctgccaggaggcagcctctcaaaccaactcgtactgtcgaggtggattctaaagcagcagaaattggtaagaaaggtgaagacaagacaacacagaaggacacaacagattcggaatcagaattaaaacaaggaaaaaaagattcaaagaaaggcaaggatatagagaaaggaaaagaagaaaagctagatgcaaagaaagatagcaaaaaaggtaaaaaggatgcagagaagggcaaagactcagcaacagaatctgaagatgaaaaaggaggtgcaaagaaagataacaaaaaagataaaaaggattcaaacaaaggcaaagactcggcaacagaatctgaaggtgaaaaaggaggtacagagaaagatagcaaaaaaggtaaaaaggattcaaagaagggcaaggattcagccatagaattacaagctgtaaaagcagatgaaaagaaggatgaggatggaaaaaaagatgcaaacaaaggtgatgaatcgaaggatgccaagaaagatgcaaaggagattaaaaaaggtaagaaagataagaagaagcccagtagtacagacagtgactcaaaggatgatgtcaagaaagagtctaagaaggacgccacgaaagatgccaagaaagttgccaagaaagatactgagaaagaatctgctgattcaaagaaggatgcaaagaaaaatgctaagaaggatgcaaagaaggatgcaaagaagaatgcaaagaaggatgaaaagaaggatgcaaagaagaagggcaagtaggccttggataagaatttgaaccgaaagaataattcaaaagcatatttgatgaaacaatagtggtagtctgcagctgaatttgtgagaaaacaagaggcctcaaagaattaaataatttttaaaaggtggtaaagaaggatacaaaggagaactcagcagagatttataaaaatatataagaaagatgttaagaaaaattaaggggggatccattgaaagacttgaagaatacatatacttatattcggggatatgaaggattcaatgaatgatctctagaaagatttaaagaagaatattcagataaggatgttgaagataatgacactaaatctatggacacacacacacacacacacacacacacacacacacacacacacacacacacacagtttaatgaaggcttaaagaatccaaggagacagatgttgtatctatagatttaaaataatctcaagctgcatccacagatacaaaaaaatataggagccatgaaatgaagttaaacaccttgtagaaagcctactttcaagtaaatatagcattcctttggcaaaaagaaaaaaaaagtaaaagaaaagaaaaaaaatgtattaccacccgatgagcctacatctttctttctgaagtttaaacaaccacagtcatgtttatggttgttggatgtgccacttccaatccaaaagaagcacacttgatctactacagaatttaagaaggcagttgttctattcataattgctcacaatcagcctctcctcctactactgttcctactctctataccctttgtgtctgctcagactaccgtgaggatggattggacattacaccacactggaaaagtgaaacatctcattcagttggtgatcttcctgtcatgaaagttgcttgacagctctaattacgaattgaacacattaaacacctggtgaaattatcaattaaaaacatctagtcaccata

SEQ ID NO: 3782 - DNA, 4279 bp, Homo sapiens
  source 1..4279: mol_type = genomic DNA
gacaagccgggaagcttggaggggtctattgcgtacgcccaaggcgctgggcctggagcaggagaaagggagtggaggcgcgtcggagactatgaagcgcggcattcggcgggatcctttccggaagcggaagctcggcgggcgggccaagaaggtccgggagcccacggcggttaattctttttaccgtgaggcttcacttccctcggtctgggcttctctgaggcggcgagagatggtcaggtctggagctcgaccgggccaggtgttatcttcaggaaggcacactggacctgctaaattaacaaatggaaagaaagcgacctatttaagaaaaataccacgttttaatgcagattctggctattccatccattctgattcagaaagtcaggctgaaactgtacacgggcttgatggttgtgcttctttgctgagggacattttgagaaatgaagattcaggttcagaaacagcatatttagaaaacagatctaattctagacctttagaaagcaaaagatacggatcaaaaaagaaaagacatgaaaaacatactattcctttggtagtccagaaagaaacatcatcttcagataataagaaacagatacctaatgaagcttctgctagaagtgaaagagacacatcagacctagagcaaaactggtcattgcaagatcattatagaatgtattcacccataatataccaagccctctgtgagcacgtgcagactcagatgtcactgatgaatgacttgacttcaaagaacatccctaatggaattcctgctgtaccatgccatgctccctctcattctgaatctcaggcaactcctcattctagttatggcttatgtacctccaccccagtctggtcacttcagcggccaccctgccctccaaaggttcattctgaagttcaaactgatggcaacagtcagtttgcatcacaaggtaaaacagtttctgcaacctgtactgatgttctacggaattcatttaataccagtcctggagttccatgtagcctgcccaaaactgacatatcagctattccaacattgcagcaactgggccttgttaatggaattctgccacaacaaggaattcataaggaaacagacctactaaaatgtattcaaacatatttgtctctttttcgatctcatggaaaagaaacgcatctggacagtcagacacaccgaagccctactcagtcacaaccagctttcttggccactaatgaagaaaaatgtgccagagagcaaattagagaggccacaagtgaaagaaaggatttaaacatacatgtgcgagatacaaaaacagtgaaggatgtacagaaggcaaaaaatgtgaacaagacagctgaaaaagttagaattataaaatatttgttgggagagctcaaggccctggtagcagaacaagaggattcagaaattcagaggttgattacagaaatggaggcatgtatatctgtacttccaacagtaagtggaaacacagatattcaagttgagatagcactggccatgcaaccattaagaagtgagaatgctcagttacgaaggcagttgagaattttgaaccagcaactcagagaacaacagaaaactcaaaaaccatctggtgctgtggattgcaaccttgaattgttttctcttcagtcattgaatatgtcactgcaaaatcaattggaggagtcactaaagagccaggaattactgcagagtaaaaatgaagagctgttaaaagtgattgaaaatcagaaagatgaaaacaaaaaatttagtagtatatttaaagacaaagatcaaactatacttgaaaataaacagcaatatgatattgagataacaagaataaaaattgaattggaggaagccctagtcaatgtgaaaagctcccagtttaagttagaaactgctgaaaaggaaaaccagatattggggataacattacgtcagcgtgatgctgaggtgactcgactaagagaattaaccagaactttacagactagcatggcaaagcttctctccgatcttagtgtggacagtgctcgctgcaagcctgggaataaccttaccaaatcactcttgaacattcatgataaacaacttcaacatgacccagctcctgctcacacttccataatgagctatctaaataagttagaaacaaattacagttttacacattcagagccactttctacaattaaaaatgaggaaaccatagagccagacaaaacctatgaaaatgttctgtcctccagaggccctcaaaatagtaacactaggggcatggaggaagcatctgcacctggaattatttctgccctttcaaaacaggattctgatgaagggagtgaaactatggctttaatagaagatgagcataatttggataatacaatttacattccttttgctagaagcactcctgaaaagaaatcaccactttctaagagactatcccctcagccacaaataagagcagctacaacacagctagtcagcaacagcggacttgctgtctctggaaaagaaaataaactgtgtacacctgtaatctgttcctcttcaacaaaggaagcagaagatgcacctgaaaaactttccagagcatctgatatgaaggacacacagctcctcaagaaaataaaggaagcaattggtaagatccctgctgccaccaaggagccagaggaacaaactgcatgtcatggcccatcaggttgtcttagcaacagccttcaagtgaaaggcaatactgtctgtgatggtagtgttttcacttctgacttgatgtctgactggagcatctcttcgttttcaacgttcacttctcgtgatgaacaagacttcagaaatggccttgcggcattagatgccaacatagctagactccagaagtctttaaggactggtcttctggagaaatgaattcagaagaaaactcatcaggtgcttctttttaaaactagaacttggctatattgaatgtgtatttttctttagtgaaatgatgttttatgttattatgtgtgaagtaatatattgtacaagtaataaatgtattgttgagatatattgacactgaggagcttataaaaacaagtcatcttaagttcacaattgctacaagaagaaagttgtggataactaggaaattattgtaagtaatgttttatttcagtacttagcaattagagttcttttattaagatgtatctgctggattaagggtacaggttgaaatagttctgtggctgtcctaagaaataatgggaaaagaatctctggatgtaagtttttctgttgaaactagagggttttttttttctgtttacatatacttttttttaatagcaatgtgtttttattaaacatgctgtgtgccacaggccagtgttgttggtgaaatatataaacatttatttaaagagaaaagttaccagtatctacacctcttaaaaaacattgattggtctaaaaaatatatagataacatcctaagttaacatatggcttcttaaaacttgggcacttttatttgtttttatcccaaattcatgttttaaggcctttaaagaatagtcagactgataaagaagtgctaacagataagctatagttggggaaatttgtgggttttttttaaataagaaatgtttatttttgtccttatatttaaacatgatggaatttgtaaatcttggcattgattgtaattctgcctttttggaagaattttttctcccagcatgttagctgagaatattctctattttataaataatatgaagtaggttggtctctctgcttctctataccaggacttcttagctcagtatcatctcccttcatgtaagcagcacgttttaactcttaggaagctgaatgttgtgttatcactaatactttgtacaggtcacctgcctactctaattgtccttagtacttggacaggctttatcattaaagagtgttctcctaatcccagaacctcctcgtgttttttgtttttttggtggttttttttttttttttaggtgttagtgctacagcgtttgaaggagccagctgtagtctctttgatatgttcagattttccagatagagatttaagtctaaaaatttattaagtgaattctaaactatttcacacaagagtccattagcatctttaattttatttagtattcatgaattaatttattggcatcttatttggaggtaataggccacaactctttaacaaataagttc

SEQ ID NO: 3783 - DNA, 2221 bp, Homo sapiens
  source 1..2221: mol_type = genomic DNA
aatatagatccggcaagagcttagctgtgatcactcctagctgctcagcaaaccactgaggttcctgggaaaaaaaaaaaaatatctcaaggtaaaataatatttagaaaaaataatgtcagagcacagcagaaattcagatcaagaagaacttctcgatgaggagattaatgaagatgaaatcttggccaacttgtctgctgaagaactgaaagaactgcagtcggaaatggaagtcatggcccctgaccccagccttcccgtgggaatgattcagaaagatcaaactgacaagccaccgacaggaaacttcaatcataaatctcttgttgattatatgtattgggaaaaggcatccaggcgcatgctggaagaggaacgagttcctgtcacctttgtgaaatccgaggaaaagactcaagaagagcatgaagaaatagaaaaacgtaataaaaatatggcccagtatttaaaagaaaagctcaataatgaaatagttgcaaataaaagagaatcaaagggcagcagcaatatccaagaaacagatgaagaagatgaagaagaagaagatgatgatgatgacgacgaaggagaagatgatggtgaagagagtgaagaaacgaacagagaagaggaaggcaaagcaaaggaacaaattagaaattgtgagaacaactgccagcaggtaactgacaaagcattcaaagaacagagagacagaccagaggcccaagaacaaagtgagaaaaaaatatcgaaattagatcctaagaagttagctctagacaccagctttttgaaggtaagtacaaggccttcaggaaaccagacagacctggatgggagcttgaggagagttaggaaaaatgatcctgacatgaaggaactcaacctgaacaacattgaaaacatccccaaagaaatgttactggactttgtcaatgcaatgaagaaaaacaagcacatcaaaacattcagtttagccaatgtgggtgcagatgagaatgtagcatttgccttggctaacatgttgcgtgaaaatagaagcatcaccactctcaacatcgagtccaatttcatcacaggtaaagggattgtggccatcatgaggtgtctccagtttaatgagacgctaactgagcttcggtttcacaatcagaggcacatgttgggtcaccatgctgaaatggaaatagccaggcttttgaaggcaaacaacactctcctgaagatgggctaccattttgagcttccgggtcccagaatggtggtcactaatctgctcaccaggaatcaggataaacaaaggcagaaacgacaggaagagcaaaaacagcagcaactcaaggaacagaagaagctgatagccatgttagagaatgggttggggctgccccctgggatgtgggagctgttgggaggacccaagccagattccagaatgcaggaattcttccagccaccgccacctcggcctcccaacccccaaaatgtcccctttagtcaacgcagtgaaatgatgaaaaagccatcgcaggccccgaagtacaggacagaccctgactccttccgggtggtgaagctgaagagaatccagcgcaaatctcggatgccggaagccagagaaccacccgagaaaaccaacctcaaagatgtcatcaaaacgctcaagccagtgccgagaaacaggccacccccattggtggaaatcactcccagagatcagctgctaaacgacattcgtcacagcagtgtcgcctatcttaaacctgtgcaactgccaaaagaactggcgtaagaggcaacagagccatctagaagaacaagaaatggaaatagtgactcttggattacagcatggagactatgtcagcagcaatactttaggatccacgtggcagaactggaaacaatgctaccatctgataagggtatttgtaaaaggcagaatgtttgggccatgaagaagtaggggctgaagaggaaggtggaaggagataaaatataatatttagaggcaatattttctacttgcaatcaatttgagtgactcaggtgaaatttagagtcatatttcccgaagcagaagttaaagaaaattttttaaacatttgctttattattgttttcttctggtaaataataaatataacagaagtgttaactattgtattcccatttttttctccttccatctcttctgcggtaattcatcacatag

SEQ ID NO: 3784 - DNA, 522 bp, Homo sapiens
  source 1..522: mol_type = genomic DNA
agccgggaacagctctgaccacagtaagtcatcccaaaacctcacattcagatgaaaccatttaagaatttcatctgcactgaggaacaatttagcgtgatactggagggaaagagtttccctgtgagatccaggaggtccctttagctcgtctcctgacgtcaccacagtcatacccaagaggaaggaaacgtcagagacaatgatttggagaacattctacacaaaaaccaagtggttccggggagaagcctttccaggacccatgtgtaggcacaactgttttccctgatcaggatacttgcggcactcaacagaggaaagaaattcctaagggaacactgctcagaaagtactgcagcatgtcttcaaatgcctgaggatcaagttggaaaactagaagcaacagaaaacacaataagcgcaatggcggcggccgcggcggagcagcaacagttctacctgctcctgggaaacctgctcagccccgacaatgtggtccggaaacaggcagaggtaacc

SEQ ID NO: 3785 - DNA, 558 bp, Homo sapiens
  source 1..558: mol_type = genomic DNA
agcctccgcggccgctgtcagggaagcgcaggcggccaatggaacccgggagcggtcgctgctgctgaggcggcagtgtcggcagtccaaccgcgactgcccgcaccccctccgcgggggtcccccagaggactcaccagcgctctaagtcagatgccactgccagcataagtctcagcagcaacctgaaacgaacagccagcaaccctaaagtggagaatgaggatgagcctgttcgactggctcctgagagagaattcatcaagtccctgatggcgatcggcaagcggctggccacgctccccaccaaagagcagaaaacacagaggctgatctcagagctctccctgctcaaccataagctccctgcccgagtctggctgcccactgctggctttgaccaccacgtggtccgtgtaccccacacacaggctgttgtcctcaactccaaggacaaggctccctacctgatttatgtggaagtccttgaatgtgaaaactttgacaccaccagtgtccctgcccggatccccgagaaccgaattcggagtacgaggt

SEQ ID NO: 3786 - DNA, 8478 bp, Homo sapiens
  source 1..8478: mol_type = genomic DNA
ggtgtcatggctgcttgaagtcccgggagtcggtgaggcggctgcaggtccctccctgcggagccgctggtccggctggcggagatgtgaccgcgggcccggccggcctgcctcaggcgtcgcgtcagctcccgtgtccgtgcccttaacccacaccgatggcgggatccggctgcgcctggggcgcggagccgccgcgttttctggaggccttcgggcggctgtggcaggtacagagccgtctgggtagcggctcctccgcctcggtgtatcgggttcgctgctgcggcaaccctggctcgccccccggcgccctcaagcagttcttgccgccaggaaccaccggggctgcggcctctgccgccgagtatggtttccgcaaagagagggcggcgctggaacagttgcagggtcacagaaacatcgtgactttgtatggagtgtttacaatccacttttctccaaatgtgccatcacgctgtctgttgcttgaactcctggatgtcagtgtttcggaattgctcttatattccagtcaccagggttgttccatgtggatgatacagcattgtgcccgagatgttttggaggcccttgcttttcttcatcatgagggctatgtccatgcggacctcaaaccacgtaacatattgtggagtgcagagaatgaatgttttaaactcattgactttggacttagcttcaaagaaggcaatcaggatgtaaagtatattcagacagacgggtatcgggctccagaagcagaattgcaaaattgcttggcccaggctggcctgcagagtgatacagaatgtacctcagctgttgatctgtggagcctaggaatcattttactggaaatgttctcaggaatgaaactgaaacatacagtcagatctcaggaatggaaggcaaacagttctgctattattgatcacatatttgccagtaaagcagtggtgaatgccgcaattccagcctatcacctaagagaccttatcaaaagcatgcttcatgatgatccaagcagaagaattcctgctgaaatggcattgtgcagcccattctttagcattccttttgcccctcatattgaagatctggtcatgcttcccactccagtgctaagactgctgaatgtgctggatgatgattatcttgagaatgaagaggaatatgaagatgttgtagaagatgtaaaagaggagtgtcaaaaatatggaccagtggtatctctacttgttccaaaggaaaatcctggcagaggacaagtctttgttgagtatgcaaatgctggtgattccaaagctgcgcagaaattactgactggaaggatgtttgatgggaagtttgttgtggctacattctacccgctgagtgcctacaagaggggatatctgtatcaaaccttgctttaatcagtaacctaaggactgtttcctttttctcctcttccatttcttgggttattccacatatgaatgcaggactacccccttaccattttaagaaggtactttatacatttatttaatcctactaatgtgcagccattgcccaagcagtgactgcgttgcatacatttggcactgagtaggacaagacctctcagctatacattgaggggttttagagcatccatgtgggcaacccttttttgtgcgggagagcaggtgttgctcttcagtatgtagcctaaaaaaatcttaattatttcatggatcatgaagcaaggatgaataatatcatgtcttggtaaatactaacaaatttgttaggtttggtgacatcatttacagattatttctttatgttgtccagtggttcttccttattgttgatatccataagctggcactggatgctctcagtaatgttaagtaattgtcaagcagcagttacctactgtgttcttaacactgagttgtgaattttttcttaaagcagtactgtagtactgaatattcctttaaaggaactgcagtgagcctatctaagtttttttaaattaaggcttttaaaatagaaagctgatgcttgatcttgcacaatttttatgtctagtatgtatgcttgagtgaatgtgcgagtatgaatgattagagaaaatttgagtcagtgtactttatagtgtgaatcctgtgagctaatacagtctatacttatttcttccctacctgtttcacatccgtaagatttaagatatacattttttgagaggtagtctgtctgatacaatgtaaatgacaaaacataattcctgagaggcccagaacaaactggagtctagcctggagttaaattgagacttctaaaatgattggaacaaagactaagttgtgccagatgtaaatcaacccctcttttagtttactttagactttgtattagctcatcttttttgtagtaaatctatagttttaaggtttctcaagatgtggctctacctactatgatgaaaattgaagtgggtcaaaagaattagatgtacagtgaagggaaaagaaaaaaaatgggcgaagagagggtggaaaataaaaggattcttttttcttcctttctgtttctcgtatccctgctccctttttcctccccttccctcattctttgcctctatccttagctgaagacaaactagaggagcagcatcccaggtagtttggcttttgactgcaaggtagttaagaaaggtgtagatataatgaggtagaagtagaaaggaagaaaaactcaaagaattcttaaaaggattcatagcaacataatgtgtccctgagtagaggatgctgctatgcgtgagttcatggacacaagttgattacatggtttttagaattataattatggattcttcttatttcatggtaggttgtctttaaagatataaaaattaggatgcctttatgaagcactgattataccaaaaaaaaaagacaagttatatacaggttattaatttttttatttatttattttttcctaaggaaaaagtcttctatctttccctgctggaagcctcctcatatttccttatgtttgccatgcaggttgctgagagtccagttagaatttgcattttacagaatgaaatactttaccccattcaaacaattattgtttgacattttagttatttataattgtcaaattcaggactctcctttaatgtttattatgaaaccaaatttggcataaggaggctgatttatgaattaccaaagggtcttgtggcatgttccccaatacatgcccttagaaggaagaactattattttttattttggccctttcaggagttgattataaattggtttgttttcaagtcagaattcaagtgggcagaacccgtattgtgaagacctaaactttcctaaatgttcatatgggtagcagattttgtggtgattagaaacatcaggtccttaaatacgatgaacatgggatacaaaggaattctttataagggcaagtatcctaagttagcacatttacttttctctcccctccgcccccaaaagaaaaatccttacaaataaactgcaggtaggcttctaagcctagtcctgcagtatgctgctaacatcttgatgccaatcttcacagcattctttgattgtcatcttattgctgatacattcatacatatatttagtgcttgacactgtagaattttgttacagaagatggttactagattttaagggagctgagggaataattgatgagccttgaattaaccatgcatttaattagattttttgttgttgttgttgttgttttgagatgatgtcttgctctgttgcccaggctggagtgcagtggctcaatctcggctcactgcaacctctgcctcgcaggtttgagcgattctcctgtctcagcctccccagtagctgggtttacaggcgcttgccaccacacctggctagatgttttatattaaagccagagaattgaaaaagaaatgcctcctgtgattgaaattattttatagctcttagcccgttctaccaaagatcacattagcagattacccctccctcctgtgatattatctttcttaaacctgaaccaaatatcaaaagatacaagtttcatgattaggatgaaatatatacatagggattttggtttattgaagttattgaaagacctagaaattttctttttgagagaaagggtaaagaggtgagggttcatgtcacttaacccctacccttttgggcaaattttgtctcaggtagtgtttcattccctaaattaatacctgtgcttccttgcctctcaccttcccagttacttctttggggtattactgtggcacattgtacacccagaaaaggcacatacagtgattattttgtgggaaatacttgattcttttgaaatatatttggagggggtagctagctagccactgtcaaaactaatgctgtatttacaggacaaaaacaagtagagttggacacctcagtaagagacagcattaactaaaagtactgactgccttttaaaggaatttttaaaactattctcttgcaataagagatccgcatttattaccactggatgtcttccttttttgtggccaccaatatagcagctctctttagagggattccctttctgctatgccttgagccaaactggctgcttttagaacaaaaaccataagtatggttttactcgaacttctctttgtttttattgagagaaatattgccttctttttggtactccagctgctaaagagtgctgagatatgttaaattattttttaaaagaaaatctccaaatacttatttaacttgtcttctagattcatgttgcttatattttaactattgagcaagtttattataaggaatgctgccatatagagaaagctgaagagaaaccatgggcagaaggcttttttctgtcttattacactggaccttcactctggtaagggcatcagttacttttctggaataaaaggcggagttagagcacttatcagatgctgtttcatggcttgttttagttaatttatcatgcagataactaacatttgggtatctttttgttttaggtcttattttctgactgttaggcctatcttacacataagttctactatcagtatacttggcagcatgacttttttttttttttacagttaatttaatgaaaatcagcaccattgtaaatgatagtaattgtaacaacatagttactgggtgaaggagtaggggagacactcagtaaccatctatttacctagacacttatgcaggggtacatgctaggtggctttattcagattcgggtacattggaatcacatcatgactttgagtctgatggctgtgtagataaagatttaagcaagtgccttgtgtttgctggaaaatattaaaactcatttgggtgaaagcttcccagatgatgataattaatagcacttctgcctttttcctggagtaacttttagattgagtcacatatgatagtataaaagtccaaaattttctgggtttacctttgttttatttttcatatatatattcactgtctgcctggaaatagccttggtttaccttatttttttgtatatgtaaaactattcatatttgattttattccaatattatatatgatggaaaagccagaattgtctggcagaatttaattcttccttggatctctagttctgtttttaatatcaggttccttcatcaaattttactactgtagctctgtgatataatttcatttcttgtcaattatggtcacatatagacaagtacttggtcacaattagctcaaaagaatccccatttcttaaggtgctcagtcaatcacctttattttgagatggtagtttttcaagttagtattacttactagctttcttgatgaatataaaaatgttgtctccatcatacagagctgagcctcttgtggtatattaagataagtcccattcttaatcacagaagaacatggatattttagtttttggagtacccagaattgtaaagattttgtttcattttgttttaggatagcttctctgcctaatactataggatatgtcatgttcgttattgtagccacctccctcagatgtttttcactatttttaaattatataatgaccagtagattcacagtagcatgtacttgacaagtgccatggatatttaagaagaaggtaaataattttaatattttttgctgtaattttataggagcagtggactgtaagagaaatatctataaatcagagagtatttaggaaactttgtattttataggtggtcattaaagtgatcttcaggatataagatagtttacacaaactttattctcctgataggaaatttttattcattttcctaccactcagcacttttgttctgccttgtactgcttatgaggattaatgttttaaatttgctttatttgtgcttttcagagagttgtcataattgtggcagttgtgtttgtggcactgtaaatgctgaaattcatgggaaacttaccaaatgactgcttgagtgttatttcccattaaattgggtagctgtcacaataaccagaagaaatcttgtggcccttttgaagaaagccatgtatgttttgttacctaggttcatagtattttaatttaaaggcaaagagaagcattctacttatttgtcttataaaccattaatcgttttttgtgcagaagagagcttattttgttatactgctttgtataatggaaataagtcacattctgggggaaaaaaactggaattgtttgtattttgtttttttggggggggatctttatgtgaaaaatcagagctacttgttaccataagcccttactatcaacaagataattatttgtaatcacttttttatcccaggttggaattgctttccccttctaagttatcttcccttaataatatttatgataccaggacagtgagggtataagagcaaatgtagtgaggtattcaaaaatcctgcatatatggactcaaaagttctttagttatttgaattatatatagctatattattttattagcttgggttgtcagaagattgccaattttaagagtaaagaggagagagataagtaataaaaatagaggaggggaagaaaatggctcccttactggtcttagtaatcttctatatagttaatgagctaaaaaatgatacttaaagttccaggtttggtaccgctagcatagaaacattgcctttcctacacattcctcatcattgtttcctcagaaaattattttaagagtttgtgaaaccagattaaatatctatattcagtttggcctaatttttaaaaataaatatttatactccagcttttgtgtatttggtgtacatcaccacttatgcaaatcaaggatcagaaaactggaggttagccatctccattatttccttttgcacattgggtacagtgggtggcattagtatgcactagctgcaaagtcacagcaccttatggaaataagtatgtttattataataaaaaaaagttaagctgcatctctgtagattatttactttgcagactgtaaagctgccctatcttttccagcagaatttactcttccattcttaattcttttttgaaatatcttaaataatttaacattcctttataacttcttaacagtgtcaaaactggggtagaagggattttattttttcccaaaagggttccatctttgctatctgttgatcagccttagaaaatctaagtatgatcaataaattttaatggttgatggcatcctgtgtcagctggagtagttggttgtgaatattaaaacctagtactattttccctcagtaacatgtaattgctacattttttataagaaggtatggttagaaaaaaatgtgaaagatcacttaaaccaaagccagttacaaggagtaatctctcctgttggtttaccttcacctcagaactacaagaatattacaatacatagtgaatagttgtctgtaacatttctaccagttgtttcagtagcatattggtcttggcatttcttggcactgtggttctgctgtattatttgtgatgtcttattgtttgtgagcttttgttttttttttaaagaaaaaacaaaaactaagtgggactatgtatgtagatgtgtgtcagtaccaaaaagttattttctcaaatccctaaatttctgatttccattcaagtcttttaaactctttcctgctgaatagcaaagaacttttattttccactttcctatattcctaaaaagtgtgaacaatgcgtttcagttgactgtattgcatacttttttgctgaagactttttctgtaaacacaattgccttgttcagttttgttgtaaactgacttaccataagatgcactgttgataatgctttctgatgtgtgtttgataagagtgataaaataaaagcttaaaaataaa

SEQ ID NO: 3787 - DNA, 1553 bp, Homo sapiens
  source 1..1553: mol_type = genomic DNA
cccggagccgaaacaccggtaggagcggggaggtgggtactacacaaccgtctccagccttggtctgagtggactgtcctgcaggtcttgttaagaaaccagtcctgccttcttgccactcgtgtctttcgatggctcccttcccgaagtcccgctgcctctaagcggagtgttaagcggggctctcggaagccggtggaccgagatttccccgggtggggcgggcgcggtgtagcggcccgcgggctgacttgctcccggctgtcccccggccccagcgaccatgccccgtaaaggcacccagccctccactgcccggcgcagagaggaagggccgccgccgccgtcccctgacggcgccagcagcgacgcggagcctgagccgccgtccggccgcacggagagcccagccaccgccgcagagactgcaagtgaggaacttgataatagaagtttagaagagattttgaacagcattcctcctcccccgcctccagcaatgaccaatgaagctggagctcctcggcttatgataactcatattgtaaaccagaacttcaaatcctatgctggggagaaaattctgggacctttccataagcgcttttcctgtattatcgggccaaatggcagtggcaaatccaatgttattgattctatgctttttgtgtttggctatcgagcacaaaaaataagatctaaaaaactctcagtattaatacataattctgatgaacacaaggacattcagagttgtacagtagaagttcattttcaaaagataattgataaggaaggggatgattatgaagtcattcctaacagtaatttctatgtatccagaacggcctgcagagataatacttctgtctatcacataagtggaaagaaaaagacatttaaggatgttggaaatcttcttcgaagccatggaattgacttggaccataatagatttttaattttacagggtgaagttgaacaaattgctatgatgaaaccaaaaggccagactgaacacgatgagggtatgcttgaatatttagaagatataattggttgtggacggctaaatgaacctattaaagtcttgtgtcggagagttgaaatattaaatgaacacagaggagagaagttaaacagggtaaagatggtggaaaaggaaaaggatgccttagaaggagagaaaaacatagctatcgaatttcttaccttggaaaatgaaatatttagaaaaaagaatcatgtttgtcaatattatatttatgagttgcagaaacgaattgctgaaatggaaactcaaaaggaaaaaattcatgaagataccaaagaaattaatgagaagagcaatatactatcaaatgaaatgaaagctaagaataaagatgtaaaagatacagaaaagaaactgaataaaattacaaaatttattgaggagaataaagaaaaatttacacagctagatttggaagatgttcaagttagagaaaagttaaaacatgccacgagtaaagccaaaaaactggagaaacaacttcaaaaagataaagaaa

SEQ ID NO: 3788 - DNA, 6821 bp, Homo sapiens
  source 1..6821: mol_type = genomic DNA
acacacacacacacacacacacacacacacacacacacacacacacactctcacacattctcacatgctagacccttctaagcagcttgtccgtttttacacatgtatctgaactctcctgcatcactcttggccattttctcgcattcgattgcttttgccgttttttatttagatcagtacttgatttcattttcattttccagtctactttggggttctcgcagtggataatttagccaaaatgtttttcttgtggagacattagctgacaattcccaccacagactggcttgtacgtcctcccagggagacctaaacctggctcccctcccaccgcagttcttaatattgtggataagagatccatctttctcattctggatacctacttagtgctcatggaagaaggggtgccctgcccagccccagctgctaagctcacacctcctgtcaaaaagtcccaggacatgcacgacgagaggagcaagctggtgaatgagtatgcgtgtcgagtgctggaacttctggggatggggcatcgtctgtttgtgcctcggcttctggcgacctcaaaggaagaccttctgcaggctgattttgaaggtgctttaaagttctttagagttcagcttccaaagagatacagggcagaggaaaatgcaagaagactgatggagcaggcttgcaatattaaagtaccaaccaagaagctgaagaaatatgagaaagaatatcagacaatgcgagagagtcagctgcaacaggaagacccaatggatagatacaagagggagaaccgaagattacaggaggccagcatgaggttggaacaagagaatgatgaccttgcccatgaactagtaacaagcaaaattgctctacggaatgacttggatcaggcagaagacaaggcagatgtgttgaataaagagctccttttgaccaaacagaggctggtggagactgaagaggagaagaggaagcaagaggaagagactgcccagctaaaagaagtcttcaggaaacagctagagaaggcagaatatgaaataaagaagactacagctatcattgctgagtataaacagatctgttcgcagttgagtaccaggctggagaaacagcaagcagccagcaaggaggagctggaagtggtaaagggtaagatgatggcatgcaaacactgcagtgacattttcagcaaggagggtgctttgaaactagcagccacaggcagagaggaccagggaattgaaacagatgatgagaaggactcacttaagaagcagctgagagagatggaactggaactggcacaaaccaaactgcagttggtggaggccaagtgtaaaattcaggaacttgaacatcagagaggagcccttatgaatgaaatccaagctgcgaaaaactcttggtttagcaaaaccctgaactctatcaaaacggccacgggcacccagccattgcagccagcaccggtcacccagccacccaaggagagcacatagttccagccttacccaagcacaagagcacaatgttcaaaccaatggaaatctgggaggattcttcctggtgtccctttgaaggaaagtcaaggaggccagaaaacaagccagaatttttcagtagctctcactctttcttgtatgacacttttcaaagggatgctatttaaactgacctgttctatgttgaatacctattttccagcttctggaaggccatgttcagatccatcatagtattacacattattttgtttgcctgatgtttagttggaaataagtaattcagaactaaatgcttttttatttagaattattcataattatttttatcttacataaaaatggagacatctgttattccaaggttgaagtgataagaagatctttgtcacaggaaaaaaaaaattgaaacctaaacatcttaagttttcaggatttattcagataaagcacactgtggggccaggcatgaccactctcaggtttcctcctgagcctgattcccagggaagtgttaatcctgtccaaaggaaagaaccaatcagcgatcattggtttactttcattttctgttcggtacatctggaaatgaagtgccaggaatagacgggctgttcagattatacgctaggtaaaaggaactgaaattttaataagtgtaggtcaggatcatttgggctgtggtattctaacagatccttttaagaatgccacataggacttgtgagttcctaagtacaccaaagtatggacacagatgtgacttctggcaattataaagttaaaggtggatattgcaccttacagacttagggagcctttaccagagacgcctaaaaagccccaggttcagccattgtgctgaatagagtggaatatagaaccagggacagagtatttcatttaacgttgatatatacttgctaaggaaacactaacaatactgtaactttgttaaaggacatagtattgaaatgggaaatagaggtcaggctcacatcatcttagtttaatgctgggcaactttttctgatttctgtagttccctgaaaatgtgtccttcgtacccataaagagatacaaatgcatttgtaacatttttgattgaatataaaacctttacagaaatacttatctcatggaaaggtaaagctattgtttaaaaattagtggaaatattttttcaattatatttaacatgcctataaaaatagtccttgcaggaaattatttgataagagcaaaactatttttattttataaactattttggaggcctctgatcctttcaaaccaaccaaactactattagatatgtacaataacatttgttgatattaatcattggcctcattgttgaacatattatttgcaaagaatcttaaactctgtagtgccagaatgattctcatctgtgccatattttgcaattaaaagtaacacacccttagaagaatcaaataagagccatctacatcccaggaggatgcaccaagttgctcacagtggatcttttcctctaaaatgatcttttatgttctaaaaagtgaaatcccctttatctgtgtttatattctctacagcccataaaactgatgtgattgttatgttatactcatcagataatacttttcttacataaatctttcattgttgttctgacatctttcattacaaaatttattttcttaacaaaaaggaacataacccagcattccaagtgtctgtgttggctttaacattctctacatggtggtctagataagctaatttttttttttttttttttgtaaaatgtaatagctagaaaatgttatcttggcgcttgtttttgtaaatcatttagtataggctgttagctttactggtactttacgctttgattccaagaagccttgtgcagttgccttatcaaatggccagctaaattaaagatgctcttttgtgttgtgaatttcatagttctgtacagagcttgtttcaatttacaaaaataagtacattccacagaatgcctaaagtgtgtaattttctttaaataatagtaggtgagggagaaacataatggctctaggtcaatcccttatctaaagaccttgttcaacttcatagtccctttccttttaaagaggagaagagaaaaatcccccctggccaggcatggtggctcacatctgtaatcccagcactttgggaggctgaggtgggtggatcacctaaggtcaggagtttgagaccagcctggccaacatggtgaaaccctatctctactgcaaaatacaaaaattagccgggcttggtggcgggtgcctgtaatcccagctactcgggaggttgaggcaggagaatcacttgaacccaggaggcagaggttgcagtgggccaagattacggcattacattccatccagcctgggcgacaagagcaaaattccgtctcgaaaaatcaccaggtacatacctctcaagtttgataagtccatcttttgagttttcttttagctctttcaaaagattacgagggcaatacatattttttttttttttattctccagccccatatcatacttgggtatgcctgttggtaccataagcctaaactctccttcactgcaatgcctttgagtcagtagcaatagtaaagactagaaacaaagaaaattcagaatttggtatgtgatatgattgttcatacaatatgttataatagcaatattccaaacaatatgtccttcactgtctattgttggaaaactcatgcatcccagcatgaagtaactcctagttttaattttagttattttgagatatatttgagaattgcatctcttctcttgaatttcacttagaagagattaaccagccaaatatccaggaaagtttcaaaacattctagtgtttttcatcctttgctaggatgcactctgtacaaaacattcctctgaaaatctaatatttgcagtatctaagaattgatcatttctattttcattaaattctgtggaaaaaattaaatgaatgaaattcaacttcataattcagttcatcagcttttgtatcttgagaatctaaacacgtctttaaatctgaaagaaaccaagctggattttgcagtgcatatgtttgctagcttcccacatcctgaaccatgtcaaaatttggttttatttagttacatataatttaatgcaaagaaattctgttacttaatgttctgtttatttatgagtgcctatcaggaacactaataggaatgccattcaaccagtgtcttctgcccctctcccagctgttaaattagtacttcttcattggctttctgaaatgtcctgagtaaagtagaaaagcaacctttgtatggatgtggggatatttaatagtatgtatcttgtttcatttttttcctatgatgtattaatatttatttttctccaacccctgctccattttcttaaaatattttccagttaataactagttgctttatttcctagctgaagtgagaaaaccaacggaaaacaatacagatttgggcagaggagatagagttacatctttaaaggagtgagccagtcacccaggagaatcacatgtgtaactgatgtaggggtttaagtcttcatactttcactaaaatctgtctactaactctcccaccaacctttgcatcaaacacttaggtacctgcctgattaggggggcccctttaagggaaaaaacttttaaaaaattaaatgccttggttttgttttatcttctgggaaagaacacttttacttgattagcaagatgattatattatataacttgcccttaaaaacactccaaaatactgactccttttctccaattacaaatgagtgtgaagaaattctgttgtatgatttgaacactattaggtttgtatgtgtgtttaattggaagaattttatatagagtatctctgctgcttttgtttacctgggtaccacacaaccaaatacacattgagatttcaagaaatgatgatgaaagccagaaggccagaccacagctctgcagcctgtttcctacaaccagatataaaactctttctcgtcgccatgctgatagtcacactgaactagaactgtcccaacacattcttcctctctcataatggcttccatttaatacaggcaaagccctttaccttagcaaattctttatctttcaaaagtgaccaaaatgaggacttcaaccttggctgcacctcaataggagatgctgatcttgagttgtaatgagaaaagtgggcatataggagattttagtgactgcagtcagctgtctggcattcctttctcagtttgcatctaaaagactacatatgtcaagcttatctccacctgaatttgctgcctgctataaaaacatttcattaatatatcccattcttcctacctccatctctggtttgtcattagtggtattctgaaaagcttaagaaaaaagaatcattgagtagaaagtgaacattttaagttattttcctttttcattggcaattagttaacatgtaaaatcttttccattaaactgtataacttttaataactatatattatatatgggataaaatatatggactgaattgtgagaatataaatgcatcgaaagactctggtgtcatgaaagcacaagaataaggctggagatggtcccagatccaagatgtcccaaaagccttttgtatcagtttctctatttttggtattttgcataatgcatggatccttagttcaaatgagggacaaagtttctcagtcagccccacttcctttctttctaactcctacctttcccttgcagaggaggtagtagagattctggaattgtctatttttatgaattccattattttgtccatggcatctctaatgaaaacaggttctagaataaaggagttgattagtctgaacagtactaattaactacaaaataaacgttagtgatcagcctcttcctctataaacaatgaccaattagacgtttccgtaattccatgtattatgtatagtacactctataaatgtaaatgtaatgcttgtctaaaaagtgcaatttattgtacattgtcccaacaaatgtttacttttataatcgttatgaacttgaattggattagtatcttgtttttatgtgtgaatgaagccttgtgaaataaacaaatgcaactgagaaggtaacaaggtgactgtttttgtgagccagtgatgttttcaatgctttgtgttgcccctttggccccattaagcagtaataaacatttgttctgaagtcca

SEQ ID NO: 3789 - DNA, 6476 bp, Homo sapiens
  source 1..6476: mol_type = genomic DNA
gacaaatactgcatgattttacttacataaagtacctaaatagttaaaactcatagaaacagaatgtgagcatggattgggcgtgaaccagagggatttttgttttttgggtttttttttgtaaagaacagtattgggataattggcaacatgtgaataaggtctgaatattagattgtaattctgtatcaatgttaatttcctggttttgataattatactgtggttatgttagagaatggccttgtttttaggaaacatttaggagtaaaggagtattgtatctgcaaacttaactctaatggttcaggcaaaaagtactgctgtgtatatatattgagagagaatatggaaaatgtcaaggttcacagaatctgagtgaagcatatatagggcatctttgtactattatttcatagtagaaactacaaaaaaaaattgaaaggaattgttccaatatgacagttactgtttcaaggtgcttttatcatgggtagttttctttaccagattttctataatatagccttgtgtatattttttggagaaacaccatatgtaatcttacagttatgccagacatatacctcagacagtgtactttaattgtggtagttgtttttggactcgatccagggtatagtattatagtgtcatggcttggattttttattatgattccagccaagacatcgacataaatataccaaagggaaggaccctgagagtgtgatgcagagaccagtggtgtgatgttatacaaggtcttatttcctacattgttggttctcactgctggcttcatgaccctccatcataatccaagttatctcaagacgtataactcttaccaacccagtttttaaaaaatgtattctcagtgacattcttagaaggatggagcacatattcaagcatataatagaatgccgtataactttagaaagtttggtagttacagctcaaagctatctggagatgaaattaaatatgtgaagagaaattataaataaaactgccaacagtgactacatctggagggtggaactagggggggaatcagggactttctcatgtctatttaaaattattttgaataaagattatatttatctgatataaaattattaagatataaaatagtataccatggaaagtgtcccttctcgctctgtcccccagatactctgtttccctccccagaggcaaccatgattaactgtttctggcataactcccaagatactggatgcatgtaaaagcaaatgcttattttttcctgtttttctacacaaaaggttgtccattattgtcacttttaaaacaaaaaagtttaagaaaacaacagtggtatatgaatttaaaaagaaaaattaagacagtgagatgtagataaagagacagggtagagttctcacttcctggtctaatcaggcattctaaagaatgtacataaaaggaaccagagttaagaactctgtcctatatcatgaattaacttgcatgtttcaaagaatttgggactatagaacatattttgggattaatatagtctgaacttagtgtagtagttacttctggtttaaaatagtatctcaatttccttttcaccttaaatagacttaaggaacaaatatatgtgtagtttgcttgacgttttacataaaagaaatttaatatatgaattaaattataattgtgtatttttaggatatatcacattaattaaaacagtgaataatgtggtacatacatataatggaatatatttgacctcaaaaaggaagaaaaattttgacacatgctacaatatagatgaagcttgaagacattatgctaagtgaaataagccagtcacaaaagaacaaatattgtattatttcagttatataaagtttctagactagtcaaattcatagaaactaggatgatagttgctagggtcagggagaagaggggatggaaaggtattgtttaatggatgcagagtttcagtttgagaagatgaataaaagaaaaaaatgacattaaattttgtcaagatagcatattgaaaatataatagaaaaatatttgtttatctgctataatatattatgtcataggtgttatcttcaggaaggcacactggacctgctaaattaacaaatggaaagaaagcgtaagtacttgaagacgtttacaacttcagatttcaaggaatttttcaggtctttgggctggatgacatgtcgtctaccccagaaaattaggtaggcctctaccatcacaagctctgaggaacaatttttcatgtctacccatgttaatcattttagtatttaacagtctttctgatcttcagaatgtgtttataaattcatcttgtacatggttggacaagctttcttgtctttgctggaaagaaaatgactacttactaatatattttgggaaaaatatttgtaagaatattaataagcttgttttccaggacctatttaagaaaaataccacgttttaatgcagattctggctattccatccattctgattcagaaagtcaggtaagattgaatagatacaatacacactattttaattagttttcaaatagtagctaaaaagtaggaataaaatgcaaagtattaattgctctaaggaagtatgaagtctgttgctttaaaacatcttttctaccaataatagtttgtaaataaacaaattttaaaactacataatttatattttttcctacactaacagtcatatacaaatgtattctaaatgactttatttcttacaggctgaaactgtacacgggcttgatggttgtgcttctttgctgagggacattttgagaaatgaagattcaggttttttttttttaattctttgctgatcaccttatctcaagtcattattttgatgtaacaaatttttgttttattaataggttcagaaacagcatatttagaaaacagatctaattctagacctttagaaagcaaaagatacggatcaaaaaagaaaagacatgaaaaacatactattcctttggtagtccagaaagaaacatcatcttcagataataagaaacagatacctaatgaagcttctgctagaagtgaaagagacacatcagacctagagcaaaactggtcattgcaagatcattatagaatgtattcacccataatataccaagccctctgtgagcacgtgcagactcagatgtcactgatgaatgacttgacttcaaagaacatccctaatggaattcctgctgtaccatgccatgctccctctcattctgaatctcaggcaactcctcattctagttatggcttatgtacctccaccccagtctggtcacttcagcggccaccctgccctccaaaggttcattctgaagttcaaactgatggcaacagtcagtttgcatcacaaggtaaaacagtttctgcaacctgtactgatgttctacggaattcatttaataccagtcctggagttccatgtagcctgcccaaaactgacatatcagctattccaacattgcagcaactgggccttgttaatggaattctgccacaacaaggaattcataaggaaacagacctactaaaatgtattcaaacatatttgtctctttttcgatctcatggaaaagaaacgcatctggacagtcagacacaccgaagccctactcagtcacaaccagctttcttggccactaatgaagaaaaatgtgccagagagcaaattagagaggccacaagtgaaagaaaggatttaaacatacatgtgcgagatacaaaaacagtgaaggatgtacagaaggcaaaaaatgtgaacaagacagctgaaaaagttagaattataaaatatttgttgggagagctcaaggccctggtagcagaacaagaggattcagaaattcagaggttgattacagaaatggaggcatgtatatctgtacttccaacagtaagtggaaacacagatattcaagttgagatagcactggccatgcaaccattaagaagtgagaatgctcagttacgaaggcagttgagaattttgaaccagcaactcagagaacaacagaaaactcaaaaaccatctggtgctgtggattgcaaccttgaattgttttctcttcagtcattgaatatgtcactgcaaaatcaattggaggagtcactaaagagccaggaattactgcagagtaaaaatgaagagctgttaaaagtgattgaaaatcagaaagatgaaaacaaaaaatttagtagtatatttaaagacaaagatcaaactatacttgaaaataaacagcaatatgatattgagataacaagaataaaaattgaattggaggaagccctagtcaatgtgaaaagctcccagtttaagttagaaactgctgaaaaggaaaaccagatattggggataacattacgtcagcgtgatgctgaggtgactcgactaagagaattaaccagaactttacagactagcatggcaaagcttctctccgatcttagtgtggacagtgctcgctgcaagcctgggaataaccttaccaaatcactcttgaacattcatgataaacaacttcaacatgacccagctcctgctcacacttccataatgagctatctaaataagttagaaacaaattacagttttacacattcagagccactttctacaattaaaaatgaggaaaccatagagccagacaaaacctatgaaaatgttctgtcctccagaggccctcaaaatagtaacactaggggcatggaggaagcatctgcacctggaattatttctgccctttcaaaacaggattctgatgaagggagtgaaactatggctttaatagaagatgagcataatttggataatacaatttacattccttttgctagaagcactcctgaaaagaaatcaccactttctaagagactatcccctcagccacaaataagagcagctacaacacagctagtcagcaacagcggacttgctgtctctggaaaagaaaataaactgtgtacacctgtaatctgttcctcttcaacaaaggaagcagaagatgcacctgaaaaactttccagagcatctgatatgaaggacacacagctcctcaagaaaataaaggaagcaattggtaagatccctgctgccaccaaggagccagaggaacaaactgcatgtcatggcccatcaggttgtcttagcaacagccttcaagtgaaaggcaatactgtctgtgatggtagtgttttcacttctgacttgatgtctgactggagcatctcttcgttttcaacgttcacttctcgtgatgaacaagacttcagaaatggccttgcggcattagatgccaacatagctagactccagaagtctttaaggactggtcttctggagaaatgaattcagaagaaaactcatcaggtgcttctttttaaaactagaacttggctatattgaatgtgtatttttctttagtgaaatgatgttttatgttattatgtgtgaagtaatatattgtacaagtaataaatgtattgttgagatatattgacactgaggagcttataaaaacaagtcatcttaagttcacaattgctacaagaagaaagttgtggataactaggaaattattgtaagtaatgttttatttcagtacttagcaattagagttcttttattaagatgtatctgctggattaagggtacaggttgaaatagttctgtggctgtcctaagaaataatgggaaaagaatctctggatgtaagtttttctgttgaaactagagggttttttttttctgtttacatatacttttttttaatagcaatgtgtttttattaaacatgctgtgtgccacaggccagtgttgttggtgaaatatataaacatttatttaaagagaaaagttaccagtatctacacctcttaaaaaacattgattggtctaaaaaatatatagataacatcctaagttaacatatggcttcttaaaacttgggcacttttatttgtttttatcccaaattcatgttttaaggcctttaaagaatagtcagactgataaagaagtgctaacagataagctatagttggggaaatttgtgggttttttttaaataagaaatgtttatttttgtccttatatttaaacatgatggaatttgtaaatcttggcattgattgtaattctgcctttttggaagaattttttctcccagcatgttagctgagaatattctctattttataaataatatgaagtaggttggtctctctgcttctctataccaggacttcttagctcagtatcatctcccttcatgtaagcagcacgttttaactcttaggaagctgaatgttgtgttatcactaatactttgtacaggtcacctgcctactctaattgtccttagtacttggacaggctttatcattaaagagtgttctcct

SEQ ID NO: 3790 - DNA, 2560 bp, Homo sapiens
  source 1..2560: mol_type = genomic DNA
gttggagtgggccctgtgcctctgctgtctcctactgctaacgagtgaacaaccaaggcgatgggctgtaggatgttgatacatctgaggggccagatggccaccatatcagggaaagccaatgtgttttgaaaaatatgcaaatgttcaataagaaatcaagcagaagattgagctgctgatgtcagttaactctgagaagtcgtcctcttcagaaaggccggagcctcaacagaaagctcctttagttcctcctcctccaccgccaccaccaccaccaccgccacctttgccagaccccacacccccggagccagaggaggagatcctgggatcagatgatgaggagcaagaggaccctgcggactactgcaaaggtggatatcatccagtgaaaattggagacctcttcaatggccggtatcatgttattagaaagcttggatgggggcacttctctactgtctggctgtgctgggatatgcaggggaaaagatttgttgcaatgaaagttgtaaaaagtgcccagcattatacggagacagccttggatgaaataaaattgctcaaatgtgttcgagaaagtgatcccagtgacccaaacaaagacatggtggtccagctcattgacgacttcaagatttcaggcatgaatgggatacatgtctgcatggtcttcgaagtacttggccaccatctcctcaagtggatcatcaaatccaactatcaaggcctcccagtacgttgtgtgaagagtatcattcgacaggtccttcaagggttagattacttacacagtaagtgcaagatcattcatactgacataaagccggaaaatatcttgatgtgtgtggatgatgcatatgtgagaagaatggcagctgaggccactgagtggcagaaagcaggtgctcctcctccttcagggtctgcagtgagtacggctccacagcagaaacctataggaaaaatatctaaaaacaaaaagaaaaaactgaaaaagaaacagaagaggcaggctgagttattggagaagcgcctgcaggagatagaagaattggagcgagaagctgaaaggaaaataatagaagaaaacatcacctcagctgcaccttccaatgaccaggatggcgaatactgcccagaggtgaaactaaaaacaacaggattagaggaggcggctgaggcagagactgcaaaggacaatggtgaagctgaggaccaggaagagaaagaagatgctgagaaagaaaacattgaaaaagatgaagatgatgtagatcaggaacttgcgaacatagaccctacgtggatagaatcacctaaaaccaatggccatattgagaatggcccattctcactggagcagcaactggacgatgaagatgatgatgaagaagactgcccaaatcctgaggaatataatcttgatgagccaaatgcagaaagtgattacacatatagcagctcctatgaacaattcaatggtgaattgccaaatggacgacataaaattcccgagtcacagttcccagagttttccacctcgttgttctctggatccttagaacctgtggcctgcggctctgtgctttctgagggatcaccacttactgagcaagaggagagcagtccatcccatgacagaagcagaacggtttcagcctccagtactggggatttgccaaaagcaaaaacccgggcagctgacttgttggtgaatcccctggatccgcggaatgcagataaaattagagtaaaaattgctgacctgggaaatgcttgttgggtgcataaacacttcacggaagacatccagacgcgtcagtaccgctccatagaggttttaataggagcggggtacagcacccctgcggacatctggagcacggcgtgtatggcatttgagctggcaacgggagattatttgtttgaaccacattctggggaagactattccagagacgaagaccacatagcccacatcatagagctgctaggcagtattccaaggcactttgctctatctggaaaatattctcgggaattcttcaatcgcagaggagaactgcgacacatcaccaagctgaagccctggagcctctttgatgtacttgtggaaaagtatggctggccccatgaagatgctgcacagtttacagatttcctgatcccgatgttagaaatggttccagaaaaacgagcctcagctggcgaatgccttcggcatccttggttgaattcttagcaaattctaccaatattgcattctgagctagcaaatgttcccagtacattggacctaaacggtgactctcattctttaacaggattacaagtgagctggcttcatcctcagacctttattttgctttgaggtactgttgtttgacattttgctttttgtgcactgtgatcctggggaagggtagtcttttgtcttcagctaagtagtttactgaccattttcttctggaaacaataacatgtctctaagcattgtttcttgtgttgtgtgacattcaaatgtcatttttttgaatgaaaaatactttcccct

SEQ ID NO: 3791 - DNA, 821 bp, Homo sapiens
  source 1..821: mol_type = genomic DNA
ggagccgaaacaccggtaggagcggggaggtgggtactacacaaccgtctccagccttggtctgagtggactgtcctgcaggtcttgttaagaaaccagtcctgccttcttgccactcgtgtctttcgatggctcccttcccgaagtcccgctgcctctaagcggagtgttaagcggggctctcggaagccggtggaccgagatttccccgggtggggcgggcgcggtgtagcggcccgcgggctgacttgctcccggctgtcccccggccccagcgaccatgccccgtaaaggcacccagccctccactgcccggcgcagagaggaagggccgccgccgccgtcccctgacggcgccagcagcgacgcggagcctgagccgccgtccggccgcacggagagcccagccaccgccgcagagactgcaagtgaggaacttgataatagaagtttagaagagattttgaacagcattcctcctcccccgcctccagcaatgaccaatgaagctggagctcctcggcttatgataactcatattgtaaaccagaacttcaaatcctatgctggggagaaaattctgggacctttccataagcgcttttcctgtattatcgggccaaatggcagtggcaaatccaatgttattgattctatgctttttgtgtttggctatcgagcacaaaaaataagatctaaaaaactctcagtattaatacataattctgatgaacacaaggacattcagagttgtacagtagaagttcattttcaaaagataattgataaggaaggggatgattatgaagtcattcctaaca

SEQ ID NO: 3792 - DNA, 4780 bp, Homo sapiens
  source 1..4780: mol_type = genomic DNA
ggcgggcgcacggccaggccatgcctggggaggctgcccgcgccgagctgctgctgcccgaggcggaccgacccgggccccgcacagatctgtcctgcgatgcggccgctgccaccaccatcctgggaggggaccggcgggagccctgtgctctgaccccagggcccagccacctggccctcacgttcctgcccagcaagccgggtgcccggccccagcccgagggagccagctgggatgcagggcctggtggggcaccctcggcctgggcggacccaggggagggcggcccaagccccatgctcctccctgagggcctgtcttcccaggctctgtccacggaggctcctctcccggccaccctggagccccggattgtgatgggagaggagacgtgccaggccctcctgtcacccagagctgcccggacagcgctcagggaccaggagggtgggcacgcaagcccagacccaccccccgagctgtgttctcagggtgatctttctgtgccttcccctcccccagaccctgattccttcttcacgcctccctccacccccaccaagaccacctatgccctgcttcctgcctgtgggccccacggggacgccagggactcagaggctgagctgcgggatgagctgctggactcgccccccgcctcaccctcgggctcctacattacggccgatggggacagctgggcctcttcaccctcctgttccctcagcctgctggctccggctgaagggctggacttcccctcaggctggggcctgtccccgcaggggtccatggtggatgaacgagagctgcacccagcagggaccccagagcccccgtcctctgagtccagcctctctgcagacagcagctcctcctggggccaggagggccacttcttcgacctggacttcctggccaatgacccaatgatccccgcagccctcctacccttccagggcagcctcatctttcaggtggaggcagtggaggtgacaccgctatccccagaggaagaagaagaggaggctgtggcggatcccgacccaggtggggacctggctggggagggtgaggaggacagcacgtctgcctccttcctgcagtcactgtctgacctgtccatcacggagggcatggacgaggcttttgccttccgggacgacacctctgcagcctcctctgattcagactcagcctcctacgcagaggcagatgatgagaggctgtacagcggggagccccatgcccaggccactttgctccaggacagtgtccagaagacagaggaggagagcggaggtggggccaaggggctgcaggctcaggatgggactgtgtcctgggccgtggaggctgctcctcagacctcagacagaggggcctatctgtcccagagacaggaattgatctcagaagtaacagaagagggccttgctttaggccaggagtccactgccactgtgacccctcacactctgcaggtagccccaggcctccaggtggaggtggctaccagagtgaccccacaggctggggaggaagaaacagactccaccgctggacaagaatctgctgccatggcaatgcctcagccctcccaggagggcatcagcgagatcttaggccaagagtctgtcactgcagaaaaacttccaactccacaggaagaaacaagcctcacattgtgtccagactctcctcagaacttgaaggaagaaggagggctggacctcccctctggcagaaagcctgtagctgcagccacgattgtccccaggcaggctaaagaggacctcaccttaccccaggactccgctatgacaccgcctctgcccctacaagacacagatctctcatcagccccaaagcctgtggctgcagccacgattgtgtcccagcaggctgaagagggcctcaccttaccccaggactccgttatgacaccgcctctgcccctacaagacacagaactctcgtcagccccaaagcctgtggctgcagccacgcttgtgtcccagcaggctgaagagggcctcaccttaccccaggactccgctatgacaccgcctctgcccctacaagacacagatctctcgtcagccccaaagcctgtggctgcagccacgcttgtgtcccagcaggctgaagagggcctcaccttaccccaggactccgctatgacaccgcctctgcccctacaagacacagatctctcgtcagccccaaagcctgtggctgcagccacgcttgtgtcccagcaggctgaagagggcctcaccttaccccaggactccgctatgacaccgcctctgcccctacaagacacagatctctcgtcagccccaaagcctgtggctgcagccacgattgtgtcccagcaggctgaagagggcctcaccttaccccaggactccgctatgacaccgcctctgcccctacaagacacagatctctcgtcagccccaaagcctgtggctgcagccacgattgtgtcccagcaggctgaagagggcctcaccttaccccaggactccgctatgacaccgcctctgcccctacaagacacagatctctcgtcagccccaaagcctgtggctgcagccacgcctgtgtcccagcaggctgaagagggcctcaccttaccccaggactccgctatgacaccgcctctgcccctacaagacacagatctctcgtcagccccaaagcctgtggctgcagccacgcctgtgtcccagcaggctgaagagggcctcaccttaccccaggactccgctatgacagcacctctgcctctgcaagacacaggccccacctcaggtccagagcctctggctgtggccacccctcaaaccttgcaggcagaagcaggctgtgccccagggacagagcctgtggccaccatggctcagcaggaagtaggtgaggccttaggccccaggccagcacctgaggagaagaatgcagccctccctacagtcccggagcctgcagccttggaccaggtccaacaggatgacccacagccagctgcagaagctgggacaccttgggccgcacaggaagatgcggattccactttgggcatggaggccctcagtctccctgagccggcctctggtgctggggaggaaatagcagaagccctttctaggcctggacgggaagcatgtctggaagcgcgagcgcacacaggtgatggggctaagcctgactcaccccaaaaggagaccctggaggttgagaaccagcaggaaggaggcctgaagccactggcacaggaacatggacccaggtcagcacttggaggtgcaagggaggtccccgatgcgcctcctgctgcctgccctgaggtcagccaggcccggctcctgagcccagccagggaggaaagaggcctgagtggcaagtccaccccggagcccacgcttccctcagctgtggccacagaggccagtctggactcctgcccagagtcttcagtaggggctgtgtccagtctggacagaggctgccctgacgcgcctgcccccacgtctgcaccaacctcccagcagccggagcctgtactgggtctgggcagtgttgagcaaccccacgaagtacccagtgtccttggcacccccttgctgcagcccccagaaaaccttgccaagggtcagcccagcacgcccgtggacaggcccctgggccctgacccttctgctcctggtacccttgctggggcagccctacccccactggagcccccagccccctgcctgtgccaggacccccaggaagactctgtggaagacgaggagcccccaggctctctgggcctcccaccgccccaggcaggagtccagcctgccgctgctgctgtctcaggaaccacacagcctctggggactgggccgcgagtcagcctctcgcctcactccccactcctcagccccaaggtggcctccatggatgccaaagacctggccttgcagatcttgccgccttgccaagtgcctcctccctctgggccccagagcccagctggccctcaagggctctcagcccccgagcagcaagaggatgaggacagcctggaggaagactcgcctcgggccctgggctcgggccagcattcggatagccacggggagtcatcagccgagctggacgagcaggacatcttggctcctcagaccgtgcagtgtccagcccaggccccagcaggcggcagtgaggagaccatcgccaaagccaagcagagtcgcagtgagaagaaggcccgaaaggcaatgtcaaagctgggcttgcggcagattcagggagtcaccaggatcaccatccagaagtccaagaacatcctctttgtcatcgccaagcctgatgtcttcaagagcccagcctcagacacttatgtggtctttggcgaggccaagattgaggacctgtcccagcaagtgcacaaagccgcagctgagaagtttaaggtgccctcagagccctcagccttggtccctgagtcagcacccaggccccgggtgaggctggagtgcaaggaagaggaagaggaggaggaggaagaggtggacgaggcggggctggaactgcgtgacattgagctggtgatggcgcaggccaatgtgtccagggccaaggccgtgcgggctctgagagacaaccacagtgacatcgtcaacgccatcatggaactgaccatgtagccactgaccggaagctggagccatcctacgccttccctcagctctgctactcaataaatcggtgtcccttc

SEQ ID NO: 3793 - DNA, 3419 bp, Homo sapiens
  source 1..3419: mol_type = genomic DNA
gcggcccgcgagcgcgcctcacggctcctgtctcccctccctccttctctctcacgcctagcgcaatggcggcggccgcggcggagcagcaacagttctacctgctcctgggaaacctgctcagccccgacaatgtggtccggaaacaggcagaggaaacctatgagaatatcccaggccagtcaaagatcacattcctcttacaagccatcagaaatacaacagctgctgaagaggctagacaaatggccgccgttctcctaagacgtctcttgtcctctgcatttgatgaagtctatccagcacttccctctgatgttcagactgccatcaagagtgagctactcatgattattcagatggaaacacaatctagcatgaggaaaaaagtttgtgatattgcggcagaactggccaggaatttaatagatgaggatggcaataaccagtggcccgaaggtttgaagttcctttttgattcagtcagctctcaaaatgtgggactgcgggaagctgcccttcacattttctggaactttcctggaatttttgggaaccagcaacaacactatttagatgtcatcaaacgaatgttagttcagtgtatgcaagatcaggaacacccgtcgatcaggacgttatctgctagagctacagctgcatttatacttgcaaatgagcataatgttgctctgttcaaacattttgcagacttgctaccgggattcctacaggcggtaaatgactcgtgctaccagaatgatgattctgtcctaaaatccctcgttgagattgcagatactgttccaaagtatttgcgtcctcacttggaagcaactctacagctaagtctaaagttgtgtggagacactagcctcaacaatatgcaacgccagcttgcccttgaagtgatcgtcaccctctctgagactgcagctgctatgttaagaaaacataccaatattgttgcacagactattcctcagatgttagcaatgatggttgatttggaagaagatgaggactgggcaaatgcagatgaactagaagatgatgattttgacagcaatgcagttgcaggcgagagtgctctagatcgaatggcttgcggacttggtggaaagctcgttctgccgatgatcaaggaacacattatgcaaatgcttcaaaatcctgactggaaataccggcatgcaggattgatggccttatctgccattggtgaagggtgccaccagcaaatggaaggaattctaaatgagatcgtaaattttgttttactttttctccaggatcctcatccaagagtaaggtatgcagcctgtaatgccgtgggacagatggctacagattttgcacctggtttccaaaagaaatttcatgagaaggtgattgcagctctgctgcagaccatggaagaccaaggcaatcaacgtgtgcaggcccatgcagctgctgccctcattaactttactgaagactgtcccaagtcactacttattccatacttggataatttggtgaaacatctgcattccattatggtactgaagcttcaagagctgattcagaaaggcaccaagttagttttggaacaagttgtgacatccattgcatcagttgccgatactgcagaagaaaaatttgtcccctactatgatttatttatgccatcactgaagcacatcgttgagaatgcggttcaaaaagaactgagacttctgagaggaaaaactattgaatgcattagcctcattggtctggctgttgggaaggaaaaattcatgcaggatgcatcagatgtgatgcagcttttgttaaagacccagacagacttcaatgatatggaagatgatgatcctcagatctcttacatgatctcagcatgggccagaatgtgcaaaatccttggaaaagaatttcagcaataccttccagtggttatggggcctttaatgaagacggcttcaattaagcccgaagtagcccttttagatacccaagacatggagaatatgagtgatgatgatggttgggaatttgtgaaccttggagatcagcaaagctttggtattaaaactgcaggactagaagaaaaatcaactgcttgccagatgttggtttgctatgctaaggagttaaaggaaggctttgtggagtacaccgaacaggttgtcaaactgatggtccctttactgaaattttatttccacgatggtgttcgagtggcagcagcggaatccatgcctcttctcctggagtgtgcaagagtccgtggtcctgagtatctcacacagatgtggcattttatgtgtgatgctctaattaaggccattggtacagaaccagattcagacgtcctctcagaaataatgcattcttttgcaaagtgcattgaagtaatgggagatggatgccttaataatgaacactttgaagaactgggaggtatattgaaagcaaagcttgaagaacattttaaaaatcaagaattacgacaagttaaaagacaagatgaagactatgatgaacaggtcgaagagtcactacaagatgaggatgataatgatgtttatattctgaccaaagtgtcagatattttacactcaatattcagtagctacaaagaaaaggtgttaccatggtttgaacagctgcttccattaattgtcaacctcatttgtccacatagaccatggccagacagacaatggggattatgcatctttgatgatgtcatagaacactgtagtccagcctcatttaaatacgcagaatatttcttaagaccaatgctccaatatgtatgtgacaacagcccagaagtcaggcaagcagctgcatatggcctgggagtcatggcacagtacggtggagataattatcgccctttttgtacagaagcacttcccctgctggtaagagttattcagtctgcggattctaagaccaaagaaaatgtcaatgctacagagaactgcatctcagcagtagggaaaatcatgaagttcaagcctgactgtgtaaacgttgaagaggtccttccacactggttgtcttggcttccactacatgaagataaagaagaagctgttcagactttcaattatctgtgtgacctgattgaaagtaatcatccaattgttcttggcccaaacaataccaatctgcccaaaatatttagtataattgcggaaggagaaatgcacgaggcaattaaacatgaagatccttgtgccaaacgtctggccaatgtcgttcgccaagtacagacttctggaggactgtggactgagtgcatagcacagctcagtcctgagcagcaggccgccattcaggagctcctgaactctgcgtgaagggccttaatgtcacccaccagaaaactaactccaaataaacgcttaccctttccttta

SEQ ID NO: 3794 - DNA, 1447 bp, Homo sapiens
  source 1..1447: mol_type = genomic DNA
gagactgcggggcgggccatggcggcgaacctgagccggaacgggccagcgctgcaagaggcctacgtgcgggtggtcaccgagaagtccccgaccgactgggctctctttacctatgaaggcaacagcaatgacatccgcgtggctggcacaggggggggcccatgtgaccatcaacgcacgggccgaggaggatgtggagcctgagtgcatcatggagaaggtggccaaggcttcaggtgccaactacagctttcacaaggagagtggccgcttccaggacgtgggaccccaggccccagtgggctctgtgtaccagaagaccaatgccgtgtctgagattaaaagggttggtaaagacagcttctgggccaaagcagagaaggaggaggagaaccgtcggctggaggaaaagcggcgggccgaggaggcacagcggcagctggagcaggagcgccgggagcgtgagctgcgtgaggctgcacgccgggagcagcgctatcaggagcagggtggcgaggccagcccccagagcaggacgtgggagcagcagcaagaagtggtttcaaggaaccgaaatgagcaggagtctgccgtgcacccgagggagattttcaagcagaaggagagggccatgtccaccacctccatctccagtcctcagcctggcaagctgaggagccccttcctgcagaagcagctcacccaaccagagacccactttggcagagagccagctgctgccatctcaaggcccagggcagatctccctgctgaggagccggcgcccagcactcctccatgtctggtgcaggcagaagaggaggctgtgtatgaggaacctccagagcaggagaccttctacgagcagcccccactggtgcagcagcaaggtgctggctctgagcacattgaccaccacattcagggccaggggctcagtgggcaagggctctgtgcccgtgccctgtacgactaccaggcagccgacgacacagagatctcctttgaccccgagaacctcatcacgggcatcgaggtgatcgacgaaggctggtggcgtggctatgggccggatggccattttggcatgttccctgccaactacgtggagctcattgagtgaggctgagggcacatcttgcccttcccctctcagacatggcttccttattgctggaagaggaggcctgggagttgacattcagcactcttccaggaataggacccccagtgaggatgaggcctcagggctccctccggcttggcagactcagcctgtcaccccaaatgcagcaatggcctggtgattcccacacatccttcctgcatcccccgaccctcccagacagcttggctcttgcccctgacaggatactgagccaagccctgcctgtggccaagccctgagtggccactgccaagctgcggggaagggtcctgagca

SEQ ID NO: 3795 - DNA, 581 bp, Homo sapiens
  source 1..581: mol_type = genomic DNA
ttcgagaatgggacatggaatgaggcgacggccccagcaagccccagcagccccagccccagccccaggcccagcagcagcagcagcagcccctgctctcccgccgcccggagaggctctgcagccatgaagccaaccgtcccgaggtaatcgcagggctggaagcccgtcatcgattctcagggaggctgtcagcgtgcaggggggagcggggagtgtcgtggagacactccgggacccctcactcggttccgctgtgcgtccacttagctgtggtgtcagctgtgtctccgctgatttcaggcaccgccggtaagcagggagcctccgcggagctcccgccgccgctcccccttggcgccaaaggcacccggtcccggagcagccacgcgcggcccgtgagcctcgccaccagcgggggctcagaggaggaggacaaagacggcggggtgctgttccacgtcaacaagagcggcttccccatcgacagccacacctgggagcgcatgtggatgcacgtggccaaggtgcaccctaaggggggagaaatggtgggcgccatcaggaacgccgccttcttg

SEQ ID NO: 3796 - DNA, 1915 bp, Homo sapiens; identical to SEQ ID NO: 3708
  source 1..1915: mol_type = genomic DNA

SEQ ID NO: 3797 - DNA, 4130 bp, Homo sapiens
  source 1..4130: mol_type = genomic DNA
agactaccggcggcgacgaccacaggagcatggcggacaccgacctgttcatggaatgtgaggaggaggagttggagccatggcagaaaatcagtgatgtcattgaggactctgtagttgaagattataattcagtggataaaactaccacagctggcaatcctttggtccagcaaggtggacagccactcatcctgacccagaatccagccccaggtctgggcacaatggttactcaaccagtattgaggcctgttcaggtcatgcagaatgccaatcatgtgactagttcccctgtggcctcacaaccaatatttatcactacgcagggatttcctgtaaggaatgtccggcctgtacaaaatgcaatgaatcaggttgggattgtgctgaacgtacagcaaggccaaacggttagaccaattacactagttccagccccaggtacccagtttgttaagccgacagttggagttccacaagtgttctcccagatgacccctgtgaggccaggctccacaatgcctgtgaggcccaccaccaacaccttcaccaccgtcatcccggccactcttaccattcgaagcaccgtcccacagtcccagtcccagcagaccaagtccactcccagcacttctaccactcccactgccacacagccaacctcactggggcaactagctgttcagtctccaggccagtcaaaccagaccacgaatcccaagctagctccctccttcccctctccacctgcagtgagcattgccagctttgtcactgtgaagcgacctggtgttacaggcgaaaatagcaatgaagtggccaaattggtgaatacccttaacaccatcccttccctgggccagagtcctgggccagtggtggtgtccaacaacagctctgctcatggctctcaaagaaccagcggacctgagtcttcaatgaaagtgacctcttccatcccagtatttgacctccaggatggtggacggaaaatatgtccacgatgtaatgctcaatttcgtgttactgaagctttgagaggtcacatgtgttactgttgcccagaaatggttgaataccagaagaaaggaaagtccctggattcagaacccagtgtcccatcagcagcaaagcccccatcccctgagaaaacagctcctgttgcttccacaccctcttctacacctattcctgctctgtcaccgcctaccaaagtaccagaaccaaatgagaacgtgggcgatgccgtccagaccaaactcattatgcttgtagatgacttctactatggacgggatggtggcaaagtagcccagctcacaaatttccctaaggtcgccacatctttccgatgcccacattgtaccaaaaggctaaaaaacaatattcgattcatgaaccatatgaaacaccacgtagaactcgatcagcagaacggtgaggtagatggtcacactatctgccagcactgttaccgccagttttccactcccttccagcttcagtgccacttggaaaatgttcatagtccctatgaatctactaccaagtgcaagatctgtgaatgggcgtttgaaagtgagccactatttctccagcatatgaaggatactcataagcctggagagatgccttatgtttgccagccttattttccctcctatgtgactcaggtgtgtcaatatcgctcctcactctactctgaggtagatgtccattttcggatgatccatgaggatacccggcatctgctctgcccttattgcctgaaggtcttcaaaaatggcaatgcattccaacagcattacatgaggcaccagaagagaaatgtttatcactgcaacaaatgccggctgcagtttctctttgccaaggacaaaattgaacacaagcttcaacaccataaaaccttccgtaaacccaagcagctggagggcttgaaaccaggcaccaaggtgacaatccgggcttcccgagggcagccacgaactgttcctgtatcctctaatgatacacctcccagcgccttgcaggaggcagcaccgctgacctcctcaatggaccctctgcctgtcttcctttatccccctgtccagcgcagcatccagaagagagctgttaggaaaatgagtgtcatgggccggcagacatgcctggagtgcagcttcgagatcccagacttccctaatcatttccctacttacgtacactgctctctgtgtcgctatagcacctgctgttctcgagcttatgccaaccacatgatcaacaatcatgttccacggaagagccccaagtatttggctttgtttaaaaattctgtgagtggaatcaagctggcctgcacttcatgtacctttgttacctctgtgggcgatgctatggccaagcatttggtattcaacccctctcacagatccagcagcatcctgccacggggactcacttggatagctcactcaaggcatggccagactcgtgaccgagtgcatgaccggaacgtgaagaatatgtaccctcctccttccttccccactaacaaagctgccactgtgaaatctgcgggggccaccccagctgagcctgaagagctactaactcccttagccccagcactcccatcaccagcctcaactgcaaccccaccaccaacccccactcacccgcaggctttagcccttccaccgctggctacagagggagccgaatgtctgaatgttgatgatcaggatgaagggagcccagtcacccaagaacctgagctagcatcaggtggtggtggtagtggtggagttggcaaaaaggagcagctgtctgtgaagaagcttcgagtagtactgtttgctctatgctgcaatacagaacaggcagctgaacacttccgaaatccccagcgacgtattcgccgttggcttcgacgtttccaggcctcccagggggagaatctagagggcaaatatctgagctttgaggcagaagagaaactggctgagtgggtgctaacccagcgcgaacaacagctacctgtaaatgaggagaccttgttccagaaggccaccaaaataggacgttctttggaaggggggtttaagatctcctatgagtgggctgtgcgtttcatgctgcggcaccacctgactccccatgcccggcgagctgtggcccacaccctacctaaggatgtagcagagaatgcaggactcttcattgattttgtacaacggcagattcacaaccaggacttacccttgtctatgattgtggctattgatgagatctctttgttcctggatacagaggtgctgagcagtgatgatcgaaaggagaatgccctgcagacagtgggcacaggggaaccttggtgtgatgtagtcctagccattctggcagatggcactgtccttcccaccctggttttctacagagggcagatggatcagcctgctaacatgccagactccatattgctagaggcaaaggagagtggctacagtgatgacgagatcatggagctgtggtcaactcgagtgtggcagaagcacacagcttgccagcgcagcaaaggcatgcttgtgatggactgtcatcgcactcacttgtcagaagaggtactggctatgcttagtgcctctagcactttgcctgcagtggtcccagcaggctgtagctccaaaattcagccattagatgtatgcatcaaaagaactgtcaagaacttcctgcataaaaaatggaaggaacaggctcgggaaatggcagatactgcatgtgattctgatgtcctgcttcagctggtgcttgtctggctgggtgaagtgctaggtgtcattggggactgtccagagctagttcagcgctccttcctggtggctagtgttctgcctggccccgatggcaacattaactcacctacaagaaatgctgacatgcaggaggagctaattgcctccctagaggagcaactgaagctgagtggggaacattctgagtcttccactccacgacccagatcatctcctgaagagacaattgagcctgaaagtcttcaccagctctttgagggtgaaagtgagaccgagtctttctatggctttgaagaagctgacctagatctgatggagatttga

SEQ ID NO: 3798 - DNA, 686 bp, Homo sapiens
  source 1..686: mol_type = genomic DNA
agggcggcaccactccctgctccatggaaactgagcaagttgtacaggtagccaggtgtcggtctccagcctgagaactctggctgttgttccttgtgtcgtcccatattcctgcctggcctgcgatggacatcagcaagggcctcccaggcatgcagggaggcctccacatatggatctctgagaaccggaagatggtgccggtacccgagggggcttacgggaacttttttgaggaacactgctatgtcatcctccacgtcccccagagcccgaaggccacgcagggggcgtccagcgacctgcactactgggtcgggaagcaggcgggtgcggaagcgcagggcgctgcggaggccttccagcagcgcctacaggacgagctggggggccagaccgtgctgcaccgcgaggcgcagggccacgagtccgactgcttctgcagctacttccgcccgggaatcatctacaggaagggaggcctagcatctgacctcaagcatgtggagaccaacttgttcaacatccagcgactgctgcacatcaaagggaggaagcacgtgtctgccactgaggtggagctctcctggaacagctttaataagggtgacatcttcctgctggacctaggcaagatgatgattcagtggaatgggcccaagaccagcatttctgagaaggctcgg

SEQ ID NO: 3799 - DNA, 1495 bp, Homo sapiens
  source 1..1495: mol_type = genomic DNA
gcagccggtcgtaaccaagttgtgtcctgtcagccgctgtccccttcgccgcgatgccgctggagaacctggaggaggagggtctgcccaagaaccccgacttgcgtatcgcgcagctgcgcttcctgctcagcctgcccgagcaccgcggagacgctgccgtgcgcgacgagctgatggcggccgtccgcgataacaacttttggaacagaatccggcaagagcaaaccgaggattgccctccctccagccctagtagaggttggcattgccaggattggccgtcacgcaaacctcccaccagcatacgtttatgttttgccaagccgattattaagcgccatcgcatgccttcctacatggctccttactatgaagccttgtgcaaatccctcgactggcagatagacgtggacctactcaataaaatgaagaaggcaaatgaagatgagttgaagcgtttggatgaggagctggaagatgcagagaagaatctaggagagagcgaaattcgcgatgcaatgatggcaaaggccgagtacctctgccggataggtgacaaagagggagctctgacagcctttcgcaagacatatgacaaaactgtggccctgggtcaccgattggatattgtattctatctccttaggattggcttattttatatggataatgatctcatcacacgaaacacagaaaaggccaaaagcttaatagaagaaggaggagactgggacaggagaaaccgcctaaaagtgtatcagggtctttattgtgtggctattcgtgatttcaaacaggcagctgaactcttccttgacactgtttcaacatttacatcctatgaactcatggattataaaacatttgtgacttatactgtctatgtcagtatgattgccttagaaagaccagatctcagggaaaaggtcattaaaggagcagagattcttgaagtgttgcacagtcttccagcagttcggcagtatctgttttcactctatgaatgccgttactctgttttcttccaatcattagcggttgtggaacaggaaatgaaaaaggactggctttttgcccctcattatcgatactatgtaagagaaatgagaattcatgcatacagtcagctgctggaatcatataggtcattaacccttggctatatggcagaagcgtttggtgttggtgtggaattcattgatcaggaactgtccaggtttattgctgccgggagactacactgcaaaatagataaagtgaatgaaatagtagaaaccaacagacctgatagcaagaactggcagtaccaagaaactatcaagaaaggagatctgctactaaacagagttcaaaaactttccagagtaattaatatgtaaagccatgtaactaacaaaggatttgctttagagataattatttggaatttttatagcttacttcacaatgtgcccaggtcagctgtataaaataaatactgcattgttgtttc

SEQ ID NO: 3800 - DNA, 2069 bp, Homo sapiens
  source 1..2069: mol_type = genomic DNA
agtctcttccccaactctccccacccctggtgctctccgccccgcttgcctcccgttcttccccgcccgctccatccgggtcgctgacggctgtctctggactggacagcagtggcgtccgcttttctctaaggaacccgataagaactccattttctgttgatgtggagacatagggtacctccaactttccggggtttcagaagagaattttttattgaaactggaagaccaaaataattacaagcatgttgtgctggggaaatgcatcctttgggcagctaggtttgggtggaattgatgaagaaattgtactagagcccagaaaaagtgacttctttataaataaaagggtccgagatgtaggatgtggactcagacatactgtgtttgttctggatgatggaacagtgtacacatgtggatgtaatgatctaggacagctaggtcatgaaaaatccagaaagaaaccagagtttcgctcttgtttcccaggccggagtgcaatggcgccatctcggctcaccgcaacctctgcctcccaggttcaagcaattctcctgcctcagcctcccgaatagctgggattacaggcgcccaccacaatgcctggctacttttcatattttaatggagatggggttttaccatgttggccaggctggtctcgaactcctgacctcaggtgatccgcctgccttggcctcccgaagtgctggaattacaggcatgagccactgctcctggcctaagatgttttttaaataatgtttttaactaaattttaagaatgtttttaactaaagttatttatatttggaataattcgttaatgatttgtgtcatttccccaacccctttttaaatttgtgaatttgaggactggattaaaagataaaaagttgttggatcttatttattttaaagtcttctggtaattgagcaagttggttatatttctgggacaatgtaataaacatagttcatttcccaggaggtttttgttttgttttgttttgtttcgttttgtttgagacagagtctcactctgttgcccaggctggaatgcagtggcacgatctctgctcactgcaacctccgcctcccaggttcaagcgattctcctgcctcggcctcccgagtaggtgggactataggggcgtgccaccatgcccgggtaattttttatatttttagtagggacggggtttcaccgtgttagccaggatggtcttgatatcctgaccttgtgatctgcccgccttggcctcccagagtgctgggattacaggcgtgagccaccgtgcccagctgacttcacaagaactttaaacttgtgtcagaaagcacatggaatggagggaactaagaattgtttctttacataggttggctttataaatatacatattccataactaataaggaatgaaggagaaagaggtagccttattaaggataaattattctcgagattcataataacctactggaggacttggcctgacaatgtagtgaatagatttaacctgtggcctattgaaaagaggtgtttctgttctggactttttagggaccacacagaaagatttaactgaattcctttattatactaaaggtgcagattatgttcatgttcatctctgttgtcttgtatatgtatgtccttttctatcactactggcttttctgaattatttccagagaagtgaatgtctgtttcactttcatgtttttttcttcataagaactttaaaatactttttaagctaatgtctcaatttttaaatttatagctaacaaatatatttaatcttcagtgcgctagaccaatccatttaaatgaattgttgtttttttatactttcaaattcagttctgaagattttaagtatgggaagtatacttttctttacaagatccttttcttactgtgtatctaatcataggtataatttggtgaccatggttatgttttgcacattgatttccatttgtttcatgttagaaacagtactaaactgttctgtgaccataatttgtaaataaagtggtgttctgtttaaaaa

SEQ ID NO: 3801 - DNA, 1046 bp, Homo sapiens
  source 1..1046: mol_type = genomic DNA
agagaattttgcaacacgtggtagtgaactgtgaggagtttgaggggtctgaagactgaaagagtcgaatggtttgttggcagtctgtgtctgtgtggagtgttgcaggacgagtggaaatgactgtttccaagttcatggcaattcagaaggcccttcagccagactggttccagtgcctctccgatggagaagtatcttgtaaggaagcaacttccataaaaagggtcagaaagtctgttgaccgatcacttcttttcttggataactgtctgcggctgcaggaagagtcagaggttcttcagaagagtgtgatcattggagtgattgaaggtggagatgtgatggaagagaggctgaggtcagcacgagagacagccaagcggcctgtgggtggcttccttctggatggttttcaaggaaatccaacaaccctggaggctagactacgcttgctgtcatcagtcactgcagagctgccggaggacaagccaaggctcatatctggtgttagtcggccagatgaggtgctcgagtgtattgaaagaggagtggacttatttgagagttttttcccttatcaagtaacagagcggggatgtgccctgactttcagttttgattaccagccgaatcctgaagagacactactacaacaaaatggaacacaagaagaaataaaatgtatggatcaaataaagaaaattgaaacaactggttgcaaccaagaaataacatcatttgaaattaatctgaaggaaaaaaagtaccaggaggactttaacccgctggtgagaggatgttcctgttactgctgtaagaatcacactcgggcatacatccaccatctgctggtgaccaatgagctgctggccggagtcctgcttatgatgcacaactttgaacactactttgggtttttccattacatccgggaagcactaaaaagtgacaaactggcacagttgaaagagctcatccacaggcaagcatcttgagatcttgcaaatacaagtctcactcttcacactgagcctgtaccactg

SEQ ID NO: 3802 - DNA, 627 bp, Homo sapiens
  source 1..627: mol_type = genomic DNA
acatgtttcctttgttgtgagctgcggcagagactggtggctggaggagacgccggcgctggagagtgcgctgcgccgcccgccgctgagggaccgcggggttagccactgctggctgcttccagtgttcgccgagaggtaccgggggtgacagctccgggaccggccgaaaggcgaggaaccgccacataaagaagatccctaatagtcatttctcaacaattatatagtcaactgatgtaacaatggtactaatattgggacgcagactaaacagagaggatcttggggtgcgtgattccccagcaactaagcgaaaagtttttgaaatggaccccaaatctctgacaggtcatgagttttttgacttctcttcaggatcatcccatgccgaaaacatactccagatatttaatgaatttcgtgatagccgcttattcacagatgttatcatttgtgtggaaggaaaagaatttccttgccatagagctgtgctctcagcctgtagcagctacttcagagctatgttttgtaatgaccacagggaaagccgagaaatgttggttgagatcaatggtattttagctgaagctatggaatgttttttgcagtatgtttatactggaa

SEQ ID NO: 3803 - DNA, 1815 bp, Homo sapiens
  source 1..1815: mol_type = genomic DNA
agaggctgtggtggccccgagcgcgagtgtgtaggtgacaggacagcggccaggcccgcccctcccctcgtgatggtcattgtcctccagagcagtgatggaggaaataccagcccaggaagcagcagggtcaccaagggtccagtttcagtctttggagacccagtctgagtgtctgtccccagagcctcagtttgtgcaggacaccgacatggaacagggactcactgggggatttccaatttccaagcctgatgggatctcccagctggaacaggatctacaggtctttgatctggaaactaagactagagaagtcttaagagatgactgctcagatggagagaccagagaagagaacaagctgttgattcctaagcagaaaatttcggaagaagtgcattcatacaaagtgagagtaggaagactcaaacacgatattacccaagttcctgagactagagaagtgtataagtctgaggacagattagaaagacttcaggaaattctaaggaaatttctgtacctggagagagagtttaggcaaataacaatcagcaaggaaaccttcaccagtgagaagaacaatgaatgtcatgaacccgaaaaaagcttcagtctggactctactattgatgcagatcagagagttcttagaatacagaataccgatgacaatgataagtatgacatgagcttcaaccagaattcagcctctggtaaacatgaacacttaaatctaacagaggattttcagagtagtgaatgtaaggaaagcttaatggatctctcccaccttaataaatgggagagcatccctaacactgagaaatcctataaatgtgatgtatgtgggaaaattttccatcagagctcagcccttactagacatcagagaatccatactagagagaagccctacaaatgtaaagaatgtgaaaagtctttcagtcagagctcaagtcttagtcgacataaaagaatacacactagagaaaaaccttacaaatgtgaagcatctgataaatcctgtgaagcgtctgataaatcctgtagtccaagctcaggcataattcagcataagaaaattcacaccagagccaaatcttacaaatgtagcagttgtgaaagagtcttcagtcgtagtgtccaccttactcaacatcagaaaattcacaaagagatgccctgtaagtgtactgtatgtggcagtgacttctgccatacttcatacctacttgaacatcagagggtccatcatgaagagaaagcctatgagtatgatgaatatgggttggcctatattaaacaacaaggaattcatttcagagaaaagccctatacgtgtagtgaatgtggaaaagacttcagattgaattcacatcttattcagcatcaaagaattcacacaggagagaaagcacatgaatgtaatgaatgtggaaaagctttcagtcaaacctcatgccttattcagcatcacaaaatgcataggaaagagaaatcgtatgaatgtaatgagtatgagggcagtttcagtcatagctcagatcttatcctgcaacaagaagtcctcaccagacagaaagcctttgattgtgatgtatgggaaaagaactccagtcagagagcacatctagttcaacatcagagcattcataccaaagagaactcatgaatgtaatgaagatgggaagatatttatcaaattcaggcttcattcagcatctgagagttcacaccagggagaaatcatgtatgtactgcatgtggtaaagccttcagtcatagctcagccattgctcagcatcagat

SEQ ID NO: 3804 - DNA, 544 bp, Homo sapiens
  source 1..544: mol_type = genomic DNA
acaactggagcagccgggaacagctctgaccacagtggttccggggagaagcctttccaggacccatgtgtaggcacaactgttttccctgatcaggatacttgcggcactcaagaattctccgaagtttgaaggttatgaatggttatcactcaaggattcagaactaagatactttcccagcaacatctagactgctgtttgaccaaacaacggggctccaacagcctagccaagtgaaacataaaactaaccatcacagtatccttgtcaaaaatcagtctgacaacacatcagaggaaagaaattcctaagggaacactgctcagaaagtactgcagcatgtcttcaaatgcctgaggatcaagttggaaaactagaagcaacagaaaacacaataagcgcaatggcggcggccgcggcggagcagcaacagttctacctgctcctgggaaacctgctcagccccgacaatgtggtccggaaacaggcagaggaaacctatgagaatatcccaggccagtcaaagatcacattcctctta

SEQ ID NO: 3805 - DNA, 4476 bp, Homo sapiens
  source 1..4476: mol_type = genomic DNA
ataggtgcattgtgggaagcactttgctgtccacagccaggccgcttgtgatgaaactgtaacttacaagaaaagggctgggttttgaaaataacacaggctctaaaaaccctaagaagcggtgcaacttttggcaggaatcggggttagcgggacctcaagggctcactgcggctaagtgaacgctgactggtcctccagcgtgagctagaacagacgtctctatggtcaagtaaacagagcgtgtgctgtcttccccatgtggtggggttgcgcatgatcagtagctgcaccactagaaagatggcggagcaagagcaaagaaaaatccctttggttccagaaaatctcctgaaaaagaggaaggcttatcaagccctcaaagccacccaggcaaagcaggcacttttggcaaagaaggagcagaagaaaggaaaagggctcaggtttaagcgactggaatcattcctacatgattcctggcggcagaaacgtgacaaggtgcgtctcagacgactagaagtgaaacctcatgccttggaattgccagataaacattccttggcctttgttgtacgcatcgaaaggattgacggcgtgagtttactggtgcagagaaccattgcaagacttcgcctaaagaaaatttttagtggtgtctttgtaaaagtcaccccccagaatctaaaaatgctgcgtatagtggaaccttatgtgacctggggatttccaaatctgaagtctgtccgagaactcattttgaaacgtggacaagccaaggtcaagaataagaccatccctctgacagacaatacagtgattgaggagcacctggggaagtttggcgtcatttgcttggaagacctcattcatgaaattgccttcccagggaagcatttccaggagatctcatggttcttgtgccctttccacctctcagtggcccgtcatgctaccaaaaatagagtgggcttcctcaaggagatgggcacacctggctatcggggtgaacgcatcaatcagctcatccgtcagctgaactagacccaggtgaggcagggctgaaaactgcccttgggctgacttttgataggccatgccttgccactttacaagttctttttgcatttactagtatttaagagtaaccttgagattgggaggaatagaggaggctggtacaaatagatggagacctgctgggatcagtgaatgcctgattaggacatggggctatgcatagcctaagagttataggcttaaagatgtcgagtaactaaaaactgtattgctggccgggcgcggtggctcacgcctgtaatcccagcactttgggaggccaaggcgggcagaccatgaggtcaggagattgagaccatcctggccaacatggtgaaaccctgtctctactaaaaatacaaaaatgagctgggtgtggtggcgcgtgcctgtagtcccagctactcgagaggctaaggcaggaaaatcgcttgaacccaggaggcagagattgcagtgagccaagattgcaccagtgcactccagctgggcgacagagcgagactccatctcggaaaaaaaaaaaaaaaaactattgctgcagtcattcagatggaaatgaggaaagaataatattaataactgatttcaaaaaggacttgaagatgtgaatcatctattttgctgaagaaatcttaactctttgaaattactttttattgctgttgtcatactcttaggtgccaaactgcggtaaattttttatcagtgaagtggaagcatgtgttttgttttggaaatttttatcaagtatcttcagagaagattatttcctgctttatcttcagaaactggaaagggtcaaagaaaagacagtagctggccggtcgtggtggctcatgcctgtaatcccaacacttagggaggctgaggtgggcagatcacctgaggttgggagttcgagaccagcctgaccaacatggagaaatgccatctctactaaaaatacaaaaattagccgggcatggtggcacgtgcctgtaatcccagctactcaggaggctgaggcaggagaatcgcttgaacctgggaggtggaagttgcagtgagctgagatcacgccattgcactccagcctgggcaacaagcgaaactctgtctcaaaaaaaaagaaaagacagtagcatatgttcatgtcaagcacctctcatcacagtcgagttccaaggaaaaattccagtgttttctgcattgggtgctgtgtcatctgaaatcggcacattccatggaggaaggagtcctgctttgttgcatgtatcctagggtttaatgttggtaaatgagtcactctagcatttgtagaaggctccctgagactcctgcagcagtcgaccaagcccaaggacataattgaatctggagagtcctggggccttgttttgaaaaagacttgaaatacacataggaagaaaggcataaaaataaatgttcacttgtctctgctgtgagtatgtgttccaacttttcagtgatggctttgagaattctcaaacttgactggctctaagtgtatctggtggcttttgtatcgtaacctgaaactggcttagtactttttcctaaaagctcaggatttgagaatgaggaccccttcgccaggaaaacatgtatacactcaaaattttgcttgcagttctagggtgtttagacccttctcagatacctgtgcatcttatgggttttgtttttctctttgagacagtctcaccctgttgcccaggctggagcgcagtggcatgatctcagctcattgcagcctccacctcctgggttcaagtgattctgcctcagccccttgatcagctgggattacatgcatgtaccaccacacccagctaattcttgtatttttagtagagatggagacagagtttcaccatgtaggccaggctagtctcaaactcctgacctcaagtgatccacaagcctgggcctcccaaagtgctgggattacaggcatgagcaactgcgcccagctcttgtgtaccttatgtgaggaagtcctgctcaatcaggatcggtcacgcaggccctgatcttgctactctggttccatgtcctatggaagaccaaagtttaccaagatagatttttcccttcatagtggcagatagtgttaacccctgcaccatctgtaactcagaaatccccaccatttcttcccctgggcttcagaatagaattgcctggtttctctgatgatcagcatggttccttaaaacccaaatcagcaaggaatgaacaattttgtttggcatggatgaaattagcactgtttggctcgttaggccccaggcaggcaggcaccttaattttttccttgcatattctagtcttcagaagcattgccttttgtcctactggtagtgacatagaccaataacagggcatctggggattttaatcctgaaaacagtgagtctgatactgcttgtgtttttcatcagtgtccaccccaagtgggtcttcctgctattctcttcacttagttgcccctcacttgccatctgagcaattggcaaggatgtgccaggcctaggttaaacttggaaacatgcttgaccattctattccctggtcctttaagatcagtttggctgcaattttggctccttggaccctcaagcatagctggtaaatcaagttagagatgtaactgccttaaaacatgccagcttaggctgggcacggtggctcacacctgtaatctcaacacttcaggaggctgaggcaggcagatcacttgaggtcaggagttcgagaccagcctgaccaacatggagaaattctgtccctactgaaaatacaaaattagccggatgtggtggtgcatgcctgtaatcccagctacttgggaggctgaggcaagagaattgcttgaacccagggaggcagaggttgcagtgagccgagatcacaccattgcactccaccttgggcaacaaaagcaaaactctgtctcaaaaaaaaaaaaaaaaaaagtgccagcgtatgaggtaattagattggttctctccagaggtaacctgccaagaagagatgctatagatgttactcctatactgtaaaacattgtgaaatcagattactttaaaatgatgtattacaaagttatgcaaaaaagcagttgtgactatggaagcccaaggcttatatcccagctctgtcttacactaaatatgggtacagtgtttccactctgtccataaaatgggagctaatattctccaacctgtgtgcctgacatgatggttaaagggattaaacaaaacaatagtttgtaatttattctgtcagagcaaactgctggtaaataaaagggactaagttgacgaaaaataaattttaaaaaacctaataaaacaagtttgtaatttataattgtatacaaataaaagatgttacaaaaattgcgca

SEQ ID NO: 3806 - DNA, 2117 bp, Homo sapiens
  source 1..2117: mol_type = genomic DNA
gcggagactgcggggcgggccatggcggcgaacctgagccggaacgggccagcgctgcaagaggcctacgtgcgggtggtcaccgagaagtccccgaccgactgggctctctttacctatgaaggcaacagcaatgacatccgcgtggctggcacaggggagggtggcctggaggagatggtggaggagctcaacagcgggaaggtgatgtacgccttctgcagagtgaaggaccccaactctggactgcccaaatttgtcctcatcaactggacaggcgagggcgtgaacgatgtgcggaagggagcctgtgccagccacgtcagcaccatggccagcttcctgaagggggcccatgtgaccatcaacgcacgggccgaggaggatgtggagcctgagtgcatcatggagaaggtggccaaggcttcaggtgccaactacagctttcacaaggagagtggccgcttccaggacgtgggaccccaggccccagtgggctctgtgtaccagaagaccaatgccgtgtctgagattaaaagggttggtaaagacagcttctgggccaaagcagagaaggaggaggagaaccgtcggctggaggaaaagcggcgggccgaggaggcacagcggcagctggagcaggagcgccgggagcgtgagctgcgtgaggctgcacgccgggagcagcgctatcaggagcagggtggcgaggccagcccccagagcaggacgtgggagcagcagcaagaagtggtttcaaggaaccgaaatgagcaggagtctgccgtgcacccgagggagattttcaagcagaaggagagggccatgtccaccacctccatctccagtcctcagcctggcaagctgaggagccccttcctgcagaagcagctcacccaaccagagacccactttggcagagagccagctgctgccatctcaaggcccagggcagatctccctgctgaggagccggcgcccagcactcctccatgtctggtgcaggcagaagaggaggctgtgtatgaggaacctccagagcaggagaccttctacgagcagcccccactggtgcagcagcaaggtgctggctctgagcacattgaccaccacattcagggccaggggctcagtgggcaagggctctgtgcccgtgccctgtacgactaccaggcagccgacgacacagagatctcctttgaccccgagaacctcatcacgggcatcgaggtgatcgacgaaggctggtggcgtggctatgggccggatggccattttggcatgttccctgccaactacgtggagctcattgagtgaggctgagggcacatcttgcccttcccctctcagacatggcttccttattgctggaagaggaggcctgggagttgacattcagcactcttccaggaataggacccccagtgaggatgaggcctcagggctccctccggcttggcagactcagcctgtcaccccaaatgcagcaatggcctggtgattcccacacatccttcctgcatcccccgaccctcccagacagcttggctcttgcccctgacaggatactgagccaagccctgcctgtggccaagccctgagtggccactgccaagctgcggggaagggtcctgagcaggggcatctgggaggctctggctgccttctgcatttatttgccttttttctttttctcttgcttctaaggggtggtggccaccactgtttagaatgacccttgggaacagtgaacgtagagaattgtttttagcagagtttgtgaccaaagtcagagtggatcatggtggtttggcagcagggaatttgtcttgttggagcctgctctgtgctccccactccatttctctgtccctctgcctgggctatgggaagtggggatgcagatggccaagctcccaccctgggtattcaaaaacggcagacacaacatgttcctccacgcggctcactcgatgcctgcaggccccagtgtgtgcctcaactgattctgacttcaggaaaagtaacacagagtggccttggcctgttgtcttcccctattttctgtcccagctcatccgtgtctctgaagaacaaatatgcttttggaccacgaa

SEQ ID NO: 3807 - DNA, 4294 bp, Homo sapiens
  source 1..4294: mol_type = genomic DNA
gggcaccagagtgccgagcccaggacgcccccggcccaggcccttggggtggacaagtccttcacttctcgccggagtgtgtggaggagcgatgggcagaaccagcacttccctcaggcactagacctgtcacgagtgaacttagttccctcctatactccttcactctaccctaagaacacagatctatttgagatgattgagaagatgcagggaagcaggatggatgaacaacgctgctccttcccgccgcccctcaaaacagaggaggactacattccatacccgagcgtgcacgaggtcttggggcgagaaggacccttccccctcatcctgctgccccagtttgggggctactggattgagggcaccaaccacgaaatcaccagcatccccgagacagagccactgcagtcgcccacaaccaaggtgaagctcgagtgcaaccccacagcccgcatctaccggaagcactttctcggcaaggagcatttcaattactactcactggacgctgccctcggccaccttgtcttctcactcaagtacgatgtcatcggggaccaagagcacctgcggctgctgctcaggaccaagtgccggacataccatgatgtcatccccatctcctgcctcaccgagttccctaatgttgtccagatggcaaagttggtgtgtgaagacgtcaatgtggatcggttctatcctgtgctctaccccaaggcttcccggctcatcgtcacctttgacgagcatgtcatcagcaataacttcaagtttggcgtcatttatcagaagcttgggcagacctccgaggaagaactcttcagcaccaatgaggaaagtcccgctttcgtggagttccttgaatttcttggccagaaggtcaaactgcaggactttaaggggttccgaggaggcctggacgtgacccacgggcagacggggaccgaatctgtgtactgcaacttccgcaacaaggagatcatgtttcacgtgtccaccaagctgccatacacggaaggggacgcccagcagttgcagcggaagcggcacatcgggaacgacatcgtggctgtggtcttccaggatgagaacactcctttcgtgcccgacatgatcgcgtccaacttcctgcatgcctacgtcgtggtgcaggctgagggcgggggccctgatggccccctctacaaggtctctgtcactgcaagagatgatgtgcccttctttggaccccccctcccggaccccgctgtgttcaggaaggggcctgagttccaggaatttttgctgacaaagctgatcaatgctgaatatgcctgctacaaggcagagaagtttgccaaactggaggagcggacgcgggccgccctcctggagacgctctatgaggaactacacatccacagccagtccatgatgggcttgggcggcgacgaggacaagatggagaatggcagtgggggcggcggcttctttgagtctttcaagcgggtcatccggagccgcagccagtccatggatgccatggggctgagcaacaagaagcccaacaccgtgtccaccagccacagcgggagcttcgcgcccaacaaccccgacctggccaaggcggctggaatatcattgcttattcctgggaaaagtgcgagtagattcggacgccggggcagtgccataggcataggaaccgtggaagaggttgtcgtccgcggggccgccggctctggaggctgcctgcacgcgctgttctctgctcgctctcaggacggaggccatattggggacgttgcccctctgcccccgggacaggccccagggcgtgcgggatggagtggcggcagctccgatggcactcagcacctgctttggggcctggtacctgtgccagagccagtgcccctcaccaggggcttctggccctgccttggcccctgggaccctggcccagtccctgccaggatccggtacccaaaggccctacacccagccgcacgtcccccaatatcgccggtctgcatggagcgccatccctctcctctgccctgactcctcctccccgccacgaagtgacctggggtcctaccccttcctgcctccagagaagctgggggcgggcttctggggcctggggcatcccagcacagtgtgtgggaagctgggggagtcttccagctgctgggccagaacctcccccagccaatttggaggttccggggaggggccctagctggcacggggtgggacttgggttgctacactgccctctgaccactgcccttaggctgcagatcccacagagccctggggggcggggagcggtagccattctgaggactcggcctcctcccaccctagccccctcaggatgctgtcctaatcctgggccagtattgacgtgcagtcctgccgtgtgagctcgggagagccccttgccctcctggggactgtttccctttcgtaaactgggaggctgtctctgggaatggatatcttctctcgttctttcttgctcatcaactctgcttcagggcctggggcagcaggatccccagaggggatgtggggggggcactggggctcccaggtaaggtggcactgagttggggcctctccccacagtcactgattgtccctgggaagagccccacgaggaagaagtcgggcccgttcggctcccgccgcagcagcgccattggcatcgagaacatacaggaggtgcaggagaagagggagagccctccggctggtcagaagaccccagacagcgggcacgtctcacaggagcccaagtcggagaactcatccactcagagctccccagagatgcccacgaccaagaacagagcggagaccgcagcgcagagagcagaggcgctcaaggacttctcccgctcctcgtccagtgccagcagcttcgccagcgtggtggaggagacggagggtgtggacggagaggacacaggcctggagagcgtgtcatcctcaggaacaccccacaagcgggactccttcatctatagcacgtggctggaggacagtgtcagcaccactagtgggggcagctccccagtgaggtggctccctcctgcccccctccccaggcccctctcgatcaccccacccagacgccggcaagttgggggaccctgcgtgtcccgagatcaagatccagctggaagcatctgagcagcacatgccccagctgggctgttagccgggccaccccctctgaaggtgaaactgagcagatgaggccacagaagcacaaggggaaggtgccgtgtcaagcccaggcagacgagacctctgccctgaagaccaacaccagcccgtgggctgccccctgcctccccaccctccccatggcccacccatctgggctgtctctgcagggcagagccgtccagacctgggatcagggaagctgctggcatcgtccccacccccagcctgggggtctgggctggggcagggattgctcagtggaagcaggactgggggtctggcttgccccctccctgggcctccatcacccctgagcatccctctggactcagagggaacaaggtgggagagagagtttgagacagctccgtgtggagagcttagcccctggaggcagcacaaggaggatgtgatatgtgggggagtgagcactgggttgggagccgggtcctggtttccaatttgggttctgctgtgtgactctgggcaagtcactctccctctctgggcatgtctgctacaaatggacaagattatttcagaggtcactgaagactgtgattacatgcacctgccttagaaggtaggattttcttcccagggacctcctatcaccctaccctgcttcttgaggtccctggagccccaggtgggctgaggggcagggagccggctgtgcccagtatgcctcctggaccctccagttctgccacaggtctgccgatgccctgtccactgcctacacatgacagacaagtaaccccctcatgggggatggggacctacctggctcctcagccagcacccagcttaacccctgccatcccatgctgggccctccaggccaagagtctcagctggccgagagtccaggccttgcctcccccgaccgccatggagggggcagcccggcacagctgctgggagcccttgtgtgtctggtcacactttttaggcgtcacgccaaaggccagcctcctggccccaatacccattttggaagcccctgtggccgtgtggatgtcggtaacagttgtataaaataaattctatttatcgctattgt

SEQ ID NO: 3808 - DNA, 2552 bp, Homo sapiens
  source 1..2552: mol_type = genomic DNA
cgtctattttcctacgactccagctggccttgaacatgggaaacacgagcttcaatgaggtcatggaggcccagctaccctcacacggcggccctaaaccctcagctgagagtgacatgggcacccgcagggactacattatggccaagtatgtggagcataggtttgcacgccggtgcacacctgagcctcagcgactctggacagccatttgcaacagggacctcctgtcggtactggaggcctttgccaatgggcaggactttggacagccgctgccagggcctgatgcacaggcacctgaagaactcgtcttgcatttggctgtcaaagtcgccaaccaggcttccctgcctctggtggatttcatcatccagaacggtggtcacctggatgccaaggctgctgacgggaacacggctctgcactacgcagcactctacaaccagcccgactgcctcaagctgctgctgaaggggagagctttggttggcacagtaaatgaagcaggcgagacagctctggacatagccaggaagaagcaccacaaggagtgtgaggagctgctggagcaggcccaggcggggacctttgccttccctctacatgtggactactcctgggtaatttccacagagcctggctctgacagtgaggaggatgaggaagagaagcgctgcttgctgaagctcccggcccaggctcactgggccagtgggaggctggacatcagcaacaagacctatgagactgtcgccagcctgggagcagccacccctcagggcgagagtgaggactgtcccccgcccttgccagtcaaaaactcttctcggactttggtccaagggtgtgcaagacatgccagtggagatcgttctgaagtctccagcctgagttcagaggcccctgagacccctgagagcctgggcagtccagcctcctcctccagtctgatgagccccttggaacctggggatcccagccaagccccacccaactctgaagagggcctccgagagcccccaggcacctccagacccagcctgacatccgggaccaccccttcggagatgtacctccccgtcagattcagctccgagagcactcgctcctatcggcggggggcgcggagccctgaagatggtccctcagccaggcagcctctgcccagaaggaacgtgccggttggcatcactgaaggagatggctcaaggactgggagtctcccagcaagttctgtgcaacttttgcaagactagctccttgctggcccccacatgccccatgctaggccccaatgttcagagctgggacttgagctcacaaaactggggagctgagacatttgttctcttggatctcactctctctgtcccttgtgcctctgtagctggccttcttcctgccacaggccatgcctctaccaaggacacatggcctttccctgttaggactgatggcggttctttcctatctcattacccgctaggggcctgggagccctgtggctggatctgagtgctcctgagctggcttcagctgcagaactctcagtccctcatcagatcgagactctatttcccccgtcagtctgggggcttcacaagggcaggagagccctccatcactgacttccagatcagggaccctgccaagtagggactgtcttctcagccagccatttattagtctaatattccttcactaaattccaactctatgtctggacctgtgttaggcacttcagataccacacgagtaagacaagggccctgcaggggtggtcctttggtggaaagctggtcttaagggttgggcttgggaataggcagggtcagattccagggcatggctctggactcagctggtttatacctatatgaccattacaattgtctacagatcacatccattctggctggtcaacatgcatgctgtactggctgttaaataaaaatattctgaatgtcactccttttgagggacagcacagccttccctaggcattctcctatattccccagccaaattgtagagtcagatgcacccacatttgcctgtgtccttgatttagcaggaaggaaaggaatagtcagggttgatggatgcccacttctcttctctttctcttggtcaactcaggagccttttagtctgagggaatggagaggcaaagaaagaagggagagtaatagaattgggagggcagagacttaagggttctgcttcccagccctagaaattctatcattgctcagccccaatgagaaagcagatacacctaagccatcatcaaccactaacatctcaacttgccagttgctgggtgctgggccctggcaggaatgggccaagccaagcaggggagactagagagcaccaatggccaacacagctgcctggctggggaggctgtgctgtttcccctggagacctgactggtctgtggttcccacaggaacagggttgtcttttgagcccccagtgtctggtttcattcatctcagacttgttatttcactcatctctaataaaggattggggggtcagtt

SEQ ID NO: 3809 - DNA, 813 bp, Homo sapiens
  source 1..813: mol_type = genomic DNA
atggcgatggagatgaggcttccagtggctcgcaagcctcttagcgagagactgggccgcgacactaagaaacatctagtggtgccgggggatacaatcactacggacacaggattcatgcggggccatggaacgtatatgggagaagagaagctcattgcatctgttgctggctctgtggagagagtaaacaagttgatctgtgtgaaagctttgaaaaccagatacattggtgaagtaggagacatcgtagtgggacgaatcacagaggttcaacagaagaggtggaaggtggagaccaactccaggctggattcggtcttgctgctctcgtccatgaaccttcctggaggagagctgaggagaagatctgcagaagatgagcttgcaatgagaggtttcttacaggaaggggaccttatcagtctaggtcagggggttttggtccaggtttccccctccctggtgaaacggcagaagacccactttcatgatttgccatgtggtgcctcagtgattctcggtaacaacggcttcatctggatttacccaacacctgagcacaaagaagaggaagcagggggcttcattgcaaacctggagcctgtctctcttgctgatcgagaggtgatatcccggcttcggaactgcatcatctcgctggtaactcagaggatgatgctgtatgataccagcatcctgtactgctatgaagcatcccttccacatcagatcaaagacatcttaaagccagaaataatggaggagattgtgatggaaacacgccagaggcttttggaacaggagggataa

SEQ ID NO: 3810 - DNA, 542 bp, Homo sapiens
  source 1..542: mol_type = genomic DNA
atgtatgtcctcacaatgcaggaggtgaaatgtgtatgtcatgtgtccaaattgtaagatacttgctatactttcccagcaacatctagactgctgtttgaccaaacaacggggctccaacagcctagccaagtgaaacataaaactaaccatcacagtatccttgtcaaaaatcagtctgacaacacatcagaggaaagaaattcctaagggaacactgctcagaaagtactgcagcatgtcttcaaatgcctgaggatcaagttggaaaactagaagcaacagaaaacacaataagcgcaatggcggcggccgcggcggagcagcaacagttctacctgctcctgggaaacctgctcagccccgacaatgtggtccggaaacaggcagaggaaacctatgagaatatcccaggccagtcaaagatcacattcctcttacaagccatcagaaatacaacagctgctgaagaggctagacaaatggccgccgttctcctaagacgtctcttgtcctctgcatttgatgaagtctatccagca

SEQ ID NO: 3811 - DNA, 569 bp, Homo sapiens
  source 1..569: mol_type = genomic DNA
atgcgcgctgcagcccgcggcccccgagagccgcgcttttgtaagagctggccccttacatatggaaatgacgctcacgcgggtccccattcgcgtccttttgaaggacgcccgcccggaaccgctgcgccggctgcgaagtattgtcccgtttctccagccctaacaaagcgtcctccttcgctttgcagagcgctggaggcgggctgccggctgtgcgggcgctccggagagaccgacagaaggtgagcactgtgggctatgggatggatgaggtggagcaggaccagcatgaggcccgactcaaggagctgtttgacagttttgacacgacgggcacagggtccctggggcaggaggaactcaccgacctttgccacatgttgagcttggaggaggtggccccagtgctgcagcagacattacttcaggacaacctcttgggcagggtacattttgaccaatttaaagaagcattaatactcatcttgtccagaactctgtcaaatgaagaacactttcaagaaccagactgctcactagaagctcagcccaaatatgttagaggt

SEQ ID NO: 3812 - DNA, 1186 bp, Homo sapiens
  source 1..1186: mol_type = genomic DNA
attcgcctccatggcccactcgccggtggctgtccaagtgcctgggatgcagaataacatagctgatccagaagaactgttcacaaaattagagcgcattgggaaaggctcatttggggaagttttcaaaggaattgataaccgtacccagcaagtcgttgctattaaaatcatagaccttgaggaagccgaagatgaaatagaagacattcagcaagaaataactgtcttgagtcaatgtgacagctcatatgtaacaaaatactatgggtcatatttaaaggggtctaaattatggataataatggaatacctgggcggtggttcagcactggatcttcttcgagctggtccatttgatgagttccagattgctaccatgctaaaggaaattttaaaaggtctggactatctgcattcagaaaagaaaattcaccgagacataaaagctgccaatgtcttgctctcagaacaaggagatgttaaacttgctgattttggagttgctggtcagctgacagatacacagattaaaagaaatacctttgtgggaactccattttggatggctcctgaagttattcaacagtcagcttatgactcaaaacgtcctacagcaaaagaacttctgaaacacaaattcattgtaaaaaattcaaagaagacttcttatctgactgaactgatagatcgttttaagagatggaaggcagaaggacacagtgatgatgaatctgattccgagggctctgattcggaatctaccagcagggaaaacaatactcatcctgaatggagctttaccaccgtacgaaagaagcctgatccaaagaaagtacagaatggggcagagcaagatcttgtgcaaaccctgagttgtttgtctatgataatcacacctgcatttgctgaacttaaacagcaggacgagaataacgctagcaggaatcaggcgattgaagaactcgagaaaagtattgctgtggctgaagccgcctgtcccggcatcacagataaaatggtgaagaaactaattgaaaaatttcaaaagtgttcagcagacgaatccccctaagaaacttattattggcttctgtttcatatggacccagagagccccaccaaacctacgtcaagattaacaatgcttaacccatgagctccatgtgccttttggatctttgca

SEQ ID NO: 3813 - DNA, 708 bp, Homo sapiens
  source 1..708: mol_type = genomic DNA
gggcccgagaccccgcctctcggcgagcccgccctcttctgaagaggcgtttctggaccactgagccccgcctcccactgcgccattttcgagtgaaggacccggagccgaaacaccggtaggagcggggaggtgggtactacacaaccgtctccagccttggtctgagtggactgtcctgcagcgaccatgccccgtaaaggcacccagccctccactgcccggcgcagagaggaagggccgccgccgccgtcccctgacggcgccagcagcgacgcggagcctgagccgccgtccggccgcacggagagcccagccaccgccgcagagactgcaagtgaggaacttgataatagaagtttagaagagattttgaacagcattcctcctcccccgcctccagcaatgaccaatgaagctggagctcctcggcttatgataactcatattgtaaaccagaacttcaaatcctatgctggggagaaaattctgggacctttccataagcgcttttcctgtattatcgggccaaatggcagtggcaaatccaatgttattgattctatgctttttgtgtttggctatcgagcacaaaaaataagatctaaaaaactctcagtattaatacataattctgatgaacacaaggacattcagagttgtacagtagaagttcattttcaaaagataattgataaggaaggggat

SEQ ID NO: 3814 - DNA, 795 bp, Homo sapiens
  source 1..795: mol_type = genomic DNA
gccgcgcgctgcagctcgagttcgggccgcgggggaggctttggagcggcgccggcggtggctcggccggctcagcccctccgccccgcgtccccgccgtgcgcggccttccctgaggcgggcgtccgcgtgggtccgggatcgcgtggccgggcggccgggcgcactcccgggattccaggcttccggggtggcgggcgaggcccagaaagcaccaggccacccggccgcgccggcacccgccgcgtcctgcttgacagaggctgatggacgtgtatttctccacgctttccgcttggccctcatccagcttcagatttcttccatcaaatcagataacgtcactcgcgcttgtagcttcatccgggaggcagcaacgcaaggagccaaaatagtttctttgccggaatgctttaattctccatatggagcgaaatattttcctgaatatgcagagaaaattcctggtgaatccacacagaagctttctgaagtagcaaaggaatgcagcatatatctcattggaggctctatccctgaagaggatgctgggaaattatataacacctgtgctgtgtttgggcctgatggaactttactagcaaagtatagaaagatccatctgtttgacattgatgttcctggaaaaattacatttcaagaatctaaaacattgagtccgggtgatagtttctccacatttgatactccttactgcagagtgggtctgggcatctgctacgacatgcggtttgcagagcttgcacaaatctacgcacagagaggtgaggcagt

SEQ ID NO: 3815 - DNA, 576 bp, Homo sapiens
  source 1..576: mol_type = genomic DNA
gtttagctcctgggaaatgatgagattgatgattctttctcctggaaaacctttcatcacagagattcatctcagctgaacactgaacagcttagcagaggccttctgtcctctcttatctcatcaccagaggattttcctcccttcttttcatccttgctgtgatctatgcaaacagctactggccaaagaagagcttagcagagggggaggactccaagtctgagctttgataaattctggaaatgaggggattgttatctggaaaaggcgtacatttgtattctctagcattaaagggcagtatttaaagtcagttggcaagcagtggaataagatttttgtaaagaaaccttgtgcagcatggattctctaccagatgaattttttgtgaggcatcctgctgtggaggatcagaggaaggaagaaactgagaataagctagaaaaatcatctggtcaactgaacaaacaggaaaatgacatacctactgatcttgtccctgttaacctactattagaagtgaagaagttattaaatgcaattaatactctaccaaaaggtgtggttcctcac

SEQ ID NO: 3816 - DNA, 3022 bp, Homo sapiens
  source 1..3022: mol_type = genomic DNA
gttttgtttgttgtggttttgatgttttttttcctttcagctaaaggagcagcccagtggttttcaagaagtgctaaagtgcactgactgtctcatgatgactggtgcctcagggagggtcatgattcctggatacaggatcgacctgatcctggatgtcacttcaagcagtcagatcgtggggaaaagccttgtctaatggctagccttcctcaaaagtctgatgctagtcatctcggaaggcctcagaaaaagccttaaagcttcatttacctcttaattctcctttgcctggaagtgaattgaccaaggaaccttttcgttgggatcagagactctttgcattagtgttgcggttgcctggcaccatgtcagtagaatcagaacagttgacaggtgtgcctttagatgactctgcaatcacaccaatgtgtgaagtgacaggcggccgttcatattctgtgtgttctccaagaatgcttaatcagtgtctggagtccttggtgcagaaagtacaaagtggggtggtaataaactttgaaaaagcaggaccagatccttcccctgtagaagatgggcagccagatatatcaaggccttttggatctcagccttggcatagctgtcacaaactcatatatgtcagaccaaatcctaaaactggggttcctataggtcattggcctgttccagagtctttttggccagatcaaaattcgccaacactaccacctcgtacatctcatcctgtagtgaagttttcctgtacagactgtgaaccaatggttattgataaacttccttttgacaaatatgagttggaaccttcaccactgactcaatttatcctggaaaggaaatctcctcaaacatgttggcaggtgtacgtgagcaatagtgcaaaatacagtgaacttggtcatccttttggttacttgaaagccagtacagcactgaactgtgtcaacttatttgtgatgccttacaattatccagtccttcttcccctcttagatgacttgtttaaagtgcataaagcaaaaccaacattgaagtggagacagtcatttgaaagttatttgaagacaatgcctccctactatcttgggcccttgaagaaagctgttaggatgatgggagcacctaacctaatagcagacagtatggaatatggacttagttacagtgtcatttcatacctcaaaaaactgagtcaacaggccaaaatagaatctgatcgagtcattggatctgtaggcaaaaaagtagtacaggagactggaataaaagtccggagccgatcacatggtttatcaatggcatataggaaagattttcaacaactcctccagggaatttcagaggatgtccctcacagactgctagaccttaatatgaaggaatacactgggttccaagttgctttgctgaataaggatttgaagccacagacatttagaaatgcttatgacataccaagacgaaatcttttggatcacttaacaagaatgagatctaatcttttgaagagcactcgcagatttctgaaaggacaggacgaagatcaagtgcacagtgttcctatagcacaaatggggaactaccaggaatacctcaagcaagtaccttctccactaagagaacttgatcctgatcagccacgaaggttgcatacatttggcaacccctttaagctggataagaagggtatgatgatagatgaagcagatgaatttgtggctggacctcaaaataaacataaacgacccggagaaccaaatatgcaagggatccctaaaagacgtcggtgtatgtctccactactaagaggcagacagcagaatcctgttgtaaacaatcatattgggggaaaaggaccacctgcacctacaactcaagcacagccagatcttattaaacctcttcctcttcataaaatttcagaaaccactaatgattcgataatacatgatgtggttgaaaatcatgttgcagaccaactttcatcagacattacaccaaatgctatggatacggaattttcagcatcttctccagccagtttactggaacggccaaccaatcatatggaggctcttggtcatgaccatttaggaaccaatgacctcactgttggtggatttttagaaaatcatgaggagccaagagataaagaacaatgtgctgaagagaacataccagcatcttcactcaacaaaggaaagaaattgatgcattgcagaagccatgaagaggtcaatactgaactaaaagcacaaataatgaaagagatccgaaagccaggaagaaaatatgaaagaatcttcactttactgaagcatgtgcaaggcagtttacaaacaagactaatatttttacaaaatgtcattaaagaagcatcaaggtttaaaaaacgaatgctaatagaacaactggagaacttcttggatgaaattcatcgaagagccaatcagatcaaccatattaatagcaattaaaagaaaatagaatgtggccacttatttcactatcttcttcaaatacaaagtaaatacaagactgttgtgatcttgcattcattttctgacatgcattgttggctatttgaaatactaaaagcaaatctacagatcctttttccatcattttacagtgaccttttcttcattttggtttatttttgtaatgtgaaaagtatcactctaaaaaacatttttaatttaacaaactaaaaatattcctccaaatctcttgcttgtcattgactcttgcgtgtcaatttccctcaggttctattttcttaaaccaacctttaaaattgtcacctctgttaaggttgaactttgccaaaaaaaaaagaagttactttgtaatttttggggaaaaaagcacatacattaaaactaggtaatgttttgtatatacagttattttggatatattattgtaagttgtacaaatgtattttgaagaatatttaagaaaagcacttttgttattccatcaataaatgctctatttt

SEQ ID NO: 3817 - DNA, 561 bp, Homo sapiens
  source 1..561: mol_type = genomic DNA
gatgccatccttctcaaaagacttattgacagtgccaaagctcggtactggacacaacgagggacctgggtctacgataacgcgcttttgctcctcctgaagtgtctttggtccaacgttgttccaggtttgtcaccgtttctctccggccggtcagggcaagagccagagtgtaccatggcttccagtaacactgtgttgatgcggttggtagcctccgcatattctattgctcaaaaggcaggaatgatagtcagacgtgttattgctgaaggagacctgggtattgtggagaagacctgtgcaacagacctgcagaccaaagctgaccgattggcacagatgagcatatgttcttcattggcccggaaattccccaaactcacaattataggggaagaggatctgccttctgaggaagtggatcaagagctgattgaagacagtcagtgggaagaaatactgaagcaaccatgcccatcgcagtacagtgctattaaagaagaagatctcgtggtctgggttgatcctctggatggaaccaaggaatataccgaaggt

SEQ ID NO: 3818 - DNA, 942 bp, Homo sapiens
  source 1..942: mol_type = genomic DNA
agttgacgcgggggcggggagtcagcgagggcgagcctactggagtttgccgggggtgggaagaaggtgggcctcgagcaaagccgctagaggtggggtgcgggtggtcggcctcaggcgagccccggggcacagcccggggcgggaggcggagcttggcggccgagatctccgcgctgcagttagccccgccgagcgccaggagctgcggactgccactctccgcccctacctgagtgccgtgcgggccacattgcaggctgccctctgcctggagaacttctcctcccaggttgtggaacgacacaacaagccggaagtggaagtcaggagtagcaaagagctcctgttacaacctgtgaccatcagcaggaatgagaaggaaaaggttctgattgagggctccatcaactctgtccgggtcagcattgctgtgaaacaggctgatgagatcgagaagattttgtgccacaagttcatgcgcttcatgatgatgcgagcagagaacttctttatccttcgaaggaagcctgtggaggggtatgatatcagctttctgatcaccaacttccacacagagcagatgtacaaacacaagttggtggactttgtgatccacttcatggaggagattgacaaggagatcagtgagatgaagctgtcagtcaatgcccgtgcccgcattgtggctgaagagttccttaagaatttttaaaccatctggctggatctcgtggccttccccctcagactacccatgtctccacgaaggcgtcctggagtcactccccgagcagcgcggcggcggcagggagttgggttggggtgggcatttgatgcgggaggtgggtggtgtgcttgctagctgggcaagaaagcagcagtggacctgccccaaggccacacgtgcctggtcaggctggcttctgatgttcagtcccc

SEQ ID NO: 3819 - DNA, 508 bp, Homo sapiens
  source 1..508: mol_type = genomic DNA
ggattgatcctgctggccgcagccacccacgtggtggaagcccggccctgcaggctggagaggatttgattagactacgcgtttcgacttgcagggtgtttaatcgtcgccaagcgggacttactgcaagctatcaaatctgaggtcttattttgttgagtcgaaagtgaaattttcctttggccaacgtgacagggctttgtttggtggtaaaaagggttactagacacccctcattccactgccactggagggcgcatttctcagctcttgctcttcaaacctgctgaaaggaattcctagatctaaacaccagcatttgacattgtgcagcaaagaaatggttatggagaagcccagtccgctgcttgtagggcgggagtttgtgaggcaatattatactttgctgaataaagctccggaatatttacacaggttttatggcaggaattcttcctatgttcatggtggagtagatgctagtggaaagccccaggaagctgtttat

SEQ ID NO: 3820 - DNA, 829 bp, Homo sapiens
  source 1..829: mol_type = genomic DNA
gtcgctggaggagaggtccgggctctccaggaaggtggctgcggcgacaaaatgaagatattcgtgggcaacgtcgacggggcggatacgactccggaggagctggcagccctctttgcgccctacggcacggtcatgagctgcgccgtcatgaaacagttcgccttcgtgcacatgcgcgagaacgcgggcgcgctgcgcgccatcgaagccctgcacggccacgagctgcggccggggcgcgcgctcgtggtggagatgtcgcgcccaaggcctcttaatacttggaagattttcgtgggcaatgtgtcggctgcatgcacgagccaggaactgcgcagcctcttcgagcgccgcggacgcgtcatcgagtgtgacgtggtgaaaggtgggatgtgtgtgggctgaaattccgagctgcggttgtgcatgagaatacacccttcgtggtaccccatctccgggacgttctcggctctgtgcgttcagtccctcaggaaccgtggaccttaatttaccttgctaagttcagaccttctcttcctttcctttcctttcctctcctgcccattttcctgttcttctgtccttcaatacttctgtagcttcccattcatgttctcttctcccagcaggcctcattgtgtgcagaaactgtggtgggggctgtgctgtctcctccctgcctcctgcctcctgcggctgttggatttgggaatgaccttggtgagagtctcactgctccagggtctctttttggtccaaaggctagacctatagagttggatcactttttttctttccggtgaaataaatggtttttcaactt

SEQ ID NO: 3821 - DNA, 599 bp, Homo sapiens
  source 1..599: mol_type = genomic DNA
gacctttggcctgactcacaggacactaaggctccttttctgaagaagccttttaccagtctcatttaggggatgggaacaacatgtcttcacctagggactttagagcagagcctgtaaacgattatgagggaaatgactctgaagcagaagacttgaatttcagggagactttgccttcatcaagtcaggaaaacacacctagatcaaaggtttttgaaaataaagttaattcagagaaggtaaaactttctcttcggaatttcccacataatgattatgaggatgtttttgaagagccttcagaaagtggcagtgatcccagcatgtggacagccagaggccccttcagaagagacaggtggagcagtgaggatgaggaggctgcagggccatcacaggctctctcccctctactttctgttcaacatcatggatatagtggcccaaatgagagaacaacgttctggcatggttcaaacgaaggagcagtatcacttttgttacgatattgtgcttgaagttcttcggaaacttctgactttggattaagaaagacttctgttgcctctcacttgaaattaccaagtgggtttgca

SEQ ID NO: 3822 - DNA, 693 bp, Homo sapiens
  source 1..693: mol_type = genomic DNA
ctgtggctctgtggtaggggaatgccaccaactccctgaggagcagccgtgtggtatgattggtttttgaaaataaagttaattcagagaaggtaaaactttctcttcggaatttcccacataatgattatgaggatgtttttgaagagccttcagaaagtggcagtgatcccagcatgtggacagccagaggccccttcagaagagacaggtggagcagtgaggatgaggaggctgcagggccatcacaggctctctcccctctactttctgatacgcgcaaaattgtttctgaaggagaactagatcagttggctcagattcggccattaatattcaattttcatgagcagacagccatcaaggattgtttgaaaatccttgaggaaaaaacagcagcgtatgatatcatgcaggaatttatggctttagaacttaagaatctgcctggtgagttcaactctgggaatcaaccaagcaacagagaaaaaaatagataccgagatattcttccatttcaacatcatggatatagtggcccaaatgagagaacaacgttctggcatggttcaaacgaaggagcagtatcacttttgttacgatattgtgcttgaagttcttcggaaacttctgactttggattaagaaagacttctgttgcctctcacttgaaattaccaagtgggtttgcac

SEQ ID NO: 3823 - DNA, 678 bp, Homo sapiens
  source 1..678: mol_type = genomic DNA
ggcatcgtctgtaaagaatgagcccttattagacactgaatctgccagcaccttgatcttggacttcctagcttctagaactgagctgtatttgatgaaagtactagaaaaatactggttgtacaagatcgaaataaattgaaaaatatgtggaagtttccaggaggcctgtcagagcctgaagaagatattggagacacagcggttcgagaagtttttgaagagactggtataaaatcagaattcaggtccgtcctgagtattcggcaacagcacacaaatcctggagcttttgggaagtcagatatgtatatcatctgccgcctaaagccatattcattcaccataaatttttgccaggaagaatgcttaagatgtgagtggatggatctcaatgacctggcgaagactgaaaatacaactcccatcaccagcagagttgctaggctgctgctgtatgggtacagagaagggtttgacaaaattgacctgactgtggaagaacttccagcagtttacacaggactgttttataaactctatcataaggaactgccagagaattataaaactatgaaaggaattgattaaattcacatttatatgtttagaaacatgtagactaacgaatgacataagaaatagtggacattttggattgattaaacatctgactgt

SEQ ID NO: 3824 - DNA, 487 bp, Homo sapiens
  source 1..487: mol_type = genomic DNA
gcggccggcgcggggtcgacggggacccagcgtcggcggacccctagccgcggagaaggcggtggtctcgacattcccccatccccgccctggagcaaagtctgaaatggatgttacatgagtcattttaagggatgcacacaactatgaacatttctgaagattttttctcagtaaagtagataaagatggatgaatcagccttgttggatcttttggagtgtccggtgtgtctagagcgccttgatgcttctgcgaaggtcttgccttgccagcatacgttttgcaagcgatgtttgctggggatcgtaggttctcgaaatgaactcagatgtcccgagtgcaggactcttgttggctcgggtgtcgaggagcttcccagtaacatcttgctggtcagacttctggatggcatcaaacagaggccttggaaacctggtcctggtgggggaagtgggaccaactgcacaaatgcattaaggtctca

SEQ ID NO: 3825 - DNA, 4207 bp, Homo sapiens
  source 1..4207: mol_type = genomic DNA
gcggcggcgaaggcagcggcaggtcgggagcaagatggcgctgcggccaggagctggttctggtggcggcggggccgcgggagctggcgcggggtccgccgggggaggcggcttcatgtttcctgttgcaggtgggataagaccccctcaagcaggcctgatgccgatgcagcaacaaggatttcctatggtctctgtcatgcagcctaatatgcaaggcattatgggaatgaattacagctctcagatgtcccaaggacctattgctatgcaggcaggaataccaatgggaccaatgccagcagcgggaatgccttacctaggacaagcacccttcctgggcatgcgtcctccaggcccacagtacactccagacatgcagaagcagtttgccgaagagcagcagaaacgatttgaacagcagcaaaaactcttagaagaagaaagaaaaagacgccagtttgaagagcagaagcaaaagctcagacttttgagcagtgtgaaacccaagacaggagagaagagtagagatgatgctttggaagccataaaaggaaatttagatgggttttccagagatgcaaaaatgcaccctactccagcatcgcaccccaagaaaccaggtgtgggagtatttccctcacaggatcctgctcagcccagaatgcctccttggatttacaatgagagtttggttccagatgcctataagaaaatcttagaaaccacaatgactccaactggaatagatactgccaaactgtatcccattctgatgtcatctgggcttcccagggaaactcttggacagatatgggccttagctaatcgaactacacctggcaaacttacaaaagaagaactttataccgttctagccatgatagcggtaacacagaggggcgttcctgcaatgagtcctgatgctttaaaccagttcccagcagctcctattccaactttaagtggcttttctatgactctgcctacaccggtgagtcagccaactgtgataccttcaggtcctgcgggctccatgcccctcagccttggacagccagtcatgggcattaaccttgttggaccagtgggtggagctgcagcccaggcttctagtggtttcataccaacctaccctgcaaatcaggtagtaaagccagaagaagatgacttccaggattttcaagatgcttctaagtcaggatcccttgatgactcattcagtgatttccaagagttgcctgcttcttcaaaaacaagtaactcccagcatggaaacagtgccccttctttgttgatgccacttcctggaactaaagcattgccttcaatggacaaatatgctgtgtttaaaggaattgcagctgacaagtcctctgaaaatactgttccacctggagatcctggtgataaatatagtgctttcagagaacttgaacagacagcagagaataaacctttaggagaaagctttgcagaattcagatctgcaggaactgatgatggtttcaccgattttaaaacagccgatagtgtatcaccactagagccaccaacaaaagacaaaacttttccaccatccttcccctcaggaactatacaacagaaacaacaaacacaagtgaaaaaccctctgaacttagcagacctagatatgttttcctcagttaattgcagcagcgagaaaccattgtctttttcagctgtgtttagcacatcaaaatcagtttctacaccacagtcaacaggttctgctgctactatgacagcattggcagcaacaaaaacttctagtttggctgatgattttggagaattcagcctttttggggaatattctggtctagcacctgttggggagcaggatgactttgcagattttatggctttcagtaatagctctatttcatctgagcaaaagccggatgacaaatatgatgcccttaaagaggaagccagtcctgttcctctaaccagcaacgtgggcagcacagtgaagggtggacaaaactcgactgctgcgtctaccaagtacgatgtcttcagacaactttctctggaagggtctggactaggtgttgaagacctgaaagataacactccttcaggaaaaagtgatgatgattttgctgacttccactccagtaaattttcttccataaactcggacaaatccctgggagagaaagcagtggctttcagacacaccaaagaagactctgcatcagtgaagtccttagatctcccttccattggtggcagcagtgttggcaaggaggactctgaagatgcactctctgttcagtttgacatgaaattggctgatgtgggaggagatcttaagcatgtcatgtctgatagctctttggatttaccaacagttagtggccagcatcctcctgctgcagatatagaggacttaaaatatgctgcttttggaagctacagtagcaattttgcagtgagcacacttacaagctatgactggtcagacagggatgatgcaactcagggcagaaaactctctccatttgtcctctcagcaggaagtggatccccctcagccacctcaattcttcaaaagaaagagacttcatttggcagttctgaaaacatcaccatgacatctctctccaaagtaacgacctttgtaagtgaagatgctcttccagagaccaccttcccagctcttgccagttttaaagacacgattcctcagaccagtgagcaaaaggaatatgaaaacagagactataaagatttcacaaaacaggacctgcctacggctgaacggagccaggaggccacgtgtcccagcccagcgtccagtggtgcctctcaagaaaccccgaacgaatgttcggatgactttggagagtttcaaagtgaaaagcccaaaatcagcaaatttgacttcttagtagccacttcacaaagcaaaatgaaatccagtgaagaaatgatcaaaagtgagctggcaacctttgacctttctgttcaaggatcacacaagaggagtttgagccttggtgataaagaaataagccgttcttctccttctccagctttggagcagcctttcagagaccgttccaatactctgaatgagaagcccgccctgcccgtcatccgagacaagtacaaagacctgacgggagaggtggaggaaaatgagagatatgcatatgaatggcagagatgcctggggagtgccctgaatgtcattaagaaggcaaatgataccttaaatggaatcagtagtagttctgtttgcacagaagtaattcagtcagctcaaggcatggaatatttattaggtgttgttgaagtgtacagggtaaccaagcgtgtggagctggggataaaagccactgcagtgtgcagtgagaaactccagcagttgctgaaggacatcgataaagtatggaataacctaatcggcttcatgtcactcgccacactcacaccagatgaaaactcgctggatttttcctcctgtatgttacggcctgggattaaaaatgctcaggagcttgcctgtggagtgtgcctcttgaatgtggactcgaggagccgggcattcaactcagaaacagacagtttcaagctggcctatggagggcaccagtatcacgccagctgtgccaacttctggatcaactgtgtcgaaccaaagcctcctggcctcgtcctgcctgacctgctctgaacaactcctctgtgaagcattgacttttttttttctgtgacaccccacggggtgacagggaccaataaatagaatgcgagcactgcacagttcgcttccctgaatcgatatgaagaacaccgcaagggacggggcccccgtcatccccacggccagtctgcaggacttcaggtaaaattgtcccacccaaactgcacgtggcaccagaagcttgctcacttatctctacttaagattttctgaaatacggaccacggctttcttgatctaaggaagaacttgctgctgcagtattgaaactgtgaagaactgacatttgaagaaaaatagattaccgttgcgggactagaatgggcgactgcttggagccagtgcttgtttttatctaggacacttactgtcctgtgaagtagaatacatttatctgcatttagtttgttaatgtctgaaatgaataaaaagaggaaattgcgattaaactgatgttctgctttttat

SEQ ID NO: 3826 - DNA, 560 bp, Homo sapiens
  source 1..560: mol_type = genomic DNA
ttttcttcctcttccggggacgttgtctgcaggcactcagaatggtccagcgtttgacataccgacgtaggctttcctacaatacagcctctaacaaaactaggctgtcccgaacccctggtaatagaattgtttacctttataccaagaaggttgggaaagcaccaaaatctgcatgtggtgtgtgcccaggcagacttcgaggggttcgtgctgtaagacctaaagttcttatgagattgtccaaaacaaagaaacatgtcagcagggcctatggtggttccatgtgtgctaaatgtgttcgtgacaggatcaagcgtgctttccttatcgaggagcagaaaatcgttgtgaaagtgttgaaggcacaagcacagagtcagaaagctaaataaaaaaatgaaacttttttgagtaataaaaatgaaaagacgctgctggagtacaatggcaggatctcggctcaccgcaccctctgccttccaggttcaagtgattctcctgcctcagcctcccaagtagctgggattataggcatgtgccaccatgcctggctaatt

SEQ ID NO: 3827 - DNA, 854 bp, Homo sapiens
  source 1..854: mol_type = genomic DNA
ctgtggctctgtggtaggggaatgccaccaactccctgaggagcagccgtgtggtatgattggtgaacaaaaattgtttgctggcccccaggatactaactagacctttggcctgactcacaggacactaaggctccttttctgaagaagccttttaccagtctcatttaggggatgggaacaacatgtcttcacctagggactttagagcagagcctgtaaacgattatgagggaaatgactctgaagcagaagacttgaatttcagggagactttgccttcatcaagtcaggaaaacacacctagatcaaaggtttttgaaaataaagttaattcagagaaggtaaaactttctcttcggaatttcccacataatgattatgaggatgtttttgaagagccttcagaaagtggcagtgatcccagcatgtggacagccagaggccccttcagaagagacaggtggagcagtgaggatgaggaggctgcagggccatcacaggctctctcccctctactttctgatacgcgcaaaattgtttctgaaggagaactagatcagttggctcagattcggccattaatattcaattttcatgagcagacagccatcaaggattgtttgaaaatccttgaggaaaaaacagcagcgtatgatatcatgcaggaatttatgttcaacatcatggatatagtggcccaaatgagagaacaacgttctggcatggttcaaacgaaggagcagtatcacttttgttacgatattgtgcttgaagttcttcggaaacttctgactttggattaagaaagacttctgttgcctctcacttgaaattaccaagtgggtttgcac

SEQ ID NO: 3828 - DNA, 724 bp, Homo sapiens
  source 1..724: mol_type = genomic DNA
taatctcagtatttgtcaggattttgcttttcctgacttgctttgcacagaatgttccctggatgaaagcccagaaatcaccaacatttcagacaatgctttctgagccttactctgttccacatttcataacaggacccctaccatggaggagaccatcaaagatccccccacatcagctgtcttgctggatcactgtcatttctctcaggtcatctttaacagtgtggagaagttctacatccctggaggggacgtcacatgtcattataccttcacccagcatttcatccctcgtcgaaaggattggattggcatctttagagtggggtggaagacaacccgtgagtattacaccttcatgtgggttactttgcccattgacctaaacaacaaatcagctaaacagcaggaagtccaattcaaagcttactacctgcccaaggatgatgagtattaccagttctgctatgtggatgaggatggtgtggtccggggagcaagtattcctttccaattccgtccagaaaatgaggaagacatcctggttgttaccactcagggagaggtggaagagattgagcagcacaacaaggagctttgcaaagaaaaccaggagctgaaggacagctgtatcagcctccagaagcagaactcagacatgcaggctgagctccaaaagaagcaggaggagctagaaaccctacagagcatcaataagaag

SEQ ID NO: 3829 - DNA, 401 bp, Homo sapiens
  source 1..401: mol_type = genomic DNA
ctgtcaggttgccgtctaggtagcggttgtgcttgctgaggctgcacttgctgacactgcagctgcgacgcggctaagaggcgcagagcgaggagtcgggatttggtcgcgagcggcgacggaaataactctgaagtaagagaaactgcaatagaagttggaaaaggatgtgatttccatatttcaagtcattcaaagacagatgagtcatcaccagtgttatcgccaaggaagccttctcacccagtcatggattttttcagttcacatcttttagctgactcttcctcaccagcaacaaattctagtcatacagatgcccatgaaatacttgtgagcgattttcttgtttctgatgaaaaccttcagaagatggaaaatgtgcttgatctttggagttc

SEQ ID NO: 3830 - DNA, 1626 bp, Homo sapiens
  source 1..1626: mol_type = genomic DNA
tggggccgtgtgcagacccgcgtgtggcgcaggcaaggaccctcaaaataaacagcctctaccttgcgagccgtcttccccaggcctgcgtccgagtctccgccgctgcgggcccgctccgacgcggaagatctgactgcagccatgagcagcaatgagtgcttcaagtgtggacgatctggccactgggcccgggaatgtcctactggtggaggccgtggtcgtggaatgagaagccgtggcagaggtttccagtttgtttcctcgtctcttccagacatttgttatcgctgtggtgagtctggtcatcttgccaaggattgtgatcttcaggaggatgcctgctataactgcggtagaggtggccacattgccaaggactgcaaggagcccaagagagagcgagagcaatgctgctacaactgtggcaaaccaggccatctggctcgtgactgcgaccatgcagatgagcagaaatgctattcttgtggagaattcggacacattcaaaaagactgcaccaaagtgaagtgctataggtgtggtgaaactggtcatgtagccatcaactgcagcaagacaagtgaagtcaactgttaccgctgtggcgagtcagggcaccttgcacgggaatgcacaattgaggctacagcctaattattttcctttgtcgcccctcctttttctgattgatggttgtattattttctctgaatcctcttcactggccaaaggttggcagatagaggcaactcccaggccagtgagctttacttgccgtgtaaaaggaggaaaggggtggaaaaaaaccgactttctgcatttaactacaaaaaaagtttatgtttagtttggtagaggtgttatgtataatgctttgttaaagaaccccctttccgtgccactggtgaatagggattgatgaatgggaagagttgagtcagaccagtaagcccgtcctgggttccttgaacatgttcccatgtaggaggtaaaaccaattctggaagtgtctatgaacttccataaataactttaattttagtataatgatggtcttggattgtctgacctcagtagctattaaataacatcaagtaacatctgtatcaggccctacatagaacatacagttgagtgggagtaaacaaaaagataaacatgcgtgttaatggctgttcgagagaaatcggaataaaagcctaaacaggaacaacttcatcacagtgttgatgttggacacatagatggtgatggcaaaggtttagaacacattattttcaaagactaaatctaaaacccagagtaaacatcaatgctcagagttagcataatttggagctattcaggaattgcagagaaatgcattttcacagaaatcaagatgttatttttgtatactatatcacttagacaactgtgtttcatttgctgtaatcagtttttaaaagtcagatggaaagagcaactgaagtcctagaaaatagaaatgtaattttaaactattccaataaagctggaggaggaaggggagtttgactaaagttctttttgtttgtttcaaattttcattaatgtatatagtgcaaaataccatattaaagaggggaatgtggaggactgaaa

SEQ ID NO: 3831 - DNA, 760 bp, Homo sapiens
  source 1..760: mol_type = genomic DNA
ttcatgtcttcttactcagttgtcaatttctcagtaaccttatatgaccaccttatttaaaattatattgtccttgccctagcatttcctatgtttcttccttgtcttttctccatggcacttataaatcatttgatatactacagtatatatatgttttattttttattttattgtctgttttccttacttagaataaggttcacggtaggagggatttttgtctattttgttcattgctatattcttaccccctagatgagtatctggcaggtaataagtgttcaaccaatactgctgaatgaataaatattttttgctttagtttttcttataaggctaaaaattcacaaagcatatatcaatgaatcaggaggatctagatccggatagtactacagatgtgggagatgttacaaatactgaagaagaacttattagagaatgtgaagaaatgtggaaagatatggaagaatgtcagaataaattatcacttattggaactgaaacactcaccgattcaaatgctcagctatcattgttaattatgcaagtaaaatgtttaaccgctgaactcagtcaatggcagaaaaaaacacctgaaacaattcccttgactgaagacgttctcataacattaggaaaagaagagttccaaaagctgagacaagatcttgaaatggtactgtccactaaggagtcaaagaatgaaaagttaaaggaagacttagaaagggaacaacggtggttggatgaacag

SEQ ID NO: 3832 - DNA, 2034 bp, Homo sapiens
  source 1..2034: mol_type = genomic DNA
ttcctgaggaggactgccggtcgttcggacgtcttgcctgtcgctggaggagaggtccgggctctccaggaaggtggctgcggcgacaaaatgaagatattcgtgggcaacgtcgacggggcggatacgactccggaggagctggcagccctctttgcgccctacggcacggtcatgagctgcgccgtcatgaaacagttcgccttcgtgcacatgcgcgagaacgcgggcgcgctgcgcgccatcgaagccctgcacggccacgagctgcggccggggcgcgcgctcgtggtggagatgtcgcgcccaaggcctcttaatacttggaagattttcgtgggcaatgtgtcggctgcatgcacgagccaggaactgcgcagcctcttcgagcgccgcggacgcgtcatcgagtgtgacgtggtgaaaggctcttgtcaggatggtgaagctgttcatcggaaacctgccccgggaggctacagagcaggagattcgctcactcttcgagcagtatgggaaggtgctggaatgtgacatcattaagaattacggctttgtgcacatagaagacaagacggcagctgaggatgccatacgcaacctgcaccattacaagcttcatggggtgaacatcaacgtggaagccagcaagaataagagcaaaacctcaacaaagttgcatgtgggcaacatcagtcccacctgcaccaataaggagcttcgagccaagtttgaggagtatggtccggtcatcgaatgtgacatcgtgaaagattatgccttcgtacacatggagcgggcagaggatgcagtggaggccatcaggggccttgataacacagagtttcaaggcaaacgaatgcacgtgcagttgtccaccagccggcttaggactgcgcccgggatgggagaccagagcggctgctatcggtgcgggaaagaggggcactggtccaaagagtgtccgatagatcgttcaggccgcgtggcagacttgaccgagcaatataatgagcaatacggagcagtgcgtacgccttacaccatgagctatggggattcattgtattacaacaacgcgtacggagcgctcgatgcctactacaagcgctgccgtgctgcccggtcctatgaggcagtggcagctgcagctgcctccgtgtataattacgcagagcagaccctgtcccagctgccacaagtccagaatacagccatggccagtcacctcacctccacctctctcgatccctacgatagacacctgttgccgacctcaggagctgctgccacagctgctgctgcagcagcagccgctgctgctgttactgcagcttccacttcatattacgggcgggatcggagccccctgcgtcgcgctacagccccagtccccactgttggagagggctacggttacgggcatgagagtgagttgtcccaagcttcagcagccgcgcggaattctctgtacgacatggcccggtatgagcgggagcagtatgccgatcgggcgcggtactcagccttttaaagcttgaggtgagaggggtggggtgttccctcttctggttttgccatccctcctgcagcctaaagggctccaattaggctgccctgcttgcttgcttgcttttgcagggttaggggaaggttactaggatggctcacaggctagagagaagtcctaactgcttaactttaaaatacatagagttccttggccctcatggctatttttcagggcttctggtagtgggagtcaatttgattctatttgtgcctagaaaaataaagaatgatgtgctggtgaatcttgggtcacctatgtactatactataattgaaccttacctggggacccacacgttcaggctcaggtgttttgtttcttagagcctttgttaagtttcctacgtgtgcgacattcctaaggtcttcaagtttcctattctgttttgtgctgtgtgaaagttctgatatgacccctgatgataaagtccataactgtagttaactggtcatcactgctca

SEQ ID NO: 3833 - DNA, 732 bp, Homo sapiens
  source 1..732: mol_type = genomic DNA
tggctgtagcgactggttgcgggaggctggactctggtgactgtgtatggttgcatatgctccgttttcctctccctgtcgtgctgggcctttgaaaccggcttctttgctggtggctgcttgctctgcttgtattactcttcaaaatatttattcactggtactgaagagagacataactttgttgtcagaaattccattatcagaggtagaaatcatgtaagagacactgaaatgttttccaaaatgtcagaaaaaggaaaggtgaaaaattagacgatttcaagaattggagctgaatctgatgttaagtaatggcaacaggtgacttaaaaagaagcttacggaacctagaacaggtgctccgcttgctaaattatcctgaagaggtggactgtgtaggtttgataaagggagacccagcagcatctttgcccatcatcagctattcttttacctcatactcaccttatgtaacagaacttataatggaatccaatgtagagctcatagcaaaaaatgacttgcgctttatagatgctgtctataagcttcttcgtgatcaatttaattataaaccaattttgacaaaaaagcagtttatccaatgtgggtttgcagaatggaaaatccaaattgtttgtgatattttgaattgtgtgatgaaaaagcacaaggaattaagcagtcttcagaagattccatcacaacaaagaaagaaaatcagttctg

SEQ ID NO: 3834 - DNA, 891 bp, Homo sapiens
  source 1..891: mol_type = genomic DNA
gattccacactgaggcgagcgcggcggccggggtggtagtggcagtgttcgtgtgctcaggtctgaatcgccgagggaggaggcggtggaggaagaggtggcggcggtggcggtggtcgtagcggtggcggaggaggcgggtacgaatcagctgcgggcggagacatggccaacatcgcggtgcagcgaatcaagcgggagttcaaggaggtgctgaagagcgaggaggtccggtttatcactaaaatatggcatcctaatattagttccgtcacaggggctatttgtttggatatcctgaaagatcaatgggcagctgcaatgactctccgcacggtattattgtcattgcaagcactattggcagctgcagagccagatgatccacaggatgctgtagtagcaaatcagtacaaacaaaatcccgaaatgttcaaacagacagctcgactttgggcacatgtgtatgctggagcaccagtttctagtccagaatacaccaaaaaaatagaaaacctatgtgctatgggctttgataggaatgcagtaatagtggccttgtcttcaaaatcatgggatgtagagactgcaacagaattgcttctgagtaactgaggcatagagagctgctgatatagtcaagcttgcctcttcttgaggagcaccaacatctgttatttttaggattctgcatagatttcttttaaactggcattcttgcctaatgatgttatctaggcaccattggagactgaaaaaaaaaaatccctgctctgtaaataaagctaattaaacgtctgtgtaaatttaaaaaggggaaatactttaattttttttcttaatagtgtaaaaattccctgagctaagctaaaaccatggaagaaacatgct

SEQ ID NO: 3835 - DNA, 1071 bp, Homo sapiens
  source 1..1071: mol_type = genomic DNA
attccattcgcgctccgcggcgcgaggcaatcgtccggtgtgtgagcccgggagccggaggtgtagcggcagagacattgttcttgccggctccctacggtgccgtgtgtgcgtgagagaagaccagtctttcctctaggttaggccgggcacggtggctcacgcctgtaatcccagcactttgggaggccgaggcgggcggatcatctgaggtcaggagttcgaggccagcctgaccaacatggagaaaccccgtctctactaaaaatacataattagccaggtgtggtggcgtatgcctgtaatcccagctactcgggaggctgaggcaggagaatcgcttgaacccgggaggcggaggttgcagtgagctgagattgcgccattgcactccagcctgggcaaggagagtgaaactccgtctcaaaaaaaaaaaaaaaaaattatttcagcatttgacattgtgcagcaaagaaatggttatggagaagcccagtccgctgcttgtagggcgggagtttgtgaggcaatattatactttgctgaataaagctccggaatatttacacaggttttatggcaggaattcttcctatgttcatggtggagtagatgctagtggaaagccccaggaagctgtttatggccaaaatgatatacaccacaaagtattatctctgaacttcagtgaatgtcatactaaaattcgtcatgtggatgctcatgcaaccttgagtgatggagtagttgtccaggtcatgggtttgctgtctaacagtggacaaccagaaagaaagtttatgcaaacctttgttctggctcctgaaggatctgttccaaataaattttatgttcacaatgatatgtttcgttatgaagatgaagtgtttggtgattctgagcctgaacttgatgaagaatcagaagatgaagtagaagaggaacaagaagaaagacaaccatctcctgaacctgtgcaagaaaatgctaacagtggttactatgaagctcaccctgtgactaatggcatagaggagcctttggaagaatcctctcatgaacctgaacctg

SEQ ID NO: 3836 - DNA, 569 bp, Homo sapiens
  source 1..569: mol_type = genomic DNA
ctcgaatgcagcgtctacgcctggtgaatggacgcactcttaccaattctgctctgggagatgcagcggtaacctaccgagcgcagaggccggcgcgcacccgtggagcccgcgctcgcgatccctcctcgtgccagggccccagggcagtcaaggcctgccgaccgttaggcgggtcaaggggtacacagggtgcgaattcgttaggcaaaagctgggtacaggcgcgagccacaggcacggaaacctcgcgccgaccggggccctaggcccgacgacggcagctgaccagcttcggccggtttggggataaagggaagacaggcggcgcggggagtgggaacgcctgaaggccgcgcccctcctttcaggtcggccaggagcgcgccgtttgtttcgacgccggaccgcgtaagagacgatgatgttgggcacggaaggtggagagggattcgtggtgaaggtccggggcttgccctggtcttgctcggccgatgaagtgcagaggtttttttctgactgcaaaattcaaaatggggctcaaggtattcgtttcatctacaccagag

SEQ ID NO: 3837 - DNA, 1475 bp, Homo sapiens
  source 1..1475: mol_type = genomic DNA
ggggtctcggcgatcgctgctcctcctcctccttctcctcctcttttttctcctccgcctcctccccccgccgcctcgccaccgccgcggctagggctggaggcgccgctgtcattcctgtgccggaggaaccggcgctgccggtgcctgggggtcggggcgcgggcgaagccgggccgcggaggacacaacaggccaaaatcctgagcatgatggaagacaataagcagctcgcgctccgcatcgatggggcggtccagtcggccagccaggaggtgaccaacctgcgagccgaactcacggccaccaaccggagactggcggaactgagcggcggcggcggccccggcccgggcccgggagccgcggccagcgcctcggcggcgggggactcggcggcgacgaacatggagaacccccagcttggagcgcaagtgctcctgcgggaagaagtgtcgcggctccaggaggaagttcaccttctccggcagatgaaggagatgttggcgaaggacctggaggagtcgcagggcggcaagtcctctgaggtcctctcggccaccgagctcagggtccagctggcccagaaggagcaggagctagccagagccaaagaagccttgcaggccatgaaagctgatcggaagcgcttaaagggcgagaagacagacctggtgagccagatgcagcagctgtatgccacactggagagccgcgaggagcagctccgagacttcatccgcaactatgagcagcaccgcaaggagagcgaggatgcggtcaaagcgctggccaaggagaaggacctgctggagcgtgagaagtgggagctgcggcgccaagccaaggaggccacagaccacgccacggcactgcgctcccagctggacctcaaggacaaccggatgaaggagctggaggccgagctggccatggccaaacagtccttagctacgctgaccaaggacgtccccaagcggcattccctcgccatgccgggcgagacggtgctcaatggcaaccaggagtgggtggtgcaggcggacctcccgctgaccgcagccatccggcagagtcaacagactctctaccactcacacccccctcaccctgcggaccggcaagcggtcagggtgagcccctgccactcccggcagccctctgtcatctccgacgcatctgccgccgaaggcgaccggtcgtccacaccgagcgacatcaactcccctcgacaccggacacactccctctgcaacggcgacagtcccggcccagttcagaagaacctgcacaaccctattgtacagtcactagaggatcttgaagaccaaaaacggaaaaagaagaaagagaagatgggattcggctccatctcccgcgtcttcgccagagggaagcagcggaagtccctcgaccccggcctctttgatggtaccgcccctgattattacatagaggaggacgcggactggtga

SEQ ID NO: 3838 - DNA, 4534 bp, Homo sapiens
  source 1..4534: mol_type = genomic DNA
gacgttaggctccgactcttaacggagacgcatttttatttctgttgtttacgattcgctatagattccttgtttctcacttcgtagcacgagccactctgaccatcaagatcagaaaaacttctcagctgcaagttagaagtggactggccattgaggaggctctcagcggagtcgctcttcacaggagtcttgaacgcggtgtggaatcggcagcgaggaatcctggagcacagagaagctcccagctttgaaggtcttgcggtgaagcatcaagtgtacctgatttgtgaacctatcttgcttcagttggtttcctcctaaatattaggcagatgggattggctggtctgtgctctgctaggtgaaaaattagacgatttcaagaattggagctgaatctgatgttaagtaatggcaacaggtgacttaaaaagaagcttacggaacctagaacaggtgctccgcttgctaaattatcctgaagaggtggactgtgtaggtttgataaagggagacccagcagcatctttgcccatcatcagctattcttttacctcatactcaccttatgtaacagaacttataatggaatccaatgtagagctcatagcaaaaaatgacttgcgctttatagatgctgtctataagcttcttcgtgatcaatttaattataaaccaattttgacaaaaaagcagtttatccaatgtgggtttgcagaatggaaaatccaaattgtttgtgatattttgaattgtgtgatgaaaaagcacaaggaattaagcagtcttcagaagattccatcacaacaaagaaagaaaatcagttctggtaagtcagaacctcctttgggcaatgagaaaatatctgcagaggctgttggcgttgatatcagtggcaggtttatgacctcaggaaagaagaaagctgtggtgattcgtcacttgtataatgaagataatgttgacatttctgaggatacattaagtccaataacagatgttaatgaagcagttgatgtgtctgacttaaatgctactgaaataaagatgcctgaagtaaaggttcctgaaatcaaggctgagcaacaggatgtaaatgttaatcctgagattactgcactacaaactatgcttgctgaatgccaagaaaatcttaagaaactgacttcgatagagaaaaggttagactgtttggaacaaaaaatgaaaggaaaagtgatggtagatgaaaacacctggactaatcttcttagtcgtgtcactcttcttgaaacagaaatgcttttgtctaaaaagaatgatgaatttatagagtttaatgaagttagtgaagactacgcttcttgtagtgacatggaccttctgaatcctcacagaaaaagcgaagtagagaggccagcaagtattcctctgtcctctggctatagtacagcatcatcagattcaactcccagagcctctactgttaattactgtggtttgaatgagatttcagaggaaacaacaatccagaaaatggaaaggatgaaaaaaatgtttgaagaaactgcagagttactgaaatgtccaaatcactacttgtaggattttctacatgaacttttttctaggactttggttactatacatattgtatattttaagaattctttatacaattttaatatactgcaatactgcagtttttgacaatttggattccatttggtatatgaatttttgcattcattattgaataactcttttaatatttttgagcaatgattatactgctttaccttgtgtcactttttttttttttaggaaaaactcatgttccagtatatttctcttacagagtgaagtcattacagcactgtatttctgtgttgacatttgttggcagtgtgctaagtaatgttttttaaagcacaggcttgaggactatggtttacatcctgttggaaacattccaaatgggacttgtgtattatacccaggaggctctcatatataccatcttggcatctgtactgatgaataagttataatgaacagttaaaaatgctcattgaaaattaaataaaacaaaaaggcagttatttcatgcttggtcaaaaacatcaatacctttccaattaacactgagaaattaaggttaagattctccttttgtactgggaaacaggctggaggactatggtcctcaagtttagaccaagaggactatggtctcaaggttcaccatgagaaatgtgttgaacattttagtatgctctattgtataatttttttggagggggggatggagtttcgctgttgttgcccaggctggagtgcaatagcacgatcttggctcaccgcaacctctgcctaccgggttcaagtgattcttgtgcctcagcctcctgagtagctgggattataggcatgcaccaccatgcccagctaattttgtatttttattagagacagggtttctccgtgttggtcaggctggtctcaaactcctgacctcaggtgatctgcctgtcttggcctccggcgtaacactttttaagaccagtgtaacagaaagagaatgtagccattctagccaccgttaaaagatacacagtgaggtgttgtgttttgtttttttaatgatgaaaagttacacattttttggagagaaaagtcttagctgaaggtaaatcaatggaaaaatgaaatttatttttaatattactactatatgaattatctttttttaaacttgtagataaaagtgttccagtaatcagaaaatcctcaagaaaattgacttcattatttggaaggaaaattagtattttttttaatattatatggaccatctgattatattttatttattcatctatttatggtatgtatgtataattctatattacactgtcaaatataaaatattgttatatgagtagaaatcacttaaattttttttgtgtttgtgaatttgaaacagtgtaagaaatcacttttaagaaaacatttttagaattcctttgttttttttttttttctttttgaaacagggtctcactctattgcccaggctggagtgcactggcgtgatctcggctcactgcaccttctgcctaccgagttcaagcgattcttgtgcttcagcctcctgagtagctgggactataggcctgtaccgtcatgcctggctaatttttgtatttttgtagagacagggtttcaccatgttgcccagtctgttctcaaactcgtgagctaaagctactcgcccacctggatgtcccaaagtgctagattccatgggtgagtcaccatgcttggccacatttttagtattctaataaacagttggtcatcagaactttaaaatggtagcctacagaaacatacaattttgaatttaacagagtttcagtaaatatttccagaattaatgaagcatgttagctttaattttttcaattgtgagagaagtacatttataaaaattaagaggttaagaggttatagttataagggaaaaaacttctgtatcgattaactcctaaaatatcagtaccagcatggaattatagcaccaccttgtggttaacatgccagtattttaccttttgttaaaacaagtgatttcccatcaaacaggataatattttttcccttttgaaaaattcaattttaaaaagaaacatttttgaagttttcttatggaagatagaaaaaaagttaagtctctttctaccctttctttttttctttatatagtgcagatatacacacagagaagggacttaaaacatttctaatctcctagtttatatacagtgtgcaaaatataagtaagtatatattgaaaatataaaatatttcatatatgttatcaggtggaaatttagaatccaaattttcttaaactttaataacttgtctaacaactctctaatagggactaaaaatcaactcaatatatcatacatttacacttacaaagagtctttatctagacaacataatttttggaaaaataaagcaaattcaactttattggagttattggacagatcagcaaattgttattttaaaaagttttcttgtttaggcaatttggtaagtggtttctagttataaactagccactgttgattaacttgagaaggtgaagcaggggagttctgaagagattacctagagctacataaccctaagttaagtaaaattttcactttcattcttttcattctctcataaactggttgaaaaaacactgtactaccaacaaaggtgtcagttgcttgtgctgccctgtctatgttatgctctgaataggtctcggtaaagattatatggaaatactataaagaatacataaggtaaaatactagtcagaaagggttcagaagaagttagcatcaactgtatgaaaattctaggtaaagctaagtactattgagttggaaaaaagtaattctatcatgtttgcttgttttcctctactgtttttaatgtgatgttgtaatatattttaaaaataaaacttgaaaacgttggg

SEQ ID NO: 3839 - DNA, 584 bp, Homo sapiens
  source 1..584: mol_type = genomic DNA
gcgcgtgtgtccgcgcgtgtccgcgtgtgggtccgtgtgcgcgtcccggtcccgcggcggcgacggcggcggcggcggcggcggctgcaggacgagccgagaggctcagccatatttgatggttttgttgctttgctcgggagttctcgggagtaatttaatgccgaaggctgcctgctgtttcccggggagatcatgaaacgaggtcgccttcccagcagcagtgaggattctgacgacaatggcagcctgtcaactacttggtcccagaattcccgatcccagcataggagaagctcctgctccagacatgaagatcgaaagccttcagaggtgtttaggacagacctgatcactgccatgaagttgcatgactcctaccagctgaatccggatgagtactatgtgttggcagatccctggagacaggaatgggagaaaggggtccaggtgcctgtgagcccggggaccatccctcagcctgtggccagggttgtgtctgaagagaaatccctcatgttcatcaggcccaagaagtacatcgtgtcatcaggctctgagcctcccgagttgggctatgtgga

SEQ ID NO: 3840 - DNA, 896 bp, Homo sapiens
  source 1..896: mol_type = genomic DNA
aattcctccctgcagtttgaaactgtcaggttgccgtctaggtagcggttgtgcttgctgaggctgcacttgctgacactgcagctgcgacgcggctaagaggcgcagagcgaggagtcgggatttggtcgcgagcggcgacggaagaatatgaagaactgcttcattatgctatagtgactccaaatattgaaccctgtgcttcacagtcatctcatcctaagggagaattggtgccagatgtcagaatttctacaattcatgatattcttcatagtcaaggaaataactctgaagtaagagaaactgcaatagaagttggaaaaggatgtgatttccatatttcaagtcattcaaagacagatgagtcatcaccagtgttatcgccaaggaagccttctcacccagtcatggattttttcagttcacatcttttagctgactcttcctcaccagcaacaaattctagtcatacagatgcccatgaaatacttgtgagcgattttcttgtttctgatgaaaaccttcagaagatggaaaatgtgcttgatctttggagttcaggtcttaagacaaacatcatatctgaactaagtaaatggagacttaattttattgactggcaccgaatggaaatgagaaaagagaaagaaaaacatgcagcacatttaaaacaactgtgtaatcagatcaatgaattgaaggagctgcaaaaaacctttgaaatctccattgggagaaaagatgaggtgatttctagcttgtctcatgccataggcaagcaaaaggaaaagatagagttgatgagaacattcttccactggcgaatcggccatgtcagagccagacaggatgtttatgaaggtaaactagctgaccagtactaccagagaact

SEQ ID NO: 3841 - DNA, 545 bp, Homo sapiens
  source 1..545: mol_type = genomic DNA
ctgtggctctgtggtaggggaatgccaccaactccctgaggagcagccgtgtggtatgattgtaaacgattatgagggaaatgactctgaagcagaagacttgaatttcagggagactttgccttcatcaagtcaggaaaacacacctagatcaaaggtttttgaaaataaagttaattcagagaaggtaaaactttctcttcggaatttcccacataatgattatgaggatgtttttgaagagccttcagaaagtggcagtgatcccagcatgtggacagccagaggccccttcagaagagacaggtggagcagtgaggatgaggaggctgcagggccatcacaggctctctcccctctactttctgttcaacatcatggatatagtggcccaaatgagagaacaacgttctggcatggttcaaacgaaggagcagtatcacttttgttacgatattgtgcttgaagttcttcggaaacttctgactttggattaagaaagacttctgttgcctctcacttgaaattaccaagtgggtttgcac

SEQ ID NO: 3842 - DNA, 570 bp, Homo sapiens
  source 1..570: mol_type = genomic DNA
gtttgttgtggtgacgagctgtgagcaatggcctgtgtttatgctgggcgagctttctttcctacttggggaggggggttcaggatgggaggatgcgggtagggaagagggggggaaaacccccaagctccacaacattttaagttttttgaagtcattccaaataaatctaagtgaactattgattttgatacaaagcaacagcctctgccacactgaagaagtgagctttaagcagagactagaagggtatggcatcacagctgcaagtgttttcgcccccatcagtgtcgtcgagtgccttctgcagtgcgaagaaactgaaaatagagccctctggctgggatgtttcaggacagagtagcaacgacaaatattatacccacagcaaaaccctcccagccacacaagggcaagccaactcctctcaccaggtagcaaatttcaacatccctgcttacgaccagggcctcctcctcccagctcctgcagtggagcatattgttgtaacagccgctgatagctcgggcagtgctgctacatcaaccttccaaagcagccagaccctga

SEQ ID NO: 3843 - DNA, 567 bp, Homo sapiens
  source 1..567: mol_type = genomic DNA
agcccagcgcctcggccgaacccctccgcagcagttcatagccctgatgaagcaagttactctgctctcctaataaatgcaagaaaatgaccttggagggcctttttaattacacatagaagtgacaatttgctgcctgctgtttcccggggagatcatgaaacgaggtcgccttcccagcagcagtgaggattctgacgacaatggcagcctgtcaactacttggtcccagaattcccgatcccagcataggagaagctcctgctccagacatgaagatcgaaagccttcagaggtgtttaggacagacctgatcactgccatgaagttgcatgactcctaccagctgaatccggatgagtactatgtgttggcagatccctggagacaggaatgggagaaaggggtccaggtgcctgtgagcccggggaccatccctcagcctgtggccagggttgtgtctgaagagaaatccctcatgttcatcaggcccaagaagtacatcgtgtcatcaggctctgagcctcccgagttgggctatgtggacatccggacgctggctgacag

SEQ ID NO: 3844 - DNA, 578 bp, Homo sapiens
  source 1..578: mol_type = genomic DNA
gaagcagttgagtgctgcagcggcagtcgtcgcccctgccgccgctgccaccgaaggaagcatcccagacaccgggaagagacagggtttcaccatgctgtccaggctggtctcgaactcctgatctcaagtgttccgctcgcctcggcctcccaaagtgctgggattacaggcgtgagccaccggatggaagatggtaccccaaagcatatcatccagatgacaggatttaagatggaagaaaaagaagcgctagtcaaattacttttaaaactagattgcacttttattaagagtgagaaatacaaaaattgtacacatcttatagctgaacgcctatgtaagagtgaaaaatttttagcagcttgtgcggcaggaaagtggatactaaccaaggactatataattcatagtgccaaaagtggcagatggcttgatgaaacaacttatgaatggggatataaaattgaaaaagattcccgttattcacctcaaatgcaatctgcacctaaaagatggcgtgaagaactgaaacgcactggtgctccaggagccttccacagatggaaagttgtcct

SEQ ID NO: 3845 - DNA, 8843 bp, Homo sapiens
  source 1..8843: mol_type = genomic DNA
gtgtgtgtttcccctgccgcggggaaatggctgctgttgcttctgggccagaggaagagaatgaggtagagtgttcttttgcctccgagtaggaccgagagtgttgggaagaggagcgcgtccccggggaaatgagactaatagggatgccaaaggaaaaatatgatcctccagatcctcgcagaatttataccatcatgtcagcagaggaggtagccaatgggaaaaaatctcactgggcagaattagaaatctcgggtagagtgcggagcctaagtacatcactttggtcattgacacacttgacagcgctgcacctaaatgacaattaccttagtcgcattccacctgatattgccaagcttcataatctggtttacctggatctgtcatccaataaactcagaagtttaccagcagaactaggaaacatggtgtctctcagggaattgcttttaaataacaatctgttacgggttttgccttatgaacttggtcggctcttccagctacaaactctaggtttgaaaggcaatcctttatcacaggatattctcaacttataccaggacccagatggaacccgaaagctactgaacttcatgcttgacaatctcgcagttcatccagagcagcttcctccgaggccatggattacattaaaagaacgagaccaaattctgccgtcagcatcattcacggttatgtgttacaatgtgttatgtgataaatacgctacccggcagctatatggctattgcccatcctgggcattaaactgggaatacaggaaaaagggaattatggaagaaattgttaactgtgacgcagatatcattagtcttcaggaagtggaaacagagcaatacttcactctctttctgccagcattgaaggagcgtggatatgatggatttttttctccaaagtcacgtgccaaaatcatgtctgagcaggagagaaagcatgtagatggttgtgcaatattcttcaaaacagaaaaatttacattggtgcagaagcatacagtggaatttaaccaagtggcgatggctaattcagatggatccgaagctatgctgaacagagtgatgacaaaagataacattggtgtcgctgtggtattagaggtccacaaagaactatttggagcaggtatgaagcctattcatgctgcagacaaacagctgcttatagtggcaaatgcccacatgcattgggacccagagtattctgatgtgaagctcatccagaccatgatgtttgtctcagaggttaaaaacattctggagaaagcctctagtaggcctggaagcccaactgcagatcctaattccatcccgctggtgctatgtgcagatcttaactcattgccagattcaggtgttgtggaatacttaagcaatggaggagtagctgacaaccataaagacttcaaggaactaaggtacaatgagtgtcttatgaacttcagctgcaatggaaagaatggaagctcagaagggagaatcacacatggcttccaacttaagagcgcctatgaaaataacttgatgccttacaccaattacacctttgatttcaaaggcgtgattgactacattttctattccaagactcatatgaacgtgcttggtgtcctggggcctttagatcctcaatggctggttgagaacaacatcactgggtgtccacaccctcacatcccttcagaccacttctcactgttaacacaacttgaactccaccctccactcctgcctcttgtcaatggtgttcacttgcctaatcggaggtagtggagtactgccccgccaagacggggatctgttgctatggacctgtacagttgtaaatcaaagtatgtaggagtgaagtatggccatccttaagctgcttcttcaggtttctttcattatgtgtttgctgtaagactttgtacatttttgtgcatattggtatcatttggcagtagggctggaaccaaagtattactctctttacaaaattttaatttaacatgtttttaaattggaccttctttatattgtattaacagccagcattcaaaattgataaattaccaatttgaggcccaataacagtgtatttgtttttccaaaacaaatactttcttttgaatggtttcagtgagccaaccattttataaaaggcaatttttaaaaactataaatacagtattttaaactgaatgatgatatgccttccagggaaaaccttgaatttttcctttataactgacttttggattccaaagtcatttgcacattaacagagtacttaaatttacttgttcagtccataaactatgatatagcctctatacatggtaagaaaatttgaaaaattaaagatggttgcacagtatacttttataatccagcatgtaacaccacatgacaatttgttggccaaatgctggtttggagtttttttgaggaatcactttggtttttttgtcctttatatataaccttattggaagtattaattctaagcctgtctctcaagtttatttatagagaaaaagtaagtaatctgtattgccacataccttgaaaatagaatgtggtatgtttaggatgcccacggaatgaatttttccttattccaattcaaccttctgtctggttgtgccaggaaaacagatgttatatgacctatgtcatttttgccattatagtcaaatgttaaaagaagaaaaaagtctgctgaataaaaaggccttgatcaaagtttcagatggggaaaatcatacagatattttatgtgtttccaacatagattatgtggctgttggtttcttgagatgacagtgcaaaggatttgggagagagaacaaatttggggcagtagttgaaaacgttgggtcattttcctgactctagctgccaaatggccatcatatgcttttaatctttgtttcagttgtctgtcagggttgaattaagaagctactggtttattcccaattgttgatgcctttaggtatgttggaatcttttttttgcctaggaggggccagttgaaaatctgtgactcaagaggcagtgaacagaatactgttttctggggaaaaattggttggctacttgatgttaattatggcacagtaacaggaaaaggttgtgtctgtgtttttaagtttttctttattctgcttttttgctgctataagagttttctgaaatttatattttaaacttttcatgcactttactgtttctagtctcaaaatgtgatatttttaataaacaagaaattttccattatgtgaatgaaattttaaaagacaatagcctatatttgtgtctcactaatatataaagtataggtcaaatttaaattatttaattagttttaaatatacacaatttgtctcctctttcaaacctgacatcttcggctgttttattagtcttaaatgatgcatttactttggtcattttatgctaatttcttccatagtaaattaatcaggctatataaggtaatatttccccagagggtaattttagtgggacgagggtggtgggatgatgtcatatcatacatgggattgcatcagaagggttctgtaaagcctgaactcccttttaaaagtgcctagtgatagaggcgttgtttgtcatctattataattggaatgtcattgtagttcagtgaattttgatgtaaataaaatatcttttaaaaatgttaaagtaccaggataaacaaacaaaaagaaacaacccttaagatgacagattttcctcaacatgcaggtttcccttcttatatacctcaagtatccaacatctagccatgcaaattgattacctgaagcatagtactggaaagtagaatagcatgaaaaacttaattttgtggacattacctttttttgtaatcagctactgtatgttttattttagatcttttgttttgggtgggttttctgctctggaggtatatgcactaacaaaacattttcctcctttcatatacgcatgttaattagcaatgtgagcaatatttcctaccatacttcactcccaatattttttgagatgtttgtataaaatggaatttaaagttcacttatgattgtatatgaaccacagaggagcccatttattaataaaaaacttttttaatagttaaatgtagagggaaaaaataaaaaaaaatgggaaacattgtaaacagcttaagtttattttgtgtatgatcgaggcactctgttgcaggaaggtgtgtaattgggttctctctgcttcaaatgcgctctttcaaaccattcattatcctgtgtatttttaatgtggttttagtaaatgttggtagtagctctgttgaagtaggtaattgtgttatgttttgggtggtacacacttggggcatggtaacccaaatttcatgtgcacggtttccctttagcccactgcccaaatttcacatacccttcaccctttgttccctttgtaaaaggagtggtatctgttttgagctgccaattcagatgatcagaaatgctgctttcctcagcattgtcttgttaaaccgcatgccatttggaactttggcagtgagaagccaaaaggaagaggtgaatgacatatatatatatatattcaatgaaagtaaaatatatatgctcatatactttctagttatcagaatgagttaagctttatgccattgggctgctgcatattttaatcagaagataaaagaaaatctgggcatttttagaatgtgatacatgtttttttaaaactgttaaatattatttcgatatttgtctaagaaccggaatgttcttaaaatttactaaaacagtattgtttgaggaagagaaaactgtactgtttgccattattacagtcatacaagtgcatgtcaagtcacccactctctcaggcatcagtatccacctcatagctttacacattttgatggggaatattgcagcatcctcaggcctgacatctgggaaaggctcagatccacctactgctccttgctcgttgattttgttttaaaatattgtgcctggtgtcaacttttaagcaacagcactgcctaaaagcaagcagagaacagaatcccagcaccattctataggcaactttttagaattcagatatagtaaatctgttccagatttatgatgttttatgtaaaaaaaattttgtataataacatagctgaatatttttgtttcatttctttgatgtaaggcgtgtgaacattcgtttgaatatcacatgttgaagtcaggtatggcacaatgggttctgagaccagcttttcctcccctcccatttgccttgttccaagctctttcttttcaaattacttttctgatattcataggcaggtatttaattttactaattagcatcctgtgtgaatgtattaaagaagccactgtgttttagtgtagttggcaaaaatataaaagctgtttcttatttgcccctatttttttggtgtcttaaagttatatattaaatcacagagaagcaagggagaaagttgaaagatatctaaggctcatatcacttgattctatggtagattatattagaattgaggatgtggcacattaaaactggaacatgggcaaatatagtgttccattttaaaattctaagtttatattgttaaatgggtgaaaatttaagtttatatttgcatttccaagcgtttctaaaaatcactaatgccatctatacttttagtatgaaacagcagactatagaaagcacagggaagaataggctaaatacattctttgaagaaccagaggcatataaccacatcattatgtcattcctaatacatggctagattttctaatgataaaattgactgtgtcccaatgcttatttgattctaagcttttttattctgtttctgagatattttaatagctttgcaaaatatgctgaccagtttttggaaaataatggtttttatagcaagcaaagactttatggcacattttcaaaatagcactcatacatacttacattttgacagaaatgtgaattctcacattgatgagatattctttttcccacctgccctaccctttaaaaaaggtcacttttctaatgtgtagtagattcatttacgcctttccctttgagtcataccatgtttggagaactgtgtgaattgtaggtagagaaattaactagggaagccagaagcttgaactaaagttttaaatttgtaggcagatgagaacttttatactatggttgctttgggcgattctaattttgtaatagcatcatgatcaccaaaattaattcaaacattttagtacatctttaatctgtcttatttaccaaagttctaatctgtttaagaacaggatgccaagagcatctttcattttatagaatgatatgctcacctttataagtgtcacctaaaagcttgagggtaaaaaagaagcagcccatatatctaaactacaggatgtcttgaacaagattcacagaaagaaagaaaaaaaagcagttctttccaggaaggtggtaaggaagagcatgcatatttcttgttttaaccaaataccttttttatgtaaatgtctctattaaaccccaggtcctacaccaggaaatagggtgataaccaggaaaataccaagctttaacccagttggcagttccttgtggcatacatttggttagacttgggtttttcctggaaccaaaggaaaataagcatgttgagttcttcgttcaacagacatgacattgaagtaatagaatattttttaagtaaaatagttttcactttcaaagcctatgacataaggacatttgtgcttattaattgttaatttttttttatggtacattgtataaactgagtagcattgaactgcattttagaagtatgtcatcagaaacaaatcacattatggaaaggatatacaaatgccaagtgatatgactcttttggcatggtggtagcatggtccattcagctttcagaatctttcggaggctctagtttggtgcctagtactagttatttttgttagaacaatctctcaaaatttagataattttccagttgtatgtctgtcacttttaactctaaagcgtaagaatcatggtaaccctctcagaagtggtcctttcttgctcatttcagtttcgtattaacttcaaatcactgatgtattgtctttcaagctatcaattgttatatgtaccaatttaatttagtttgtagttatctgaagtcacaaaattggttcagcattgatgtcaaacaatggctttgcttcttaccaaacagacttagtatcctgctgcttgtttcaatcttgatgcagtaagtgatgcagtatctgggtctgtatttacttagaaactgtactgtcctttctctgtgcttaacttgctaaaaatatattcccttacctgtgaaattcctgagcggtgctctgccaacttttcaaggggagggatttggatggctgtgttactgcacactggatctggaattgttcagggttatgagtgacaaatttcttaaacaccagcagcactgagatgtgcactatgggcattcgtacagttgttgtccaaatgcaaacaactttttcatcttggagaagctgagatacagagttcaatagaactacttggaatattttgagaaggttgaatgtttcatctttggctttgttgtctctggagtggggaagtatggagggctttttttttttttttttttttttttttttttttttttaaagagagtgtgtatgtactttttctctctataagggccagggtgttggtcaaattcaccatcgattaatttatatcttctgttgtgatttttttcaactatataacaagtgccaactaattgtccatgggacaatctacttttccactcaatttatcgttttgagtagggaaaggttcatttattttcattacctggcattaagttaaagaattcattattttgcatacatttgagtcattctgtgacctataaagtgtttttgtaactatctaattctaatggttgcaaagcaaagcacatgactgtaaaaccaagcaaggtgttttagtaactttttccctgaatacttggtagtttccattgatactattccaaaacaaattctgctgttttaggttgtatatttactttgcttttgttctaagaaaaagccaaggactaaatcaacttgtttttgtgtttcagtaatcagtttaaaatctaagatttttttttaaattagactatttaatgaagtgccatgtaattgtagcttgctagtgtttaatgtttaatagactggttctgtaggtgttttaaccatttaacactctctgccatccctggagaaagtggttctactcttactgaacacattctctctgacaaaatcaccagctgctttatttttctatttattacagttaaacagttgatgaggtctgaatcttgaccaaaactgctcagctgagatgtttttcacaatagacactgtacaaagtgtgcgtgcaaaaggacacggttggtagtattttttcattaatgtgaacattgactaaaaaaaagcagtcctgccttttaaatcttgtggcagctcagaagggaggtgcttaagaaccttaactactatgtcagataacaaaatatttttttccattttggagattggttactgctcacacatgatgtatagggctaaatatatgcttgtttccttgcacctgtgtacttcccctctctccctccctttccttcccctgtaggcaataaatggccattttgcaactgca

SEQ ID NO: 3846 - DNA, 2774 bp, Homo sapiens
  source 1..2774: mol_type = genomic DNA
caatctgaggagcaggaggaccggggcgccggtgtcctgccgcctccttctccttgctctcacctgcgcctattagtccacgcgccttcaaggccaggggctacagcccagacagagaggggacagcagagggagagagagcacctgaggatacagagctggcactggactgccttttcaccccccaggtgatgagtgaggttcgaagaacggaagatttaaaaagcagccggggcctccgtattgaatgaaagacccagtgcaaagacatcaccatgaacactagcattccttatcagcagaatccttacaatccacggggcagctccaatgtcatccagtgctaccgctgtggagacacctgcaaaggggaagtggtccgcgtgcacaacaaccacttccacatcagatgcttcacctgtcaagtatgtggctgtggcctggcccagtcaggcttcttcttcaagaaccaggagtacatctgcacccaggactaccagcaactctatggcacccgctgtgacagctgccgggacttcatcacaggcgaagtcatctcggccctgggccgcacttaccaccccaagtgcttcgtgtgcagcttgtgcaggaagcctttccccattggagacaaggtgaccttcagcggtaaagaatgtgtgtgccaaacgtgctcccagtccatggccagcagtaagcccatcaagattcgtggaccaagccactgtgccgggtgcaaggaggagatcaagcacggccagtcactcctggctctggacaagcagtggcacgtcagctgcttcaagtgccagacctgcagcgtcatcctcaccggggagtatatcagcaaggatggtgttccatactgtgagtccgactaccatgcccagtttggcattaaatgtgagacttgtgaccgatacatcagtggcagagtcttggaggcaggagggaagcactaccacccaacctgtgccaggtgtgtacgctgccaccagatgttcaccgaaggagaggaaatgtacctcacaggttccgaggtttggcaccccatctgcaaacaggcagcccgggcagagaagaagttaaagcatagacggacatctgaaacctccatctcaccccctggatccagcattgggtcacccaaccgagtcatctgcgacatctacgagaacctggacctccggcagagacgggcctccagcccggggtacatagactcccccacctacagccggcagggcatgtcccccaccttctcccgctcacctcaccactactaccgctctggtgatttgtctacagcaaccaagagcaaaacaagtgaagacatcagccagacctccaagtacagtcccatctactcgccagacccctactatgcttcggagtctgagtactggacctaccatgggtcccccaaagtgccccgagccagaaggttctcgtctggaggagaggaggatgattttgaccgcagcatgcacaagctccaaagtggaattggccggctgattctgaaggaagaaatgaaggcccggtcgagctcctatgcagatccctggacccctccccggagctccaccagcagccgggaagccctgcacacagctggctatgagatgtccctcaatggctcccctcggtcgcactacctggctgacagtgatcctctcatctccaaatctgcctccctgcctgcctaccgaagaaatgggctgcacaggacacccagcgcagacctcttccactacgacagcatgaacgcagtcaactggggcatgcgagagtacaagatctacccttatgaactgctgctggtgactacaagaggaagaaaccgactgcccaaggatgtagacaggacccgtttagagggaaacttttggaagagtggctgcttatgagattccaaaatgaagtgttggccaacaccgctcatggccatcctggattttcccagtggcttcccttcctgctcgcctccctgaacaggggagaaagcttaacctctcttctcctctccaaacctttcaccttgaatgggtaatgtttggtgggggctgttccttcttggagaagccttgagtcggaccattttgagatcatggaggaaggatgaagaagtgaaaatgacaataatgactctcaagaggctggcgatgtgacatggcaaatgtagaactgacttaaattgaacaaaccctcactgagcacctctgatgttgagcacctgctgaatactgagcactgaatgggggagggggaggggagcacggggtgagtcaacctgggactcggtctcagggatatgcctaccaatagcgggtatcgtaaggcatgtacccaaacataacggatgtaaggcagaaagtgatcggagaaggaatgagaaagtgtgcgtgatgttaatgaaaagtcatatgcagctagagcagacccaggaaagctttctggaagagattgcatctgaggaaattcaggaaggatctttgtagattggggggagattctaaattgaaggggtgatggggtgaggggccagagggaagtctgctgtgttctcatgtaggatgtcagccctccctgcaacttctctttttggccaatgtcttttcactttcctgaccctttagaatcatccccagccagacgcaatcatggaagttgccttattgtcactggttaagaacttggcgagattgaagggcttttgttattgttgttggatatttttgtttcccataaaagcacatcatttcaaccctaaa

SEQ ID NO: 3847 - DNA, 578 bp, Homo sapiens
  source 1..578: mol_type = genomic DNA
gttgctcaaaccgagttctggagaacgccatcagctcgctgcttaaactggaaacaaaagtctcaacttccaacctctttgcagctaggagtggccaagtagcatagatctggtgaatgaactgcaggtgggaatttctgagaaggtttccttcttaaatagaaagattaaaccacaggttccattatgggtcgacttgatgggaaagtcatcatcctgacggccgctgctcaggggattggccaagcagctgccttagcttttgcaagagaaggtgccaaagtcatagccacagacattaatgagtccaaacttcaggaactggaaaagtacccgggtattcaaactcgtgtccttgatgtcacaaagaagaaacaaattgatcagtttgccaatgaagttgagagacttgatgttctctttaatgttgctggttttgtccatcatggaactgtcctggattgtgaggagaaagactgggacttctcgatgaatctcaatgtgcgcagcatgtacctgatgatcaaggcattccttcctaaaatgcttgctcagaaatctggcaatattatcaacat

SEQ ID NO: 3848 - DNA, 1405 bp, Homo sapiens
  source 1..1405: mol_type = genomic DNA
ggaggtaccggctcaggcttgggatcccggctgcgggtttggcggcgctgcgccggcaggcagcgaggccgggcgggccctgggccctcgcgcccctcccgcgaggcctgtcatgcagggccccgccgggaacgcgagccggggactgccaggcgggccgccctccacagtcgcgtccggggcgggccgctgcgagagcggcgcgctcatgcacagcttcggcatcttcctgcaggggctgctcggcgtcgtggccttcagcacgttaatgctcaaacgcttcagagaaccaaagcatgaaagacgtccgtggaggatatggtttttagacacttccaaacaagccataggaatgctgttcatccactttgcaaatgtatacctagcagatctcactgaagaggacccttgttcactgtacctcatcaacttcctcctggacgccactgtgggcatgctgctcatctacgtgggggtgcgcgccgtcagcgtcctggtagagtggcagcagtgggagtccctgcgcttcggcgaatatggagaccctctgcagtgtggagcctgggtcgggcagtgcgctctttacatcgtgatcatgatttttgaaaagtctgtcgtcttcatcgtcctcctaatacttcagtggaaaaaggtggccctgttgaatcccattgaaaacccagacttgaagctggccatcgtcatgctgatcgtccccttctttgtcaacgctttgatgttttgggtagtggacaatttcctcatgagaaaggggaagacgaaagctaagctagaagaaaggggagccaaccaggactcgaggaatgggagcaaggtccgctaccggagggccgcatcccacgaggagtctgagtctgagatcctgatctcagcggatgatgagatggaggagtccgacgtggaggaggacctccgcagactgacccccctcaagcctgtgaagaaaaagaagcaccgctttgggctacccgctggtgctcaggaagcccctatcaagaagaagcgcccccctgtgaaggacgaggacctgaagggggcccgaggaaacctgaccaagaaccaggaaatcaagtccaagacctaccaggtcatgcgagagtgtgagcaagctggctcggccgccccgtcggtgttcagccgcacccgcacaggtaccgagactgtctttgagaagcccaaagccggacccaccaagagtgtcttcggctgagaagtgtgcgccactccccttgctgcccgaatgctcggaaacaggagcctttcccaggaactcttttttatgccagaacgcttcctctcccctgctgtctctggggctgccaccctcccccacagtccaggcccttcagccaagggctctgcaccagcaccttggaagcaccaa

SEQ ID NO: 3849 - DNA, 594 bp, Homo sapiens
  source 1..594: mol_type = genomic DNA
catttcgtcttagccacgcagaagtcgcgtgtctagttctggtcctccccgctttgcagtttgtttcgacgccggaccgcgtaagagacgatgatgttgggcacggaaggtggagagggattcgtggtgaaggtccggggcttgccctggtcttgctcggccgatgaagtgcagaggtttttttctgactgcaaaattcaaaatggggctcaaggtattcgtttcatctacaccagagaaggcagaccaagtggcgaggcttttgttgaacttgaatcagaagatgaagtcaaattggccctgaaaaaagacagagaaactatgggacacagatatgttgaagtattcaagtcaaacaacgttgaaatggattgggtgttgaagcatactggtccaaatagtcctgacacggccaatgatggctttgtacggcttagaggacttccctttggatgtagcaaggaagaaattgttcagttcttctcagggttggaaatcgtgccaaatgggataacattgccggtggacttccaggggaggagtacgggggaggccttcgtgcagtttgcttcacaggaaatagctgaaaaggct

SEQ ID NO: 3850 - DNA, 594 bp, Homo sapiens
  source 1..594: mol_type = genomic DNA
gcagttcttgagttccacatgcagagcagatgcgacagctagaagtgagtagggcccagaccctggcccaggaagatccactaaaggaggccatccttccgccttcttctgcaggagtcagggggcgtgtaaaggtgatttgttcgccaagaaaagcacttttagtaaagcacagatgttaatctagatcatggaaaagtgccacacactagatttagcacataagcaaggagtctctagaacactcagaagaaaatgaatgaatccatgaatgaatggacaagtgagagcccagagcagctgaagccatgaagtgctttggaaagagaagcgtgcctgggaaaagagagtggctgagtgctaagagcagggtgaacaccatggaaaacttgaaattgaaaacatcacaattttaatgagaaaaagcgcaacccaaagtgaagagcaccattataacaaaggcgatgcaaaccagtaatgcagaatcctattgctctataaaaatttgaattgcttgaatctattacaaatttttgccagtgtgcttcctgcctcaaggatggatggaaaggcagatgtaaagtccctcatggc

SEQ ID NO: 3851 - DNA, 1258 bp, Homo sapiens
  source 1..1258: mol_type = genomic DNA
agccgtggtcgcgctgtgtgtgtgtgtgagtggagagtgagtgcgggacctgaggctgtgtgtgtgtgaactgtggccactggcggggtcgggggggggcagcggcggagccgcctcggacggcaaagccatgactacagtagtggtacatgtggactccaaagctgagctcactaccctgctggagcagtgggaaaaggaacatggcagtgggcaggacatggtacctatccttaccaggatgtctcaattgattgaaaaagaaactgaagagtatcgtaaaggggatccagacccatttgatgatcgacatcctggtcgagctgatccagagtgtatgctgggccacttgctgagaatactcttcaagaatgatgatttcatgaatgcactggtgaatgcatatgtgatgacaagccgagagccccctttaaacactgcagcttgcagactcctattagacatcatgccagggctggaaactgctgtcgtctttcaagaaaaggagggaattgtcgagaatcttttcaaatgggcccgagaggccgatcaaccattgaggacatattctactggactgttaggaggtgctatggaaaatcaagacattgctgccaactatagagatgaaaattcacagctggtggcaatagtgcttcgaagactgagggagctacagctacaggaagtggctttgcggcaggaaaacaagcgtcccagtccacggaagctctcttctgaaccccttttgcctctggatgaggaggctgtggatatggactatggtgacatggctgtagatgtagtggatggagaccaagaggaagcttctggagacatggagatctcctttcatcttgattcaggccacaagactagtagcagagtgaactcaacaaccaaacctgaggatggaggattaaagaaaaacaagtcagcaaaacagggtgacagagagaactttaggaaagccaagcaaaagttgggtttctcatcttctgatccagatcgcatgtttgttgagctgtctaatagcagttggtcagaaatgtctccctgggtgattggcaccaattataccctttatcctatgactcctgctatcgagcagcgactcattctccaatatttgacccctctaggagaatatcaggagctacttcccatattcatgcaacttggatcacgggagctgatgatgttctatattgacctgaagcaaactaatgatgtcctgcttacatttgaggcactaaag

SEQ ID NO: 3852 - DNA, 1549 bp, Homo sapiens
  source 1..1549: mol_type = genomic DNA
gtgcgcagcggcgtatgtggggccgtgtgcagacccgcgtgtggcgcaggcaaggaccctcaaaataaacagcctctaccttgcgagccgtcttccccaggcctgcgtccgagtctccgccgctgcgggcccgctccgacgcggaagatctgactgcagccatgagcagcaatgagtgcttcaagtgtggacgatctggccactgggcccgggaatgtcctactggtggaggccgtggtcgtggaatgagaagccgtggcagaggtggttttacctcggatagagacatttgttatcgctgtggtgagtctggtcatcttgccaaggattgtgatcttcaggaggatgcctgctataactgcggtagaggtggccacattgccaaggactgcaaggagcccaagagagagcgagagcaatgctgctacaactgtggcaaaccaggccatctggctcgtgactgcgaccatgcagatgagcagaaatgctattcttgtggagaattcggacacattcaaaaagactgcaccaaagtgaagtgctataggtgtggtgaaactggtcatgtagccatcaactgcagcaagacaagtgaagtcaactgttaccgctgtggcgagtcagggcaccttgcacgggaatgcacaattgaggctacagcctaattattttcctttgtcgcccctcctttttctgattgatggttgtattattttctctgaatcctcttcactggccaaaggttggcagatagaggcaactcccaggccagtgagctttacttgccgtgtaaaaggaggaaaggggtggaaaaaaaccgactttctgcatttaactacaaaaaaagtttatgtttagtttggtagaggtgttatgtataatgctttgttaaagaaccccctttccgtgccactggtgaatagggattgatgaatgggaagagttgagtcagaccagtaagcccgtcctgggttccttgaacatgttcccatgtaggaggtaaaaccaattctggaagtgtctatgaacttccataaataactttaattttagtataatgatggtcttggattgtctgacctcagtagctattaaataacatcaagtaacatctgtatcaggccctacatagaacatacagttgagtgggagtaaacaaaaagataaacatgcgtgttaatggctgttcgagagaaatcggaataaaagcctaaacaggaacaacttcatcacagtgttgatgttggacacatagatggtgatggcaaaggtttagaacacattattttcaaagactaaatctaaaacccagagtaaacatcaatgctcagagttagcataatttggagctattcaggaattgcagagaaatgcattttcacagaaatcaagatgttatttttgtatactatatcacttagacaactgtgtttcatttgctgtaatcagtttttaaaagtcagatggaaagagcaactgaagtcctagaaaatagaaatgtaattttaaactattccaataaagctggaggaggaaggggagtttgact

SEQ ID NO: 3853 - DNA, 1785 bp, Homo sapiens
  source 1..1785: mol_type = genomic DNA
tcggtgggttcccgtgcggcggcggccaaggaggaggagacacagttggagcagctccgtgggctgactggggcgaggcctcagcagcgcgagcttgagtgcggccgagcctgcggcgccttcccctgcgggtggggacgagcgggccccgcggcgtcatcggcggcgaggtgagcggcggccggcgggcgggagctctggcgggagccgcgccggcctgacgcgctgtcgccgctggttgcaggagccgccgcgcctcggcctagcatgtcggaagcgggcgaggagcagcccatggagacgacgggcgccaccgagaacggacatgaggccgtccccgaaggcgagtcgccggccggggctggcacgggcgccgcggcgggggctggaggcgcgaccgcggcgcccccgagcgggaatcagaacggcgccgagggcgaccagatcaacgccagcaagaacgaggaggacgcgggaaaaatgttcgttggtggcctgagctgggatactagcaaaaaagatttaaaagactattttactaaatttggagaggtcgttgactgtacaataaaaatggatcccaacactggacggtcaagagggtttgggtttatcctgttcaaagatgcagccagtgtggagaaggtcctagaccagaaggagcacaggctggatggccgtgtcattgaccctaaaaaggccatggctatgaagaaggacccggtgaagaaaatcttcgttgggggtctgaatcctgaagccactgaggaaaagatcagggagtactttggcgagtttggggagattgaggccattgaattgccaatggatccaaagttgaacaaaagacgaggttttgtgtttatcacctttaaagaagaagaacccgtgaagaaggttctggagaaaaagttccatactgtcagtggaagcaagtgtgagatcaaggtggcccagcccaaagaagtctatcagcagcagcagtatggctctgggggccgtggaaaccgcaaccgagggaaccgaggcagcggaggtggtggtggaggtggaggtcagagtcagagttggaatcagggctacggcaactactggaaccagggctacggctaccagcagggctacgggcctggctatggcggctacgactactcgccctatggctattacggctacggccccggctacgactacagtcagggtagtacaaactacggcaagagccagcgacgtggtggccatcagaataactacaagccatactgaggcggcagcaggagcgaccaactgatcgcacacatgctttgtttggatatggagtgaacacaattatgtaccaaatttaacttggcaaactttctattgcctgtcccatgtgcatcttatttaaaatttcccccatggaaatcactctcctgttgactatttccagagctctaggtgtttaggcagcgtgtggtgtctgagaggccatagcgccatcatgggctgatttttattaccaggtcccccagaagcaggtgggaggctctgcttcctgctgccgctctgcagcctggacctgtggaccctggttgtaaagagtaaattgtatcttaggaaaccagtgtcacctttttttcaccttttaattttatattatttgcgtcatacatttcctgtaacggaagtgttaattttactgtactttttggtaccttttgggaatctaatgtattgtaaggtattttacacgtgtcctgattttgccacaacctggatattgaagctatccaagcttttgaa

SEQ ID NO: 3854 - DNA, 2486 bp, Homo sapiens
  source 1..2486: mol_type = genomic DNA
gttgctggctttttcaggagctgctcgctcgcagccagagacgctgctttttttttccgggttcggagccgttccggatgctttaggctgccggatgtctgatctccgaataactgaggcgtttctgtacatggattatctgtgttttagagcactttgctgcaagggaccaccacctgcacgaccagaatatgacctggtttgcataggcctcacaggttctggcaaaaccagtctgttgtccaaactctgcagtgaaagccccgataacgtcgtgtcgaccacaggttttagtattaaagcagtgccattccagaatgccatcttgaatgtaaaagaacttggaggggctgataacatccggaaatactggagccgctactaccaaggatctcaaggggtaatatttgtattagacagtgcctcttcagaggatgatttagaagctgctagaaatgagctgcactcagctcttcagcatccacagttatgcactttaccctttttaatattggccaatcatcaagacaagccagcagctcgctcagtacaagagatcaaaaaatattttgaacttgaaccacttgcacgtggaaaacgctggattctacagccctgctcactggatgacatggatgcactgaaagacagcttctctcagctgattaatttgttagaagaaaaagaccatgaagctgtaagaatgtgaaatctggcaaagaaaacaggctcccaaaaggccttgaacctatcatgttagtttctcattttaattttattttggtatcaagactatattggcttcagtatctattttcctctggtcatttcagactctcatctctctattaaagtgaatattctgtagatcagatgaattatcatcggcattaacgtcaagtacacactactgagagagaatttattctctgtttaccactaattatcttccccgcatgtctcttccttctgttgttctaagcatctcttctatactctgtgctgaaacggatggaattcatggcttatggaaatcaaatcccttttgaaggactcagaaagactcacaagaccttgatcattttctctgggtttgggagtggagtattatgtgactgggactccacaaaatatttatattattttcaagacctattgggggttttgttttattttatctaatttttttttttttttggtatactgagcttatagactatgagagaaaagtgagcaccaaaaacttcattaatcaccttatcaggaaggaatatcctgccatagtaaaattggctctgaagagcttagaggcaagttacacaatgttttcttgattacatctgaagtctcttctcttttaagagcaaagacattgtttcagtttctgagagtggttagaggaaatttaggtacaatgcatgcatcacagactgtatttgattgattcgagtcttcaaatattgtttaatggaatgatgagcctgcataaagtgaagctgcaatgtaacataggtatctttttctaaaaacttcaagtgtttgattaaaatagagaaaataatttttaaaataatagataaaaattttaaaaacagccagaaaaagtataatttatactggttagggtttaagatggcatggatttgacaaagataacaaagacagaatcatctatatattcattcattacgtgttactgtagtttattggaatctgttaatgccttcctctagtagttaaaggtttatcagtatttctattataaacctctattttcaggggtttcaatgtgcccttaaaattgtgctggggctgcagcaaataaataatattgggactcatattcagtctttggaactagttttttttccatttaatttaaatgacaaaattgcatagggataaatgtacagttttactaaggtttagcacctttgatcttttctaaatcaggaaaaaaatctatgcatattgaggttcacagatgaaatattctttggcatactttgtagactttgaccacttaaaatactaagtggccaaatgataaaaaaaactgctccctgcacatgagtgtaaaaacatgtttgtaattttaagtaaaatggactgatacccaaataccacagactcacactatattacagaatgatgtaatacctggtaattctccagaagatagacttcagacccttaatgccatttaaatgtagtttttgtggtttaatcttatgagtagattgtaatgaaatcattacctttgaaacatcaaacacttctttaagctttttttttttaatgtcatgaatcaggaaggatacatagtgattcgtatacaattttgtctgcagcattcttgaatatttttaacactgtgtaatccctgagcagcacaaaacttttattccgatgaccagttacacaattcctgtttttattttgtcctgttgtgctcatcttctatgaaaaataaatgattattaggc

SEQ ID NO: 3855 - DNA, 6652 bp, Homo sapiens
  source 1..6652: mol_type = genomic DNA
taatgacgtcacgttgtttcgcgggagaaattcgaaagtggattttgtgcaatttgacaggtggtataaatagttgaatatttcctattttctggacccagctggtttataacttcagaagaaataatggaaagccaagaatttattgttctatatactcatcaaaagatgaagaagtcaaaagtgtggcaagatggaattctgaagatcactcacttaggaaacaaagcaattttatatgatgacaaaggagcatgtttggagagtctgtttcttaaatgccttgaggtgaaacctggagatgacttagaaagtgatcgatacttaatcacagttgaagaggttaaagttgctggagccataggtattgttaagcagaatgtcaataaagaagcaccagagttaaattcaaggacatttatatcctctggccgatctcttggatgtcagccctctggcttaaaaaggaagtttactggttttcaaggaccacgtcaggttccaaagaaaatggttattatggaaagtggtgaatcagctgcatcacatgaggctaagaaaactggccctactattttttctccattctgcagcatgcctcctttgtttcctactgttggcaagaaagatgtaaataatatactggcagaccctgagaacattgtgacttacaagaacagggagagaaatgccatggatttttcttcggttttttctccatccttccagattaacccagaagtgctgtgtgaagaaaattatttttgctcacctgtcaattctggaaataagctttcagactctttactgaccaatgagcctgtgaaaagagatagtttggcatctcactattcaggagtttcacaaaacatcagaagcaaagcacagatattagctcttctgaagtccgaatcatctagttcatgtgaggaactaaattctgagatgacagagcattttcctcaaaaacaaccacaaggaagtttaaaaattgctactaaaccaaagtacctaattcaacaggaagagtgtgctgagatgaagagcacagaaaatttatactaccagcatcaatcagaaaataccatgagaaataaaagccggtgggccatgtatttatcctcacagagttcacctatacattcttctactgtagatgggaatgatacagaaaggaaacccaaggcccaggaagatgatgtaaattctaatttgaaagacctttcattacaaaaaattatacagttcgttgaaacgtatgctgaagagaggaaaaagtataatgtagaccagtcagtcggtaataatgatccatcctggaatcaggaagtaaaattagaaattccttcattcaatgaaagcagtagcttacaggttacttgtagcagtgcagaaaatgatggtatattatcagaatctgacattcaagaagataataaaataccttttaatcaaaatgacaaggggtgcattaaaggatcagttctcattaaagaaaatgctcaggaggtaaatacatgtggaacactggaaaaggagtatgaacaatcagagtcatctctgccagaactgaaacatctccaaattgaatctagtaataattctaggatctctgatgacattacagacatgatttctgaaagtaaaatggataatgaaagtcttaatagtattcatgaatctctgagtaatgtaacacaaccatttttggaggtaacttttaatctgaacaattttgagaccagtgacactgaggaggaatcacaggaaagcaacaaaatttcccaggattcagagagttgggtaaaggacattttggttaatgatggcaattcatgttttcaaaagaggtctgagaatacaaactgtgaagagattgagggtgaacatttgccattcttaacatctgttagtgacaaacctacagtgacatttcctgttaaagagactctgccatcacagttttgtgataaaacttatgtgggttttgacatgggaatatgtaaaactgaaaacacaggaaaagaaatagaggagtatagtgacacattaagcaattttgaatctttcaagtggactgatgctgtatacggagataataaagaagatgctaataaacctattcaagaagtcagaattaactatgattttgctttacccccgaataaatctaaaggtataaacatgaatttacatattcctcatattcaaaaccagattgctgaaaacagtaatctattttcagaagatgctcaacctcagccttttattttgggaagtgacttagacaaaaatgatgaacatgttttaccctcaacttctagtagtgacaacagtgtccaactattaaataccaatcagaatcactatgaatgtattgcacttgataaatcaaatacccacatttccaattctttgttttacccactgggaaaaaagcatcttatttccaaagacacagaagcacatatatctgaacctgaagatttgggaaagattagaagtccaccccctgaccatgttgaggttgaaactgccagagaaggcaaacaatactggaatcctagaaattcttcagaactttctggattagtaaataccatttctattttaaagtcgctatgtgaacacagtactgctttagacagcttggaaatattgaaaaagaaaaatactgtctttcagcaaggaactcaacagacgtatgagccagatagccctcctgaagtgaggaaaccatttattacagtagtttcaccaaagtctcctcatctgcacaaggattctcaacagatactaaaagaagatgaagttgaactaagtgaaccacttcagtctgtgcagttctcttcctcgggaagtaaagaagagactgcttttcaagctgttattcctaaacaaatagagagaaaaacctgtgaccctaagcctgttgagtttcaaggacatcaagtaaaaggatcagctactagtggtgtaatggtcagaggacacagctcacagctaggatgcagtcagtttccagatagcactgagtatgaaaactttatgacagagacaccagagttacctagcacgtgtatgcagattgacttcttgcaggtgacatcaccagaagaaaacatctctacattgagccctgtttctaccttttctttgaactcaagagatgaagacttcatggtagaattctctgagacgtccctgaaagcaagaactttacctgatgatcttcattttctcaacttggaggggatgaaaaaatcccgttctctggagaatgagaaccttcaaaggctttcattattaagtagaacccaggttccacttattactttgccacgtactgatgggccacctgacttagactctcattcgtatatgatcaactctaacacatacgagtcttctggctcccccatgctcaatttgtgtgaaaagtcagcagttctttcgtttagcattgagcctgaggaccaaaatgaaacctttttctctgaagaatctagggaagtgaatccaggggatgtttcacttaataatatatctactcagagcaagtggctgaaatatcaaaacacatcccaatgcaacgtggctactccaaacagagttgataagagaataactgatggcttctttgctgaggctgtttctgggatgcattttagagacacaagtgaaagacagagtgatgctgtcaatgaaagctctttagactctgtgcatttgcaaatgataaaaggcatgctctatcaacagcggcaggattttagcagtcaagattcggtttccagaaagaaagtactttctctgaatttaaagcagacttctaagacagaggaaattaaaaatgtattaggagggtctacctgctacaactacagtgtaaaggatttacaggagataagtggctctgagctgtgctttccaagtgggcagaaaataaaatctgcttatcttccccaaaggcaaattcacataccagctgtttttcagtctcctgctcattataagcagactttcacatcttgcctcatagaacatctaaatatattgctgtttgggttagcacaaaacctgcagaaagctctttcaaaagttgacatatcattttatacatcattgaagggagagaaactgaaaaacgcagaaaataatgtaccatcctgccatcatagtcaacctgcaaaacttgtcatggttaaaaaggaaggtccaaataagggtcgtctcttttatacatgtgatggacccaaagctgatcgatgtaaattctttaaatggcttgaggacgtgactccaggatattcaacacaggaaggagctcgacctggcatggttttaagtgatattaagagtattggcttatatttaagaagtcaaaagataccactttatgaggaatgccagcttttggtgagaaaaggatttgattttcagagaaaacagtatggcaaactaaagaagtttactactgtaaatcctgagttttataatgaaccaaaaaccaaactttatcttaagctaagtcggaaggaaagatcttcagcttatagcaaaaatgatctttgggtggtttcaaaaaccctagactttgagctggatacttttatcgcatgtagtgctttctttggaccatcatctatcaatgagatagaaatactgcctttgaaaggctatttcccttctaattggcccactaacatggttgtccatgcgttattggtttgtaatgctagcacagaactgactactttgaaaaacattcaggactactttaatccagctactctacctctaacacagtacctgttaacaacgtcttcgccaactatagttagtaacaaaagagtcagtaagagaaaatttatcccaccagccttcacaaatgtcagtacaaaatttgaactactcagcctaggagcaacattgaagttagctagtgagttgattcaggtacacaagttaaacaaggatcaagctacagctctaattcaaatagctcaaatgatggcatcacatgaaagcattgaagaagtgaaggaactgcaaactcataccttccctatcacaatcatacatggtgtgtttggagcaggaaagagttacttgctggcagtggtgattttgttctttgtacagctgtttgaaaagagtgaagctcccaccattggaaatgcaaggccgtggaaacttctgatttcttcttctactaatgtggctgttgacagagtacttcttgggcttctcagtcttggatttgaaaactttatcagagttgggagtgttaggaagattgccaaaccaattttaccttatagcttgcatgctggctcagaaaatgaaagtgaacagttaaaagaactacatgcactaatgaaagaagacctgactcctacggaaagagtctatgtgagaaaaagcattgagcagcataaactggggaccaatagaaccctgctgaagcaggttcgagtagttggagttacctgtgcagcctgcccattcccatgcatgaatgatcttaaatttcctgtagttgtgctggatgagtgtagtcagataactgaaccggcctctctccttcccattgcaaggtttgagtgtgaaaagctgattcttgttggggatcccaaacagctacctcctactattcagggttctgatgcagctcatgaaaatggattggaacaaactctttttgatcgactttgcttaatgggtcacaagccaattctattgagaactcaataccgttgtcatcctgcaatcagtgctattgctaatgatctgttttacaaaggagccctcatgaatggtgtaacagaaatagagcggagccctttattggaatggctaccaaccctgtgtttttataatgttaaaggactagaacagatagaaagagataacagctttcataatgtggcagaagctacgtttacactcaagctgattcaatcactgattgcaagtggaatagcaggctctatgattggtgtgataacattatacaaatcccagatgtacaagctttgtcatttactcagtgctgtggactttcaccatcctgatattaaaactgtgcaggtgtccacagtagatgcttttcagggagctgaaaaggagatcattattctgtcctgtgtaaggacaagacaagtaggattcattgattcagaaaaaagaatgaatgttgcattgactagaggaaagaggcatttgttgattgtgggaaatttagcctgtttgaggaaaaatcaactttggggacgagtgatccaacactgcgaaggaagggaagatggattgcaacatgcaaaccagtatgaaccacagctgaaccatctccttaaagattattttgaaaaacaagtggaagaaaaacagaagaaaaagagtgaaaaagagaaatctaaagataaatctcattcataaaaagacatggtgtaaatattttgtatttatgtaaattcagactcattttacatgatatattttttatatttttattactctaaaccctcttattaaaaatatgatatttaaataacatagtaaacacatgtaaaaattttgttcttcaaaaaagtgtacaaaaggtagtataaaatcctactaataaaaataagcttttttctaagaagaa

SEQ ID NO: 3856 - DNA, 1304 bp, Homo sapiens
  source 1..1304: mol_type = genomic DNA
gtggaatgtgaggggaggtggaggagatggcggcgacggcccgggaagatggcgccagcggtcaagagcgaggtcagcggggctgcgagcactatgacagaggatgtctcctaaaggcaccttgctgtgacaagctttatacttgccgcttgtgtcatgataacaatgaagatcatcaactagatcgctttaaagtgaaggaagtgcagtgcataaactgtgaaaaaattcaacatgcccaacagacttgtgaagaatgtagcacattgtttggagaatattattgcgatatatgccatttgtttgacaaagataagaagcagtatcactgtgaaaactgtggaatttgtaggattggtccaaaggaagattttttccattgtttgaaatgtaacttatgcctagctatgaatcttcaaggaagacacaagtgtattgaaaatgtgtcccgacagaattgtccaatatgtttggaggacattcacacatcccgtgttgttgctcatgtcttgccatgtggacatcttttacatagaacgtgttatgaagaaatgttgaaagaatatgaccaggtattggagacagctggatgatgaagtagcacagactcctatgccatcagaatatcagaacatgactgtggatattctctgcaatgactgtaatggacgatccactgttcagtttcatatattaggcatgaaatgtaagatttgtgaatcctataatactgctcaagctggaggacgtagaatttcactggatcagcaatgacgagcctacacagtactggagaacttggcattttctgatatagaaaaaggctttccttggtatcgtgttatcatgtgtcgtcatctatgcattagagttgatgtgttttgtactagtgtcacagcataaaatcatattacaagtacgtaaggattcagggtctcttgatagacttatcatagctctatattgaatgaaagccactgtgcttgtgttttgattggaaattcctttagtgtcagttttttggaagccaatgatgtttgccactgatacattcatagaagtgtattatattttcatgaagctttgctttaagtgacactacgcgtgcagttcatttctagttcttgatagaactgcacttaattttcagtagtagtcttgactttttaagggctgtgttatattaagttctcccttactgttaaaacctaattaaatatgctttagaattttctaagacagtcctctggatcctctaaatgtgaattttgatgtaataactgctaataaaattatattgaaac

SEQ ID NO: 3857 - DNA, 600 bp, Homo sapiens
  source 1..600: mol_type = genomic DNA
attcgctatagattccttgtttctcacttcgtagcacgagccactctgaccatcaagatcagaaaaacttctcagctgcaagttagaagtggactggccattgaggaggctctcagcggagtcgctcttcacaggagtcttgaacgcggtgtggaatcggcagcgaggaatcctggagcacagagaagctcccagctttgaaggtcttgcggtggtgaaaaattagacgatttcaagaattggagctgaatctgatgttaagtaatggcaacaggtgacttaaaaagaagcttacggaacctagaacaggtgctccgcttgctaaattatcctgaagaggtggactgtgtaggtttgataaagggagacccagcagcatctttgcccatcatcagctattcttttacctcatactcaccttatgtaacagaacttataatggaatccaatgtagagctcatagcaaaaaatgacttgcgctttatagatgctgtctataagcttcttcgtgatcaatttaattataaaccaattttgacaaaaaagcagtttatccaatgtgggtttgcagaatggaaaatccaaattgtttgtgatatt

SEQ ID NO: 3858 - DNA, 713 bp, Homo sapiens
  source 1..713: mol_type = genomic DNA
aacagccagaggccactggtgtataggatcctcctactctctgactttttttcttgtagttattttgaggccctgtcccgtggagagacgcctccggtgagagagcggtctgagcgagtcgctttgtgtaactgggcagagctaacacctgagctgttaaagatcctgcattctcaggttgctggcagactgatcatccgtgcagaggagctggcccagatgtggaaagtggtgaatctcccaacagatctgtttaatagtgtgatgaatgtgggtcgcttcacggaggagatcgagtggctgaagtttttagcccttgcttgcagcgctctgggagttactattaccaaaactctcaagatagtgtgtgaggtcttatcatgtgaccacaatggtgggttgccccgaatcccattcagcaccttccagtttctctacacgtatattgccgaagtggatggggagatctgtgcatcacatgtcagcaggatgctaaactacattgaacaggaagtaattggtcctgatggtttaatcacggtgaatgactttacccaaaaccccagggtttggctggagtaacagcacaattttggcaattttaaaggaagatacagaggtgattgtacttcagaatgataaacccatataccacctaaaatcaattttcttgtacaactggtacacactaataaacaaacatgtgagatcag

SEQ ID NO: 3859 - DNA, 2789 bp, Homo sapiens
  source 1..2789: mol_type = genomic DNA
agaaagctccgcagttcttgagttccacatgcagagcagatgcgacagctagaagtgagtagggcccagaccctggcccaggaagatccactaaaggaggccatccttccgccttcttctgcaggagtcaggatggaaaggcagatgtaaagtccctcatggcgaaatataacacggggggcaacccgacagaggatgtctcagtcaatagccgacccttcagagtcacagggccaaactcatcttcaggaatacaagcaagaaagaacttattcaacaaccaaggaaatgccagccctcctgcaggacccagcaatgtacctaagtttgggtccccaaagccacctgtggcagtcaaaccttcttctgaggaaaagcctgacaaggaacccaagcccccgtttctaaagcccactggagcaggccaaagattcggaacaccagccagcttgaccaccagagaccccgaggcgaaagtgggatttctgaaacctgtaggccccaagcccatcaacttgcccaaagaagattccaaacctacatttccctggcctcctggaaacaagccatctcttcacagtgtaaaccaagaccatgacttaaagccactaggcccgaaatctgggcctactcctccaacctcagaaaatgaacagaagcaagcgtttcccaaattgactggggttaaagggaaatttatgtcagcatcacaagatcttgaacccaagcccctcttccccaaacccgcctttggccagaagccgcccctaagtaccgagaactcccatgaagacgaaagccccatgaagaatgtgtcttcatcaaaagggtccccagctcccctgggagtcaggtccaaaagcggccctttaaaaccagcaagggaagactcagaaaataaagaccatgcaggggagatttcaagtttgccctttcctggagtggttttgaaacctgctgcgagcaggggaggcccaggtctctccaaaaatggtgaagaaaaaaaggaagataggaagatagatgctgctaagaacaccttccagagcaaaataaatcaggaagagttggcctcagggactcctcctgccaggttccctaaggccccttctaagctgacagtgggggggccatggggccaaagtcaggaaaaggaaaagggagacaagaattcagccaccccgaaacagaagccattgcctcccttgtttaccttgggtccacctccaccaaaacccaacagaccaccaaatgttgacctgacgaaattccacaaaacctcttctggaaacagtactagcaaaggccagacgtcttactcaacaacttccctgccaccacctccaccatcccatccggccagccaaccaccattgccagcatctcacccatcacaaccaccagtcccaagcctacctcccagaaacattaaacctccgtttgacctaaaaagccctgtcaatgaagacaatcaagatggtgtcacgcactctgatggtgctggaaatctagatgaggaacaagacagtgaaggagaaacatatgaagacatagaagcatccaaagaaagagagaagaaaagggaaaaggaagaaaagaagaggttagagctggagaaaaaggaacagaaagagaaagaaaagaaagaacaagaaataaagaagaaatttaaactaacaggccctattcaagtcatccatcttgcaaaagcttgttgtgatgtcaaaggaggaaagaatgaactgagcttcaagcaaggagagcaaattgaaatcatccgcatcacagacaacccagaaggaaaatggttgggcagaacagcaaggggttcatatggctatattaaaacaactgctgtagagattgactatgattctttgaaactgaaaaaagactctcttggtgccccttcaagacctattgaagatgaccaagaagtatatgatgatgttgcagagcaggatgatattagcagccacagtcagagtggaagtggagggatattccctccaccaccagatgatgacatttatgatgggattgaagaggaagatgctgatgatggctccacactacaggttcaagagaagagtaatacgtggtcctgggggattttgaagatgttaaagggaaaagatgacagaaagaaaagtatacgagagaaacctaaagtctctgactcagacaataatgaaggttcatctttccctgctcctcctaaacaattggacatgggagatgaagtttacgatgatgtggatacctctgatttccctgtttcatcagcagagatgagtcaaggaactaatgttggaaaagctaagacagaagaaaaggaccttaagaagctaaaaaagcaggaaaaagaagaaaaagacttcaggaaaaaatttaaatatgatggtgaaattagagtcctatattcaactaaagttacaacttccataacttctaaaaagtggggaaccagagatctacaggtaaaacctggtgaatctctagaagttatacaaaccacagatgacacaaaagttctctgcagaaatgaagaagggaaatatggttatgtccttcggagttacctagcggacaatgatggagagatctatgatgatattgctgatggctgcatctatgacaatgactagcactcaactttggtcattctgctgtgttcattaggtgccaatgtgaagtctggattttaattggcatgttattgggtatcaagaaaattaatgcacaaaaccacttattatcatttgttatgaaatcccaattatctttac

SEQ ID NO: 3860 - DNA, 1091 bp, Homo sapiens
  source 1..1091: mol_type = genomic DNA
gagccgatgcccgattccgcgcccgccatggccgacaaaatggacatgtctctggacgacatcattaaactgaaccggagccagcgaggcggccggggcgggggccggggccgcggccgggccggctcccagggcggccgcggcggtggggcgcaggccgccgcgcgagtgaatcgaggcggcgggcccatccggaaccggccggccatcgcccgcggcgcggccggcggaggcggcaggaaccgaccggcgccctacagcaggccaaaacaacttcccgacaagtggcagcacgatcttttcgacagtggcttcggcggtggtgccggcgtggagacaggtgggaaactgctggtgtccaatctggattttggagtctcagacgccgatattcaggaactctttgctgaatttggaacgctgaagaaggcggctgtgcactatgatcgctctggtcgcagcttaggaacagcagacgtgcactttgagcggaaggcagatgccctgaaggccatgaagcagtacaacggcgtccctctggatggccgccccatgaacattcagcttgtcacgtcacagattgacgcacagcggaggcctgcacagagcgtaaacagaggtggcatgactagaaaccgtggcgctggaggttttggtggtggtggaggcacccggagaggcacccgcggaggcgcccgtggaagaggcagaggtgccggcaggaattcaaagcagcagctttcggcagaggagctggatgcccagctggacgcctataatgcgagaatggacaccagttaaacagaccagcaaatccgcgtgcggaacaggacccaggcgtctcctcttgctccctggttggggggcggtggctggggctgtgcggccaatgatggatttgtttcttttatgttttaaaataggatttaaaaactcatgtaaaggttttttttttttctttttttttttttttaattctgaaacagacctgttttgtaccgagttatttttgggataaattttactggttgctgttgtggagaaggtggcgtttccaccttttccataataaaatagaaatgtgtgtagaa

SEQ ID NO: 3861 - DNA, 498 bp, Homo sapiens
  source 1..498: mol_type = genomic DNA
gttgtagcagagcctagctaattacccttcataattagaattgtcctatctactacggagtgttatagaccctctttccacaggaggggaagaaagaaagaagccggaatccccctgccatcctatgtctttgcattattgcctcactaccacatatgatcttcagaagaaaacctgaacctgctgacatggccaagcatggagccgacgagccatcctccaggtcagggagtccggacagggaaggtagggcctctgaggacagatcgctgcttcatcagaggctggctgtccgggagctcatcgacactgaggtctcctacttgcacatgctccagctctgtgcctctgacatcaggagccgcctccagcagttgccgcagggagatctggatgtcctgttctcaaacattgatgatatcatcaaagtgaacagcagattcctccatgatctgcaggagacagcctccaaggaagaggaacaagtgcagctagttg

SEQ ID NO: 3862 - DNA, 1155 bp, Homo sapiens
  source 1..1155: mol_type = genomic DNA
acgcctggtgaatggacgcactcttaccaattctgctctgggagatgcagcggtaacctaccgagcgcagaggccggcgcgcacccgtggagcccgcgctcgcgatccctcctcgtgccagggccccagggcagtcaaggcctgccgaccgttaggcgggtcaaggggtacacagggtgcgaattcgttaggcaaaagctgggtacaggcgcgagccacaggcacggaaacctcgcgccgaccggggccctaggcccgacgacggcaggtaaggggaagtggaggcacacagggctgggacgtgccccaggcaccatacgggtggcttcgggcgcgggacgtccgcagccccgcagctcccaggacgttcgacaatctgcagctgaccagcttcggccggtttggggataaagggaagacaggcggcgcggggagtgggaacgcctgaaggccgcgcccctcctttcaggtcggccaggagcgcgccgtttgtttcgacgccggaccgcgtaagagacgatgatgttgggcacggaaggtggagagggattcgtggtgaaggtccggggcttgccctggtcttgctcggccgatgaagtgcagaggtttttttctgactgcaaaattcaaaatggggctcaaggtattcgtttcatctacaccagagaaggcagaccaagtggcgaggcttttgttgaacttgaatcagaagatgaagtcaaattggccctgaaaaaagacagagaaactatgggacacagatatgttgaagtattcaagtcaaacaacgttgaaatggattgggtgttgaagcatactggtccaaatagtcctgacacggccaatgatggctttgtacggcttagaggacttccctttggatgtagcaaggaagaaattgttcagttcttctcagggttggaaatcgtgccaaatgggataacattgccggtggacttccaggggaggagtacgggggaggccttcgtgcagtttgcttcacaggaaatagctgaaaaggctctaaagaaacacaaggaaagaatagggcacaggtatattgaaatctttaagagcagtagagctgaagttagaactcattatgatccaccacgaaagcttatggccatgcagcggccaggtccttatgacaga

SEQ ID NO: 3863 - DNA, 1244 bp, Homo sapiens
  source 1..1244: mol_type = genomic DNA
ctgtggctctgtggtaggggaatgccaccaactccctgaggagcagccgtgtggtatgattggtttttgaaaataaagttaattcagagaaggtaaaactttctcttcggaatttcccacataatgattatgaggatgtttttgaagagccttcagaaagtggcagtgatcccagcatgtggacagccagaggccccttcagaagagacaggtggagcagtgaggatgaggaggctgcagggccatcacaggctctctcccctctactttctgatacgcgcaaaattgtttctgaaggagaactagatcagttggctcagattcggccattaatattcaattttcatgagcagacagccatcaaggattgtttgaaaatccttgaggaaaaaacagcagcgtatgatatcatgcaggaatttatggctttagaacttaagaatctgcctggtgagttcaactctgggaatcaaccaagcaacagagaaaaaaacagataccgagatattcttccatatgattcaacacgcgttcctcttggaaaaagcaaggactacatcaatgctagttatattagaatagtcaattgtggagaagagtatttttatatcgctactcaaggaccactgctgagcaccatagatgacttttggcaaatggtgttggaaaataattcaaatgttattgccatgataaccagagagatagaaggtggaattatcaaatgctaccattactggcccatttctctgaagaagccattggaattgaaacacttccgtgtattcctggagaactaccagatacttcaatatttcatcattcgaatgtttcaagttgtggagaagtccacgggaactagtcactctgtaaaacagttgcagttcaccaagtggccagaccatggcactcctgcctcagcagatagcttcataaaatatattcgttatgcaaggaagagccaccttacaggacccatggttgttcactgcagtgccggcataggccggacaggggtgttcctatgtgtggatgtcgtgttctgtgccatcgtaaagaactgttcattcaacatcatggatatagtggcccaaatgagagaacaacgttctggcatggttcaaacgaaggagcagtatcacttttgttacgatattgtgcttgaagttcttcggaaacttctgactttggattaagaaagacttctgttgcctctcacttgaaattaccaagtgggtttgcac

SEQ ID NO: 3864 - DNA, 3305 bp, Homo sapiens
  source 1..3305: mol_type = genomic DNA
gtggcgggggcgtggccatggcgggggcgctccggcgggggcgggccctgggctcccgcccttcgggtcccacagtttccagccgccgctctcctcagtgcccggtggcccaggagggcctgggagcccgaagccgtccccgagtcgctcctaggtcactggcgcgatgcgggccgtcctctcggctgatgggttggaagcccagcgaggctagaggccagtcccaaagtttccaggcatcagggctgcagcccaggagcctcaaggcggcccggcgggcgactggacggccggacaggtcccgagcagcccggcccaccatggacccctctgcccacaggtcccgagcagccccgcccaacatggacccagacccccaggcgggcgtgcaggtgggcatgcgggtggtgcgcggcgtggactggaagtggggccagcaggacggcggcgagggcggcgtgggcacggtggtggagcttggccgccacggcagcccctcgacacccgaccgcacagtggtcgtgcagtgggaccagggcacgcgcaccaactaccgcgccggctaccagggcgcgcacgacctgctgctgtacgacaacgcccagatcggcgtccggcaccccaacatcatctgtgactgctgcaagaagcacgggctgcgggggatgcgctggaagtgccgtgtgtgcctggactacgacctctgcacgcagtgctacatgcacaacaagcatgagctcgcccacgccttcgaccgctacgagaccgctcactcgcgccctgtcacactgagtccccgccagggcctcccgaggatcccactaaggggcatcttccagggagcgaaggtggtgcgaggccccgactgggagtggggctcacaggatggaggggaagggaaaccgggccgtgtggtggacatccgtggctgggatgtggagacaggccggagtgtggccagcgtgacgtgggctgatggtaccaccaatgtgtaccgtgtgggccacaagggcaaggtggacctcaagtgtgtgggcgaggcagcgggcggcttctactacaaggaccacctcccaaggctcggcaagccggcggagctgcagcgcagggtgagtgctgacagccagcccttccagcacggggacaaggtcaagtgtctgctggacactgatgtcctgcgggagatgcaggaaggccacggcggctggaaccccaggatggcggagtttatcggacagacgggcaccgtgcatcgtatcacggaccgcggggacgtgcgcgtgcagttcaaccacgagacgcgctggaccttccaccccggggcgctcaccaagcaccactccttctgggtgggcgacgtggtccgggtcatcggcgaccttgacacagtgaagcggctgcaggctgggcatggcgagtggacggacgacatggcccctgccctgggccgcgtcgggaaggtggtgaaagtgtttggagacgggaacctgcgtgtagcagtcgctggtcagcggtggaccttcagcccctcctgcctggtggcctaccggcccgaggaggatgccaacctggacgtggccgagcgcgcccgggagaacaaaagctcactgagcgtggccctggacaagcttcgggcccagaagagtgacccagagcacccgggaaggctggtggtggaggtggcgctgggtaacgcagcccgggctctggacctgctgcggaggcgcccagagcaggtggacaccaagaaccaaggcaggaccgctctgcaagtggctgcctacctgggccaggtggagttgatacggctgctgctacaagccagggcgggcgtggacctgccggacgacgagggcaacacggcactgcactacgcggccctggggaaccagcccgaggccaccagggtgctcctgagtgctgggtgccgggcggacgccatcaacagcacccagagcacagcactgcacgtggccgtgcagaggggcttcctggaggtggtgcgggccctgtgtgagcgcggctgtgacgtcaacctgcccgacgcccactcggacacgcccctgcactccgccatctcggcgggcactggagccagcggcattgtcgaggtcctcacggaggtgccaaacatcgatgttaccgccaccaacagccagggtttcaccctgctgcaccatgcctccctcaagggtcacgcgctagctgtgagaaagattctggctcgggcgcggcagctggtggacgccaagaaggaggacggcttcacggcgctgcatctggctgccctcaacaaccaccgcgaggtggcccagatcctcatccgggagggccgctgtgacgtgaacgtgcgcaaccggaagctgcagtccccgctgcatctcgccgtgcaacaggcccacgtggggctggtgccgctactggtggacgctgggtgcagtgtcaacgccgaggacgaggagggggacacagccctgcacgtggcgctgcagcgtcatcagctgctgcccctggtggctgatggggccgggggggacccagggcccttgcagctgctgtccaggctacaggcctcgggcctccccggcagcgcggagctgacggtgggcgcggcggtcgcctgcttcctggcgctggagggcgccgacgtgagctacaccaaccaccgcggtcggagcccgctggacctggccgccgagggtcgcgtgctcaaggcccttcagggctgcgcccagcgcttccgggagcggcaggcgggcgggggcgcggccccgggccccaggcaaacgctcgggacccccaacaccgtgacgaacctgcacgtgggcgccgcgccggggcccgaggccgctgagtgcctggtgtgctccgagctggcgctgctggtgctgttctcgccgtgccagcaccgcaccgtgtgtgaggagtgcgcgcgcaggatgaagaagtgcatcaggtgccaggtggtcgtcagcaagaaactgcgcccagacggctctgaggtggcgagcgccgcccccgcccccggcccgccgcgccagctggtggaggagctgcagagccgctaccggcagatggaggaacgcatcacctgccccatctgcatcgacagccacatccgcctcgtgttccagtgcggccacggcgcatgcgccccctgcggctccgcgctcagcgcctgccccatctgccgccagcccatccgcgaccgcatccagatcttcgtgtgagccgcgccgtccgccgcgcccgagctgccttcgcgtgcccccgccctgtgttttataaaaagaaagattctcgga

SEQ ID NO: 3865 - DNA, 2044 bp, Homo sapiens
  source 1..2044: mol_type = genomic DNA
gtctcctcgctgtcgccgccgctgccacaccatggccttcgtcaccaggcagttcatgcgttccgtgtcctcctcgtccaccgcctcggcctcggccaagaagataatcgtcaagcacgtgacggtcatcggcggcgggctgatgggcgccggcattgcccaggaaagaggttggcctcagcagcaatgagggataattctttcaagaaaggaatgaagagagaagttagatggaaaagagatttttaaggtcaaaagaagcagctgaagaacatgtgtaggacagccttaggagttactacacttcaagacctgggtgtctgctggaggaaggaacatgaccctgcggagatgttaagggttgggagagctgagcttggaggctggaagcccagctgggaggctattgttaaagaggttgctgcagcaactggtcacacagtagtgttggtagaccagacagaggacatcctggcaaaatccaaaaagggaattgaggaaagccttaggaaagtggcaaagaagaagtttgcagaaaaccttaaggccggcgatgaatttgtggagaagaccctgagcaccatagcgaccagcacggatgcagcctccgttgtccacagcacagacttggtggtggaagccatcgtggagaatctgaaggtgaaaaacgagctcttcaaaaggctggacaagtttgctgctgaacatacaatctttgccagcaacacttcctccttgcagattacaagcatagctaatgccaccaccagacaagaccgattcgctggcctccatttcttcaacccagtgcctgtcatgaaacttgtggaggtcattaaaacaccaatgaccagccagaagacatttgaatctttggtagactttagcaaagccctaggaaagcatcctgtttcttgcaaggacactcctgggtttattgtgaaccgcctcctggttccatacctcatggaagcaatcaggctgtatgaacgaggtgacgcatccaaagaagacattgacactgctatgaaattaggagccggttaccccatgggcccatttgagcttctagattatgtcggactggatactacgaagttcatcgtggatgggtggcatgaaatggatgcagagaacccattacatcagcccagcccatccttaaataagctggtagcagagaacaagttcggcaagaagactggagaaggattttacaaatacaagtgatgtgcagcttctccggctctgagaagaacacctgagagcgctttccagccagtgccccgagtgcctgtgggaatgctctttggtcagacattccctcacacagtacagtttaataaatgtgcattttgattgtaatctatcgaagtgattattacaccagttacagcagtaatagattctccattaagaaataattcccttttttagtctgttcatttctgtgtattttctaaacagctttacacccttggtgccttggagcaaacatgttttttgaaccttgtcatttttgtgaagaattgcctagattccttctctcatcaacgggaaagtacttcctctgagagtgcgagtgcaccatgctcactgttgctgcgtgggagagtcacaagccactggcaagcaagtggtatagtctgtgaagcactgcagcgagcagcacctggatcttgcctttataagaacattttactacctgcagctttgagtcttgccctacattttgggcatgacataagatgtgtctttattcagctcgtcgtgaagatgctgctgctgaatgggtcagcatatctctgtttgcatggtttgcaggaggtcggttttcatggtcattcagttccacagatctgaatgattactgtctgtctgtgtcttttttccatgagaaatcactgttgcaaattgcctataaattgactctactaaaataacaatgtttcagtctgaaaatttgaattgaaaaaaatgtataatataaaattgtaatacactcaaatgattataaaagtaaaagttggtaatttaggcagaa

SEQ ID NO: 3866 - DNA, 2302 bp, Homo sapiens
  source 1..2302: mol_type = genomic DNA
aaggatctgcttagaaaccaaagctccagccgagtgtttcttttcccctacatttttagtgattcccttctgttgatgcctttgaaagctcggagaaataaatacgtttattgttatgctgttagaaaacaagttcatgcttgtcctctaaagataagtggtcttttcattctactttttgttttgtagtaagagccataaaatttgcaatcgcaagtttatgttgttatacttagttacccaaggggtagttttaagcatttttattcatatgaatatttgaatataaatgtgtgttcaaatatatagaatcgttcttatattccacatttttaatatttaaactattcacaatatcttttaatgatgtttaaagaacggcagtgtagagatactgttgtcagatttgtgaggtgagcacacgttgatattgccagtttcgcttttgtttatcaattcaataagcactgctttttaaaacacgtgttgaagcttcaggtttgcacagaagttcattttcaggaattcctaactaataaagggtatcagacacgttcttacagttttgaacataaatactgcagttagcatatgtagtgggatatttgtgtggtgaaagtgcctccatatttcatatcttttctttgaaacaagattctgttcagtatgcattaagtggtagttattttttaacttcctgttacatacgtaaatttcataaggaaaggaaatttggggagtcgttacagcttttctccctttaatcacagcgtacctgtccattgctcacattgttttcagaaaaaaaagttgtatctcagctggatatctgacttgactttagtaatgggcctagaaactataaactgaacaaagcttataatgcacaaaaacaggataagtacatttgggggacaatatcttactggcaagtaactggagtttcaccaggcgtgtagcaggtgggatcaattttctaaaacggaagatgatctaagatgcatattttataggcgttctcctaagcagtgctaattctacatgttttaattgctggtagatgcgtttccagaacgaggatgccatttacagcgagtgttaaaaaaaacgttggatgatgaaatacacattgcagaaaaaggatgaagttgaccagtgaaaagttgcccaagaaccccttttatgcctctgtatctcagtatgctgctaaaaaccaaaaatttttccagtggaaaaaggaaaagactgattacacccatgctaatttggtggataaggcattgcagctcttgaaggaaagaatactgaaaggagacactctggcatatttcctacgaggtcaactatattttgaagagggatggtatgaagaagcattagaacagtttgaagaaatcaaggagaaagaccatcaagcaacttaccagctaggagtgatgtactatgatgggctggggaccactctagacgctgagaaaggggtggactatatgaagaaaattcttgattctccatgtcccaaagcaagacacttaaaatttgcagctgcttacaacctcggaagagcttattatgaaggaaaaggtgttaaacgatcaaatgaggaagctgaaagactgtggcttatcgcagcagacaatggaaatcccaaagctagtgtgaaggctcaaagtatgctcgggctgtattactcaaccaaggagcccaaggagttagaaaaggcattttactggcattccgaagcatgtggcaatgggaatctggagtcccagggtgcacttgggctcatgtacttgtatggacaaggcatccggcaggatacggaagctgccctgcagtgcttaagagaagcagcagaacgcggaaacgtctatgctcaagggaatctcgtggagtattactataagatgaaattttttacaaagtgtgttgcattttccaaaaggatcgctgactatgatgaggttcacgacatccccatgatcgcccaggtcacagactgtctcccggagttcatcggcagaggcatggcaatggcatccttctaccacgcaaggtgtcttcagcttggcttgggcatcaccagggatgaaacaaccgctaaacactattattctaaagcttgtcgtctgaatcccgcattggcagatgaacttcactccttacttattcgtcaaagaatttagaccacaatgtatttcaacaaagatcatcaatgctaacacctcacaatgtgtgtatttttacagtagctatgtttggttattttgcacatcacaaattacactatcctgggtatttt

SEQ ID NO: 3867 - DNA, 1945 bp, Homo sapiens
  source 1..1945: mol_type = genomic DNA
ctctcgtggagtccgagcagctgcttcagggaggcccgggagcccctagggcgggcagccccggagcctgcagctgcgacgcagactcggaaactacaactgcgcgtgaagccgactaaagttaacgcctgtgtgattgagtcagaagctccttcaggaacacaggagtggggccgactcctggaatccggccccgggtcgcttataaatgcgccaagaaaaaaacgtcacccagtaattttttttctcatatgtagatacaaaaggatattcttaaaatttttatagagacagggtcttgctgtgttacccaggctggtctcacactcctggcctcaagtgaccctcctgtctcagcctcccaaagtgctaggattataggcgtgaaccaccacgcccagctggttcctgaggaagtcagtgtgggaatactttttttttttttatacggagtctcgctctgtcacccaggctggagtgcagtggcacgatctcggctcactgcaagctccatctcccaggttcacgccattctcccgcctcaacctcccgagtagctgggactacaggtacccaccaccacgcccagctaattttgtttgtgtatttttagtagagacgggatttcactgtgttagccaggatggtctggatctcctgaccttgtgatctgcctggctcagcctcccaaagtgctgggattacaggcatgagccaccatgcccagcccactgtgggaatacttgtgttgagcacttgctgtgtgttctgaataggacaaccagggtccaccccttctctctgggcttgttgagaagaggggtgcccagcctgacagtgatgggacagggaggcttcagtgccatttggccatgtgagcagtgttagtctgaggtacacatcatattgcctacagccttctttcctgtgtgtctgttaacatttccaaacctacactccgtgacatccagcctcacagcttacatcacagcttaatgtcctggcatttaagagacccagcgttctgttttccccgcagtaagctgcacatagtcatagcgaatttgggaaagatggaaggaatcatccagcctcgcggttcagagcccagctctgccactgtcagccatgcaagcctcagttttcccatctgtaacatggggagaacagcactgctcagcccagagggccactgcagagattctgagagagaacgtaggaagcgctgctcggcacgacctgcacacggggaggcctggcgctgcagcgggcaccctcatcaccatagggaaggcccagctgcctccggggaggcccgttctcctaggcagggtgttggaaaggggttggcctctctgctgctttctgggagagccaaggccacccctctggggtactgacagggcatgccttgtctccagtggttccccaggtggggccctgccctaccctctcctctgacctccactcactcatccctttggcccacaggtacatgtggggggcagcctggccgtccttggggggaagctgtacgtctctgggggatacgacaatacatttgaactctcggacgtggtagaggcctatgacccagagactcgcgcgtggagcgtggtggggcggctcccagaacccaccttctggcatggcagtgtcagcatcttccgccagttcatgccccagaccttctcgggtgggcgtggcttcgagttggacagtggcagcgatgacatggacccaggccgaccccggccgccgcgggaccccgatgagctgcactagccccagtctggcccggcacgggcctcggtgcaggtaactggcacctctgcggggcagtgccccactcctttgtgcacaaggacacgttgggctcacaggaggagcacaggctcttgggtggcgaagccagcccaggatccattacctggaaggtttctgt

SEQ ID NO: 3868 - DNA, 1401 bp, Homo sapiens
  source 1..1401: mol_type = genomic DNA
ctgtggctctgtggtaggggaatgccaccaactccctgaggagcagccgtgtggtatgattggtgaacaaaaattgtttgctggcccccaggatactaactagacctttggcctgactcacaggacactaaggctccttttctgaagaagccttttaccagtctcatttaggggatgggaacaacatgtcttcacctagggactttagagcagagcctggtttttgaaaataaagttaattcagagaaggtaaaactttctcttcggaatttcccacataatgattatgaggatgtttttgaagagccttcagaaagtggcagtgatcccagcatgtggacagccagaggccccttcagaagagacaggtggagcagtgaggatgaggaggctgcagggccatcacaggctctctcccctctactttctgatacgcgcaaaattgtttctgaaggagaactagatcagttggctcagattcggccattaatattcaattttcatgagcagacagccatcaaggattgtttgaaaatccttgaggaaaaaacagcagcgtatgatatcatgcaggaatttatggctttagaacttaagaatctgcctggtgagttcaactctgggaatcaaccaagcaacagagaaaaaaacagataccgagatattcttccatatgattcaacacgcgttcctcttggaaaaagcaaggactacatcaatgctagttatattagaatagtcaattgtggagaagagtatttttatatcgctactcaaggaccactgctgagcaccatagatgacttttggcaaatggtgttggaaaataattcaaatgttattgccatgataaccagagagatagaaggtggaattatcaaatgctaccattactggcccatttctctgaagaagccattggaattgaaacacttccgtgtattcctggagaactaccagatacttcaatatttcatcattcgaatgtttcaagttgtggagaagtccacgggaactagtcactctgtaaaacagttgcagttcaccaagtggccagaccatggcactcctgcctcagcagatagcttcataaaatatattcgttatgcaaggaagagccaccttacaggacccatggttgttcactgcagtgccggcataggccggacaggggtgttcctatgtgtggatgtcgtgttctgtgccatcgtaaagaactgttcattcaacatcatggatatagtggcccaaatgagagaacaacgttctggcatggttcaaacgaaggagcagtatcacttttgttacgatattgtgcttgaagttcttcggaaacttctgactttggattaagaaagacttctgttgcctctcacttgaaattaccaagtgggtttgcac

SEQ ID NO: 3869 - DNA, 4569 bp, Homo sapiens
  source 1..4569: mol_type = genomic DNA
ggccggggcaggggcctctggctcccgacactggccgagaggtgggttccggggcgggtcgctgctccttgaagccgggcggggacgcgctgcccccgccctgcctccctgtggtccacaccccctttgggctccggagccgctgggcaggaatagtccggggtgcgcgcgagcaggcgctgccaaccccacttctgcccgggattccaatctgaggagcaggaggaccggggcgccggtgtcctgccgcctccttctccttgctctcacctgcgcctattagtccacgcgccttcaaggccaggggctacagcccagacagagaggggacagcagagggagagagagcacctgaggatacagagctggcactggactgccttttcaccccccaggtgatgagtgaggttcgaagaacggaagatttaaaaagcagccggggcctccgtattgaatgaaagacccagtgcaaagacatcaccatgaacactagcattccttatcagcagaatccttacaatccacggggcagctccaatgtcatccagtgctaccgctgtggagacacctgcaaaggggaagtggtccgcgtgcacaacaaccacttccacatcagatgcttcacctgtcaagtatgtggctgtggcctggcccagtcaggcttcttcttcaagaaccaggagtacatctgcacccaggactaccagcaactctatggcacccgctgtgacagctgccgggacttcatcacaggcgaagtcatctcggccctgggccgcacttaccaccccaagtgcttcgtgtgcagcttgtgcaggaagcctttccccattggagacaaggtgaccttcagcggtaaagaatgtgtgtgccaaacgtgctcccagtccatggccagcagtaagcccatcaagattcgtggaccaagccactgtgccgggtgcaaggaggagatcaagcacggccagtcactcctggctctggacaagcagtggcacgtcagctgcttcaagtgccagacctgcagcgtcatcctcaccggggagtatatcagcaaggatggtgttccatactgtgagtccgactaccatgcccagtttggcattaaatgtgagacttgtgaccgatacatcagtggcagagtcttggaggcaggagggaagcactaccacccaacctgtgccaggtgtgtacgctgccaccagatgttcaccgaaggagaggaaatgtacctcacaggttccgaggtttggcaccccatctgcaaacaggcagcccgggcagagaagaagttaaagcatagacggacatctgaaacctccatctcaccccctggatccagcattgggtcacccaaccgagtcatctgcgctaaagtggataatgagatccttaattacaaagacctggcggctctccccaaggttaagtctatctacgaggtacaacgccccgacctcatttcctatgagcctcattccagatacatgtccgacgagatgctggagagatgtggctatggagagtcgctgggaacattatctccctactcccaggacatctacgagaacctggacctccggcagagacgggcctccagcccggggtacatagactcccccacctacagccggcagggcatgtcccccaccttctcccgctcacctcaccactactaccgctctgggcccgagagtggccggagctctccataccatagccagttagatgtgaggtcctccactccaacctcttaccaggctcccaagcactttcacatcccagctggagacagtaacatctaccggaaacccccgatctacaaacggcatggtgatttgtctacagcaaccaagagcaaaacaagtgaagacatcagccagacctccaagtacagtcccatctactcgccagacccctactatgcttcggagtctgagtactggacctaccatgggtcccccaaagtgccccgagccagaaggttctcgtctggaggagaggaggatgattttgaccgcagcatgcacaagctccaaagtggaattggccggctgattctgaaggaagaaatgaaggcccggtcgagctcctatgcagatccctggacccctccccggagctccaccagcagccgggaagccctgcacacagctggctatgagatgtccctcaatggctcccctcggtcgcactacctggctgacagtgatcctctcatctccaaatctgcctccctgcctgcctaccgaagaaatgggctgcacaggacacccagcgcagacctcttccactacgacagcatgaacgcagtcaactggggcatgcgagagtacaagatctacccttatgaactgctgctggtgactacaagaggaagaaaccgactgcccaaggatgtagacaggacccgtttagagcgccacctgtcccaggaagagttctaccaagtctttggcatgaccatctctgagtttgaccggctggccctctggaagaggaatgaactgaagaagcaagcccggctgttctaggcagaggctctataaatatatatgcatttatataaagatatatgtaaaatctctctactgaagctcggtataatcctctcttgtgtaatgggacacactgcctgccatgagacttgcttttctgtactgtcaggcaagcccacgtcatcgagatatttttatgctccttactttctcttttctaagtgctgtgggatctgggaagggatttgaggggactctgtccttttattggggatcctttttatactgaaacatctgtcctaacttgagtgccccaaggtccaactctctttcctaaagaaggtgcctgaagaagtctctcttctctctgcttcgtggcccctttcttaaatttctagggctgatgctgaccatgtggtttccacaccttattggccccagaggggccctcccatgggaagatctgcagcagtctccccaaatcagtgagcacctttgagcgcccacgaagaactttctcaacacccccaattaggagctcagtgctctcttggggcaatgcagttaaaagggtgagcctcaaatctagtcattacaccagtcaacagaagtggacagggcctaggcctctcctcagctccttaaccctcctccttctgccctggattgtaacctctcccttgtccaaatctaggattcctggtaggaaaaggaaaaggcccttcccttccctccaccacttccaactggcccctttgcctgacctggacttggagaaccagaggaaaagagagggagcggaagtgggagatggagcagggcacctgttagaatcagagctgcaggatttcttgggaccctcctctctccctcactgctcccagcacctcctgacccttccctctttcaaggagaagcccatgattgcagcttgtattctttagccttattacaatctatgtgcctgacaactcaacacaccgcagggctaatgttcccaccagagctccaactgaacaaccagacagacaactctcatcatcctccagagagaaaataggccgtgtctcaaagaaaggttcttggtctatgcctctggtctgtgggctggcagggcaaccataccatacccccgccagtcctcggctcctgctgcaaagttggccatgtttcacagggaaacttttggaagagtggctgcttatgagattccaaaatgaagtgttggccaacaccgctcatggccatcctggattttcccagtggcttcccttcctgctcgcctccctgaacaggggagaaagcttaacctctcttctcctctccaaacctttcaccttgaatgggtaatgtttggtgggggctgttccttcttggagaagccttgagtcggaccattttgagatcatggaggaaggatgaagaagtgaaaatgacaataatgactctcaagaggctggcgatgtgacatggcaaatgtagaactgacttaaattgaacaaaccctcactgagcacctctgatgttgagcacctgctgaatactgagcactgaatgggggagggggaggggagcacggggtgagtcaacctgggactcggtctcagggatatgcctaccaatagcgggtatcgtaaggcatgtacccaaacataacggatgtaaggcagaaagtgatcggagaaggaatgagaaagtgtgcgtgatgttaatgaaaagtcatatgcagctagagcagacccaggaaagctttctggaagagattgcatctgaggaaattcaggaaggatctttgtagattggggggagattctaaattgaaggggtgatggggtgaggggccagagggaagtctgctgtgttctcatgtaggatgtcagccctccctgcaacttctctttttggccaatgtcttttcactttcctgaccctttagaatcatccccagccagacgcaatcatggaagttgccttattgtcactggttaagaacttggcgagattgaagggcttttgttattgttgttggatatttttgtttcccataaaagcacatcatttcaaccctaaa

SEQ ID NO: 3870 - DNA, 443 bp, Homo sapiens
  source 1..443: mol_type = genomic DNA
tgtcaggttgccgtctaggtagcggttgtgcttgctgaggctgcacttgctgacactgcagctgcgacgcggctaagaggcgcagagcgaggagtcgggatttggtcgcgagcggcgacgagcatttgtgcagaatgtcatcagatgaggagaaatactcacttccagttgtgcaaaatgactccagtcgaggcagttctgtctcttcgaatcttcaggaaataactctgaagtaagagaaactgcaatagaagttggaaaaggatgtgatttccatatttcaagtcattcaaagacagatgagtcatcaccagtgttatcgccaaggaagccttctcacccagtcatggattttttcagttcacatcttttagctgactcttcctcaccagcaacaaattctagtcatacagatgcccatgaaatacttgtgagcgattttc

SEQ ID NO: 3871 - DNA, 1674 bp, Homo sapiens
  source 1..1674: mol_type = genomic DNA
gcgggacggagcttggctgttggtcggtgggttcccgtgcggcggcggccaaggaggaggagacacagttggagcagctccgtgggctgactggggcgaggcctcagcagcgcgagcttgagtgcggccgagcctgcggcgccttcccctgcgggtggggacgagcgggccccgcggcgtcatcggcggcgaggtgagcggcggccggcgggcgggagctctggcgggagccgcgccggcctgacgcgctgtcgccgctggttgcaggagccgccgcgcctcggcctagcatgtcggaagcgggcgaggagcagcccatggagacgacgggcgccaccgagaacggacatgaggccgtccccgaaggcgagtcgccggccggggctggcacgggcgccgcggcgggggctggaggcgcgaccgcggcgcccccgagcgggaatcagaacggcgccgagggcgaccagatcaacgccagcaagaacgaggaggacgcgggaaaaatgttcgttggtggcctgagctgggatactagcaaaaaagatttaaaagactattttactaaatttggagaggtcgttgactgtacaataaaaatggatcccaacactggacggtcaagagggtttgggtttatcctgttcaaagatgcagccagtgtggagaaggtcctagaccagaaggagcacaggctggatggccgtgtcattgaccctaaaaaggccatggctatgaagaaggacccggtgaagaaaatcttcgttgggggtctgaatcctgaagccactgaggaaaagatcagggagtactttggcgagtttggggagattgaggccattgaattgccaatggatccaaagttgaacaaaagacgaggttttgtgtttatcacctttaaagaagaagaacccgtgaagaaggttctggagaaaaagttccatactgtcagtggaagcaagtgtgagatcaaggtggcccagcccaaagaagtctatcagcagcagcagtatggctctgggggccgtggaaaccgcaaccgagggaaccgaggcagcggaggtggtggtggaggtggaggtcagggtagtacaaactacggcaagagccagcgacgtggtggccatcagaataactacaagccatactgaggcggcagcaggagcgaccaactgatcgcacacatgctttgtttggatatggagtgaacacaattatgtaccaaatttaacttggcaaactttctattgcctgtcccatgtgcatcttatttaaaatttcccccatggaaatcactctcctgttgactatttccagagctctaggtgtttaggcagcgtgtggtgtctgagaggccatagcgccatcatgggctgatttttattaccaggtcccccagaagcaggtgggaggctctgcttcctgctgccgctctgcagcctggacctgtggaccctggttgtaaagagtaaattgtatcttaggaaaccagtgtcacctttttttcaccttttaattttatattatttgcgtcatacatttcctgtaacggaagtgttaattttactgtactttttggtaccttttgggaatctaatgtattgtaaggtattttacacgtgtcctgattttgccacaacctggatattgaagctatccaagcttttgaaataaaat

SEQ ID NO: 3872 - DNA, 549 bp, Homo sapiens
  source 1..549: mol_type = genomic DNA
tttccttaccaatcggctgccatccgaggagctgaggaagcctagagctctcagaagcagtcctttgagctggtgtagggcggtgtttctccaactgggctcgtggcacttttctggacaccactccaaacaaaattagactctgagcactcagaatggtccagcgtttgacataccgacgtaggctttcctacaatacagcctctaacaaaactaggctgtcccgaacccctggtaatagaattgtttacctttataccaagaaggttgggaaagcaccaaaatctgcatgtggtgtgtgcccaggcagacttcgaggggttcgtgctgtaagacctaaagttcttatgagattgtccaaaacaaagaaacatgtcagcagggcctatggtggttccatgtgtgctaaatgtgttcgtgacaggatcaagcgtgctttccttatcgaggagcagaaaatcgttgtgaaagtgttgaaggcacaagcacagagtcagaaagctaaataaaaaaatgaaacttttttgagtaataaaaatgaaaagacgc

SEQ ID NO: 3873 - DNA, 7960 bp, Homo sapiens
  source 1..7960: mol_type = genomic DNA
agtgccctgggacacctcttcagtccgtggactttcccgctgcacactgccctccgaagtcggggacgcgggctcgtgagatggaagattttcgaggtatagcagaagaatcatttccaagctttctcaccaattcattatttggtaacagtgggattttggaaaatgtcactctttcttcaaatcttggcttgcctgttgctgtttctacacttgctagggatagatccagcactgataacaggtatcctgatatccaggcatcttacttagtagaagggagattttcagttccatccgggtcatctcccggaagccagagtgatgctgaaccaagagagaggttacagcttagcttccaggatgatgattctatctctaggaaaaagagctatgtggaaagtcaacgtttgtcaaatgctctcagcaaacagtcagctttacaaatggagacagcaggaccagaagaggagccagccggagctacagaatccttgcagggccaagatctcttcaacagggcttcaccactggaacaagcacaagactcacctattgattttcatttacagtcatggatgaataataaggaacccaagattgttgtgcttgatgctggaaaacattttgaagacaagactctaaagagtgacctaagccacactagcttattagaaaatgagaaacttatcttaccgacaagcttggaagattcttctgatgatgatattgatgatgaaatgttttatgatgatcatttggaggcttattttgaacaactggcaattccaggaatgatatatgaagacctagaaggaccagaacctccagaaaaaggttttaagttacctacaaatggtcttagacaggcaaatgaaaacggtagcttaaactgcaagtttcaatcagaaaataacagctctctgatttccctcgactcacactcttctgaaacaactcacaaagagtctgaggaaagccaagttatttgtctacctgggactagtaattctataggtactggagatagtagaaggtacacagatggtatgttaccattttcctctggtacttggggaactgagaaagaaatagaaaatttgaagggtattgttccagatcttaacagtgaatgtgcaagtaaagatgttctggtgaagaccctcagggctattgatgtgaaacttaactctgataattttcatgatgcaaatgccaatagaggtggttttgatctgactgaccctgtaaaacagggggcagagtgtcctcaccaaaataagacagttttgcacatggatggatgtttagacactgagactcctacggtgtccattcaagaaaatgtggatgtagcctctttgaagcccattagtgacagtggaattaatttcactgatgccatttggtcaccaacttgtgaaaggcgaacatgtgaatgtcacgagtccatcgaaaagaataaagacaaaacagatctcccacagagtgtggtctatcaaaatgaagagggtaggtgggtcacagaccttgcctattacacatcttttaatagcaaacaaaatttaaatgtgtctctaagtgatgagatgaatgaagacttcagatctggttctgaagcatttgatttgattgcacaagatgaagaagaatttaataaagagcatcaatttatacaggaagaaaacatagatgctcataatacttcggttgcactgggcgatacgtcctggggagctacaattaattacagtctgttgaggaaatcacgtagcacatcagatttggataaagatgatgccagttatttacgtctgtctttaggagagttctttgctcaaagatctgaagctcttggttgccttggtggtggtaacaatgtgaaaagaccatcatttggctattttattagatcaccagagaagagagaacctattgccttaataagaaaatctgatgtatcaagaggtaatttggaaaaagaaatggctcatcttaaccatgatctatattcaggagatttaaatgaacagtcccaggcacagctaagtgaaggatcaattacacttcaggttgaagcagtagagagtacttcacaagtggatgaaaatgatgtgacgttaacggctgataaaggcaaaacagaggacactttcttcatgagcaacaaaccccaaagatacaaagacaagctaccagatagtggtgattctatgcttaggatcagcaccattgcttcagccattgcagaggcatcagttaatactgatccttcccaacttgctgcaatgatcaaggcactttcaaataaaaccagagacaagacttttcaggaagatgagaaacaaaaggactattctcatgtgcgtcatttcttacctaatgatttagaaaaaagtaatggatccaatgcacttgatatggagaaataccttaaaaaaacagaagttagtagatatgaaagtgcattggaaaacttttcaagggctagtatgtctgatacttgggatttatctttgcccaaagaacaaactactcaagacattcatccggtggacttaagtgctactagtgtaagtgtgagggcaccagaagaaaacacagcagctattgtttatgttgaaaatggagagagtgagaatcaagagtcatttagaaccataaactcctcaaattcagttacaaatagagagaataacagtgcagtagttgatgtgaagacatgttccattgacaacaaattacaagatgttggtaacgatgaaaaagctacctcaatttccactccatctgatagttattcatcagtgaggaaccccagaataacatccctttgtctgttaaaagactgtgaagaaatacgagataacagagaaaatcagaggcaaaatgagtgtgtcagtgaaataagcaacagtgagaagcatgtgacttttgaaaaccatcgcatagtctcacctaaaaatagtgatttgaaaaatacctctcctgagcatggtggacgtggctcagaggatgagcaggagagcttcagaccttccacgtcaccactgagtcattcttctcctagtgaaatttctggaacgagttcatcagggtgtgcgttagagtcctttggttcagcagctcagcagcagcagcctccctgtgagcaggagttgtctcccttggtgtgctcgcctgctggggtgagcaggctgacgtatgtgtctgaaccagagagctcctatcctaccacagccacagatgatgccctggaggaccgcaagagtgatatcaccagcgagttgagtaccacaattattcaaggcagtccagccgcattggaggaacgggctatggaaaaattgagagaaaaagttccatttcagaatagaggaaaaggaacattatcatctattatccagaataactctgatacaagaaaagcaactgaaactacttctctgagtagcaagcctgaatatgtaaaacctgactttagatggagtaaagatccttcctccaaaagtggaaatctgttggaaaccagtgaggtaggttggacatcaaaccctgaggaattggacccgatcaggctggctctcctgggcaagtcaggtctgagctgtcaggtggggtcagccacatcacaccctgtgtcctgccaggagcctatagatgaagatcaaagaataagtcctaaagataagtcaactgctggccgtgagttcagtggccaggtttctcatcagaccacctctgaaaaccagtgtactcctattcccagcagcacagttcacagctctgtggctgacatgcagaacatgcctgctgctgtgcacgcactcttgacacaaccctctctcagcgctgctccttttgctcagcggtatttgggaacactcccttcaactggaagcaccaccttgcctcagtgccatgctggcaatgccacagtctgtggcttctcaggaggccttccctatccagctgttgcaggagagcctgtgcagaactctgtggctgtgggaatttgtctaggatcaaatatcggctctggatggatgggtacctcttccctctgtaacccatattctaataccttaaatcagaacctgctaagcacaacaaaaccttttcctgtgccgtctgttggtacaaactgtggaattgaaccatgggattcaggagtgacatcaggattggggagtgtccgagtgcccgaggagttgaagcttcctcatgcttgctgtgtcgggatcgcttcccagaccctcctcagtgtgcttaatccaactgaccgctggctgcaagtcagcattggggtcctcagcattagtgttaatggtgaaaaggtggatctttcaacatatcgttgtttagttttcaagaataaagccatcataagacctcatgccacagaagagataaaagtgctttttataccatccagtcctggggttttcagatgcacattcagtgttgcttcttggccatgttcgacagatgctgagaccatcgtacaggcagaagctttggccagcaccgtcactctcactgccattgccgagagtcctgttattgaggtagaaacagaaaagaaagacgttcttgattttggtgacttgacttatggaggctggaaagccctcccactaaaattgataaaccgaacgcatgccactgtgccaattagactgattattaatgctaacgctgtagcctggcgctgtttcacgttttccaaggaatccgtccgagctcctgtggaagttgctccttgcgctgatgtggtcactcggctagcaggcccttctgtggtcaaccacatgatgcctgctagttatgatggacaggatccagaatttctgatgatttgggttcttttccatagtccaaagaaacagatcagctcttcagatattctggactcagcagaagaattctcggcaaaagttgatatcgaagttgacagcccaaaccctacgcccgttcttagaagtgtgagtctccgagcaagagcaggaatagctaggatccatgctcccagggacttgcagacgatgcatttcttggccaaagtggcttcctcaagaaagcagcacttacctttgaaaaatgctgggaacattgaagtttatttggatatcaaggtcccagaacaaggaagtcacttttcagtggatccaaagaatctactccttaaacctggagaagaacatgaggttattgtttcatttactccaaaggatcctgaagcctgcgaggaaaggatcttgaaaatatttgtgcagccatttggacctcagtatgaggtagtgttaaaaggcgaagtcatttcttcaggaagtaaacctctgtcacctggaccttgcttagatattccatcgattttgtccaacaaacaatttctggcttggggaggagtccctctaggtagaacacagcttcagaaactagctttaagaaataattctgcatctacaactcaacatttacgactgcttattagaggacaagatcaggactgctttcagcttcagaacacttttggttcagaacagcgattgaccagtaactgtgagatcagaattcacccaaaggaagacattttcatctctgtattatttgcacctactcgattatcttgcatgttggctagactagaaatcaaacaacttggaaatcgatcacaaccaggcattaagttcacaatacctttgtctggatatggaggaacaagcaatcttattttggaaggcgttaaaaaattatctgacagttacatggtaacagtgaatggcttagtacctggcaaagaaagtaaaattgttttttctgtccgcaacactggctcccgagcagcttttgttaaagcagtaggttttaaggattctcagaaaaaagttttgctggatcctaaagtattgaggatttttccagataaatttgtactcaaggaaagaacacaagaaaatgttactttaatatataatccatcagacagaggaatcaataataaaactgcaacagaactatcaactgtatacttatttggtggagatgaaatttcaagacagcagtatcgcagggccctgttacataaaccagagatgataaaacagatacttccagaacatagtgtgcttcaaaacattaattttgttgaagcatttcaagatgagctattagtaactgaagtatatgatcttccccaacgacctaatgatgttcagctcttttatggaagcatgtgtaaaattatactttcagtaattggagaattcagagattgcatttctagcagagaattccttcagccttcttccaaagctagcttggaatctacaagcgacttgggagcttctgggaaacatggtggcaacgtctctttggatgttttaccagtcaaaggtcctcagggttctcctcttctctcacgggcggctcgcccgcctctggatcagctggcctccgaagagccgtggactgtcctacccgagcacttgattctggtagctccttctccttgtgacatggcaaaaactggacgtttccagattgtgaataactctgtgaggttactgagatttgagctgtgctggccagcgcattgcctcacagtcacgccgcagcatggatgtgtcgcgccagagagtaaactacaaattcttgtgagtcctaattcctccttatccacaaaacagtcaatgttcccgtggagtggtttgatctatatacactgtgacgatggacagaagaaaattgtgaaagttcaaattcgagaagatttaactcaagtggaacttttaactcgtttgacctccaaaccatttggaattctttccccagtatctgagccttcagttagtcatttggtcaaaccaatgacaaaaccgccttccacaaaagttgaaataagaaacaagagtattacttttcctacaacagaacctggtgaaacttcagagagctgtctagaactcgagaatcatggcaccacagacgtgaaatggcatctgtcatctttagcgccaccttatgtcaagggagttgatgaaagtggagatgtttttagagctacctatgcagcattcagatgttctcctatttctggtctgctggaaagccatgggatccaaaaagtctccatcacatttttgcccagaggtaggggggattatgcccagttttgggatgttgaatgtcaccctcttaaggagcctcacatgaaacacacgttgagattccaactctctggacaaagcatcgaagcagaaaatgagcctgaaaacgcatgcctttccacggattccctcattaaaatagatcatttagttaagccccgaagacaagctgtgtcagaggcttctgctcgcatacctgagcagcttgatgtgactgctcgtggagtttatgccccagaggatgtgtacaggttccggccgactagtgtgggggaatcacggacacttaaagtcaatctgcgaaataattcttttattacacactcactgaagtttttgagtcccagagagccattctatgtcaaacattccaagtactctttgagagcccagcattacatcaacatgcccgtgcagttcaaaccgaagtccgcaggcaaatttgaagctttgcttgtcattcaaacagatgaaggcaagagtattgctattcgactaattggtgaagctcttggaaaaaattaactagaatacatttttgtgtaaagtaaattacataagttgtattttgttaactttatctttctacactacaattatgcttttgtatatatattttgtatgatggatatctataattgtagattttgtttttacaagctaatactgaagactcgactgaaatattatgtatctagcccatagtattgtacttaacttttacaggtgagaagagagttctgtgtttgcattgattatgatattctgaataaatatggaatatattttaa

SEQ ID NO: 3874 - DNA, 540 bp, Homo sapiens
  source 1..540: mol_type = genomic DNA
agtgtgctggaaagttctacagatttcgccatcagactatccattcctattcttgaaaaatctgcagtgctggagttatttgcaattcccccccgccaatctttaaataattgtctcagagatatagatagatatagattgcccacgggtgatttttttaatcccggttaccacttgtaataaaagaggttgaattttggagagaattgatatttaaattgcatgtttttttttctgtattataattatgcacattgatttagttttaaaattagtgaggttggaatgttagtattttgatttgaaatctgggatctttggaggtgatttaagattatggtttgataagaactccattttctgttgatgtggagacatagggtacctccaactttccggggtttcagaagagaattttttattgaaactggaagaccaaaataattacaagcatgttgtgctggggaaatgcatcctttgggcagctaggtttgggtggaattgatgaagaaattgtactagagcccagaaaaagtgact

SEQ ID NO: 3875 - DNA, 688 bp, Homo sapiens
  source 1..688: mol_type = genomic DNA
atcagaaagctccgcagttcttgagttccacatgcagagcagatgcgacagctagaagtgagtagggcccagaccctggcccaggaagatccactaaaggaggccatccttccgccttcttctgcaggagtcagggggcgtgtaaaggtgatttgttcgccaagaaaagcacttttagtaaagcacagatgttaatctagatcatggaaaagtgccacacactagatttagcacataagcaaggagtctctagaacactcagaagaaaatgaatgaatccatgaatgaatggacaagtgagagcccagagcagctgaagccatgaagtgctttggaaagagaagcgtgcctgggaaaagagagtggctgagtgctaagagcagggtgaacaccatggaaaacttgaaattgaaaacatcacaattttaatgagaaaaagcgcaacccaaagtgaagagcaccattataacaaaggatggaaaggcagatgtaaagtccctcatggcgaaatataacacggggggcaacccgacagaggatgtctcagtcaatagccgacccttcagagtcacagggccaaactcatcttcaggaatacaagcaagaaagaacttattcaacaaccaaggaaatgccagccctcctgcaggacccagcaatgtacctaagtttgggtccccaaagccac

SEQ ID NO: 3876 - DNA, 711 bp, Homo sapiens
  source 1..711: mol_type = genomic DNA
atgcgcagtagctgtaggagggggtgggcgctccattgggcgtttctcttggtttttcctttccgcgcggcttgggcggacgtctcgtgagacgtgggacttctcgcgggaactgcattcaaatatcccaggcgcttactcgagagctagctgagcgaatgggccggcgactgtggagttagcgtcctcaatgtggacgccctgagctcccattaggagccgctggctgcggcagcaggggactagcgtgagagtttcatgagggaggagcttttttttcgtccattttgttccctaatgaatctgaactgcccagaatggaacctagtatataaggcattcaagaaatactcgttcagtgaatgactacattgacttgagacatgggggaacatcttgcaatgacctggtgccctttgaaggcaaagttggctaaaaaaaagaaaagaacatggaggcagatataatcacaaatcttcgatgcaggctcaaagaggctgaagaagagcgactaaaagctgcacagtatggtttacaactagtagagagtcaaaatgaattacagaatcaattggataaatgtcgtaatgaaatgatgaccatgactgagagttatgaacaagaaaaatatacccttcaaagagaagttgaactcaagagtcgaatgttagaaagtttgagctgcgaatgtgaagctattaaacaacaaca

SEQ ID NO: 3877 - DNA, 2219 bp, Homo sapiens
  source 1..2219: mol_type = genomic DNA
agggcttaatagttttccaagtgcttcaagacatgttagctaattggatcttcacaggaactctatgaggccgaatacatcaagcaatggtaacatctttaaatgaagataatgaaagtgtaactgttgaatggatagaaaatggagatacaaaaggcaaagagattgacctggagagcatcttttcacttaaccctgaccttgttcctgatgaagaaattgaacccagtccagaaacacctccacctccagcatcctcagccaaagtaaacaaaattgtaaagaatcgacggactgtagcttctattaagaatgaccctccttcaagagataatagagtggttggttcagcacgtgcacggcccagtcaatttcctgaacagtcttcctctgcacaacagaatgcacgtagaaaatctaattgtgtgaaagaagtagaaaaactgcaagaaaaacgagagaaaaggagattgcaacagcaagaacttagagaaaaaagagcccaggacgttgatgctacaaacccaaattatgaaattatgtgtatgatcagagactttagaggaagtttggattatagaccattaacaacagcagatcctattgatgaacataggatatgtgtgtgtgtaagaaaacgaccactcaataaaaaagaaactcaaatgaaagatcttgatgtaatcacaattcctagtaaagatgttgtgatggtacatgaaccaaaacaaaaagtagatttaacaaggtacctagaaaaccaaacatttcgttttgattatgcctttgatgactcagctcctaatgaaatggtttacaggtttactgctagaccactagtggaaactatatttgaaaggggaatggctacatgctttgcttatgggcagactggaagtggaaaaactcatactatgggtggtgacttttcaggaaagaaccaagattgttctaaaggaatttatgcattagcagctcgagatgtctttttaatgctaaagaagccaaactataagaagctagaacttcaagtatatgcaaccttctttgaaatttatagtggaaaggtgtttgacttgctaaacaggaaaacaaaattaagagttctagaagatggaaaacagcaggttcaagtggtgggattacaggaacgggaggtcaaatgtgttgaagatgtactgaaactcattgacataggcaacagttgcagaacatccggtcaaacatctgcaaatgcacattcatctcggagccatgcagtgtttcagattattcttagaaggaaaggaaaactacatggcaaattttctctcattgatttggctggaaatgaaagaggagctgatacttccagtgcggacaggcaaactaggcttgaaggtgctgaaattaataaaagccttttagcactcaaggagtgcatcagagccttaggtagaaataaacctcatactcctttccgtgcaagtaaactcactcaggtgttaagagattctttcataggtgaaaactctcgtacctgcatgattgccacaatctctccaggaatggcatcctgtgaaaatactcttaatacattaagatatgcaaatagggtcaaagaattgactgtagatccaactgctgctggtgatgttcgtccaataatgcaccatccaccaaaccagattgatgacttagagacacagtggggtgtggggagttcccctcagagagatgatctaaaacttctttgtgaacaaaatgaagaagaagtctctccacagttgtttactttccacgaagctgtttcacaaatggtagaaatggaagaacaagttgtagaagatcacagggcagtgttccaggaatctattcggtggttagaagatgaaaaggccctcttagagatgactgaagaagtagattatgatgtcgattcatatgctacacaacttgaagctattcttgagcaaaaaatagacattttaactgaactgcgggataaagtgaaatctttccgtgcagctctacaagaggaggaacaagccagcaagcaaatcaacccgaagagaccccgtgccctttaaaccggcatttgctgctaaaggatacccagaaccctcactactgtaacatacaacggttcagctgtaagggccatttgaaagtttggaattttaagtgtctgtggaaaatgttttgtccttcacctgaattacatttcaattttgtgaaac

SEQ ID NO: 3878 - DNA, 457 bp, Homo sapiens
  source 1..457: mol_type = genomic DNA
aggtggcatattggtttttctggaatccgttgcgaaactgttcttatctacttaaagggaactcatttgaagtctgagtcttgagggaataggcagaacaggcatgttggaaggaaagtatgagtctcaggtgaacaaaaattgtttgctggcccccaggatactaactagacctttggcctgactcacaggacactaaggctccttttctgaagaagccttttaccagtctcatttaggggatgggaacaacatgtcttcacctagggactttagagcagagcctgtaaacgattatgagggaaatgactctgaagcagaagacttgaatttcagggagactttgccttcatcaagtcaggaaaacacacctagatcaaaggtttttgaaaataaagttaattcagagaaggtaaaactttctcttcggaatttcccacataatgattatgaggat

SEQ ID NO: 3879 - DNA, 582 bp, Homo sapiens
  source 1..582: mol_type = genomic DNA
agtgcctccgggtcgcggtcattttgagcccctgtctggatgacttcttgcggctgttctacccctccccctccccgcgtcgcctgctgctgtcgtcgggaggtgggtgaggtgacgcaaacagccccgttgttgccctccgcgtatcccctcaccacctttgcggccatccacgactttcgcaccttccgccattttcctgcctgtgagggtggacagatcgcgctcgggtctcggcctcctgagtgccggtgactgcgggaggcgacggagtgcttctgggggtgaaagatgaatgggagggctgattttcgagagccgaatgcagaggttccaagaccaattccccacatagggcctgattacattccaacagaggaagaaaggagagtcttcgcagaatgcaatgatgaaagcttctggttcagatctgtgcctttggctgcaacaagtatgttgattactcaaggattaattagtaaaggaatactttcaagtcatcccaaatatggttccatccctaaacttatacttgcttgtatcatgggatactttgctggaaaactttcttatgtgaaaact

SEQ ID NO: 3880 - DNA, 567 bp, Homo sapiens
  source 1..567: mol_type = genomic DNA
gacgcagatgcgaaagtggcggcctccgggcaccatttctgtgcacggaaacagaatccgggtttgaaggcagccgccgcttcgcttacccagttaggccgggcacggtggctcacgcctgtaatcccagcactttgggaggccgaggcgggcggatcatctgaggtcaggagttcgaggccagcctgaccaacatggagaaaccccgtctctactaaaaatacataattagccagcatttgacattgtgcagcaaagaaatggttatggagaagcccagtccgctgcttgtagggcgggagtttgtgaggcaatattatactttgctgaataaagctccggaatatttacacaggttttatggcaggaattcttcctatgttcatggtggagtagatgctagtggaaagccccaggaagctgtttatggccaaaatgatatacaccacaaagtattatctctgaacttcagtgaatgtcatactaaaattcgtcatgtggatgctcatgcaaccttgagtgatggagtagttgtccaggtcatgggtttgctgtctaacagtggac

SEQ ID NO: 3881 - DNA, 742 bp, Homo sapiens
  source 1..742: mol_type = genomic DNA
tggcctgactcacaggacactaaggctccttttctgaagaagccttttaccagtctcatttaggggatgggaacaacatgtcttcacctagggactttagagcagagcctggtttttgaaaataaagttaattcagagaaggtaaaactttctcttcggaatttcccacataatgattatgaggatgtttttgaagagccttcagaaagtggcagtgatcccagcatgtggacagccagaggccccttcagaagagacaggtggagcagtgaggatgaggaggctgcagggccatcacaggctctctcccctctactttctgatacgcgcaaaattgtttctgaaggagaactagatcagttggctcagattcggccattaatattcaattttcatgagcagacagccatcaaggattgtttgaaaatccttgaggaaaaaacagcagcgtatgatatcatgcaggaatttatggctttagaacttaagaatctgcctggtgagttcaactctgggaatcaaccaagcaacagagaaaaaaatagataccgagatattcttccatttcaacatcatggatatagtggcccaaatgagagaacaacgttctggcatggttcaaacgaaggagcagtatcacttttgttacgatattgtgcttgaagttcttcggaaacttctgactttggattaagaaagacttctgttgcctctcacttgaaattaccaagtgggtttgcac

SEQ ID NO: 3882 - DNA, 563 bp, Homo sapiens
  source 1..563: mol_type = genomic DNA
ttttgttcgccgttactctgcgcgtaagtcgcttgtccgtggcttctctgagaagaaaagttgaaaaaggacatcgctattgcggttccgaggcagtgggaagagatgcggcccctggacatcgtcgagctggcggaaccggaggaagtggaggtgctggagcccgaggaggatttcgagcagtttctgctcccggtcatcaacgagatgcgcgaggacatcgcgtcgctgacgcgcgagcacgggcgggcgtacctgcggaaccggagcaagctgtgggagatggacaatatgctcatccagatcaaaacgcaggtggaggcctcggaggagagcgccctcaaccacctccagaacccgggcgacgcggccgagggccgggcggccaagaggtgcgagaaggccgaggagaaggccaaggagattgcgaagatggcagagatgctggtggagctggtccggcggatagagaagagcgagtcgtcgtgagcgcggtcggcggtttccagccaatggattctggtcaactggtggagattggctgacaccctggagaagccgaa

SEQ ID NO: 3883 - DNA, 584 bp, Homo sapiens
  source 1..584: mol_type = genomic DNA
gacgcagatgcgaaagtggcggcctccgggcaccatttctgtgcacggaaacagaatccgggtttgaagatcttctttgtgaagctttcattcaatggtgtaccacaaaagattgaaggtcatttctttaaaaagcatttgacattgtgcagcaaagaaatggttatggagaagcccagtccgctgcttgtagggcgggagtttgtgaggcaatattatactttgctgaataaagctccggaatatttacacaggttttatggcaggaattcttcctatgttcatggtggagtagatgctagtggaaagccccaggaagctgtttatggccaaaatgatatacaccacaaagtattatctctgaacttcagtgaatgtcatactaaaattcgtcatgtggatgctcatgcaaccttgagtgatggagtagttgtccaggtcatgggtttgctgtctaacagtggacaaccagaaagaaagtttatgcaaacctttgttctggctcctgaaggatctgttccaaataaattttatgttcacaatgatatgtttcgttatgaagatgaagtgtttggtgattctga

SEQ ID NO: 3884 - DNA, 605 bp, Homo sapiens
  source 1..605: mol_type = genomic DNA
ccgaatcgcacgcggccgggtccgctctcccgggaggagagcccggcgtggaccagcgtgacgaccccagcgtgctgcggcctctccccgagggcccctccacaagggtccctgcgcgggccgggctcggccgttgccactcgggacagccatcccctcgagttcgcgctcgccgtccccgccttcacctcccgggttgggaggcgggcgactgcgcgcgaggtaaaggaacttgcgttccccggcgccgaggcggcagcagcgcagtgcacagcggcttctgaaggcggcgtcgacggggagctgcgcgtggctcccagtttcctggttacgtgcgcgccggcagagccaaaacctgcagccgaaactcccgcttctccggccagcctgcgcattcttacctgtcggggtgcggcgagtgtctcacctctctgcacttccaaggactcttgtcatctgccttaggcgggaaatgctgttgctggattgcaaccccgaggtggatggtctgaagcatttgctggagacaggggcctcggtcaacgcacccccggatccctgcaagcagtcgcctgtccacttagccgcaggaagcggccttgctt

SEQ ID NO: 3885 - DNA, 552 bp, Homo sapiens
  source 1..552: mol_type = genomic DNA
gatacacagtttccagaactgtctgggggcgggagcgggagcgggagccgagcccgctcggagctcctcgccgccgctgccgctcccatcttaaaaccgtttctcgccggcgcgcccgccccagcccgaaggctgcctgctgtttcccggggagatcatgaaacgaggtcgccttcccagcagcagtgaggattctgacgacaatggcagcctgtcaactacttggtcccagaattcccgatcccagcataggagaagctcctgctccagacatgaagatcgaaagccttcagaggtgtttaggacagacctgatcactgccatgaagttgcatgactcctaccagctgaatccggatgagtactatgtgttggcagatccctggagacaggaatgggagaaaggggtccaggtgcctgtgagcccggggaccatccctcagcctgtggccagggttgtgtctgaagagaaatccctcatgttcatcaggcccaagaagtacatcgtgtcatcaggctctgagcctcccgagttgggctatgtggacatccg

SEQ ID NO: 3886 - DNA, 1300 bp, Homo sapiens
  source 1..1300: mol_type = genomic DNA
gttgcggccgctggagcccgagccatgcggaccgcggaccgggaggcgcgcccggggcttccgtccctgctgctgctgctgctggccggggccgggctgtcagccgcctcgcccccagcagcgccgcgcttcaacgtgagcctggactcggtccccgagctgcgctggctgcccgtgctgcggcactacgacttggacttggtgcgcgccgcgatggcgcaagtcatcggggacagagtccccaagtgggtgcacgtgttaatcggaaaagtggtcctggagctggagcgcttcctgccccagcccttcaccggcgagatccgcggcatgtgtgacttcatgaacctcagcctggcggactgccttctggtcaacctggcctacgagtcctccgtgttctgcaccagtattgtggctcaagactccagaggccacatttaccatggtcggaatttggattatccttttgggaatgtcttacgcaagctgacagtggatgtgcaattcttaaagaatgggcagattgcattcacaggaactacttttattggctatgtaggattatggactggccagagcccacacaagtttacagtttctggtgatgaacgagataaaggctggtggtgggagaatgctatcgctgccctgtttcggagacacattcccgtcagctggctgatccgcgctaccctgagtgagtcggaaaacttcgaagcagctgttggcaagttggccaagactccccttattgctgatgtttattacattgttggtggcacgtccccccgggagggggtggtcatcacgaggaacagagatggcccagcagacatttggcctctagatcctttgaatggagcgtggttccgagttgagacaaattacgaccactggaagccagcacccaaggaagatgaccggagaacatctgccatcaaggcccttaatgctacaggacaagcaaacctcagcctggaggcacttttccagtgaaagcaggccaggtgcggtggctcacgcctgtaatcccagccctttgggaggccaaggcgggtggatcacttgaggtcaggagttcaagaccagcctggccaacatggtgaaacctcgtctctactaaaaatacaaaaatcaaccaggcatgacggtgcacgcctgttatcacagctacttgggaagcagcggctggagaattgcttgaacctgggaagtcgaggctgcaagtgagctgagatcatgccatggcagtctagcctgggcaacagagcgagactctgtttcaaaaaaaaaaagaaaa

SEQ ID NO: 3887 - DNA, 755 bp, Homo sapiens
  source 1..755: mol_type = genomic DNA
acgctaacggcggtcgtgccccgccgctgctgtcacccccggccgctgctgccctccccgccgaggttctactgctctccttcttaagaagggtgggaggcactcggtctctccccacacctctcgcctgaggccaggcgccaggtgtcgcctgaagccagacagccggtttgggagcgagcctgagggcaaggggaaggcaaggggatcttcaagagaatgtgactgtgggggattatggctttctggccaatttgttacctattgaacactaagttccaggcactgggctaggcactgggatggtgtggtgagcaaaaactgaccagtcctgccgtggagtttgctgggggagacacatgttactcaaagaatcacactaaggatagcaatttatctcaaagcttcaagttcctgccatctacatgtgcccaggtcaaccaatcaatggctcagacagataagccaacatgcatcccgccggagctgccgaaaatgctgaaggagtttgccaaagccgccattcgggcgcagccgcaggacctcatccagtggggggccgattattttgaggccctgtcccgtggagagacgcctccggtgagagagcggtctgagcgagtcgctttgtgtaactgggcagagctaacacctgagctgttaaagatcctgcattctcaggttgctggcagactgatcatccgtgcagaggagctggcccagatgtggaaagtggtgaatctcccaacagatct

SEQ ID NO: 3888 - DNA, 1079 bp, Homo sapiens
  source 1..1079: mol_type = genomic DNA
cggattcgtgaagcagttgagtgctgcagcggcagtcgtcgcccctgccgccgctgccaccgaaggaagcatcccagacaccgggaagatggaagatggtaccccaaagcatatcatccagatgacaggatttaagatggaagaaaaagaagcgctagtcaaattacttttaaaactagattgcacttttattaagagtgagaaatacaaaaattgtacacatcttatagctgaacgcctatgtaagagtgaaaaatttttagcagcttgtgcggcaggaaagtggatactaaccaaggactatataattcatagtgccaaaagtggcagatggcttgatgaaacaacttatgaatggggatataaaattgaaaaagattcccgttattcacctcaaatgcaatctgcacctaaaagatggcgtgaagaactgaaacgcactggtgctccaggagccttccacagatggaaagttgtcctccttgttagaactgataagcgaagtgattctcttataagaaagaaattcagaatgatgaagattcccaaaccaattctgtttggactgaacatagcaatgaagaaacaaacaaagatttcaggaaagatgcaggatttcttgaaatgaaaggtgccttaagagagaccatgtatagaacccagaaagaaatgcaaaatcatgaagatgttaatgttggttctattttgattcaacatcacaaaaaagaaaaattcagtggttccagtaaagatttgaaatttgttaaaatgagaaatacctttggaagccatacatatgaaaatcagaaggaaattaagaaaaaagatgaagatattcagaggagttatactttgaggagaaaacgcaagaaaggaaaagaaagcaattgcaagaaaggcgttgaacatgaaaaaataaaaagtaccttaagaaggcacatatataatagagatcagaaagaaatgaagaattctatttttgctgaatatgccaaagaatcaaaagccatggctattaagacagatgtggatgttgttgaaataaaaaataccttaaggaagcacatatatagagctca

SEQ ID NO: 3889 - DNA, 623 bp, Homo sapiens
  source 1..623: mol_type = genomic DNA
atcccaggcgcttactcgagagctagctgagcgaatgggccggcgactgtggagttagcgtcctcaatgtggacgccctgagctcccattaggagccgctggctgcggcagcaggggactagcgtgagagttttatttcctctatttacagttggctaaaaaaaagaaaagaacatggaggcagatataatcacaaatcttcgatgcaggctcaaagaggctgaagaagagcgactaaaagctgcacagtatggtttacaactagtagagagtcaaaatgaattacagaatcaattggataaatgtcgtaatgaaatgatgaccatgactgagagttatgaacaagaaaaatatacccttcaaagagaagttgaactcaagagtcgaatgttagaaagtttgagctgcgaatgtgaagctattaaacaacaacaaaaaatgcacctggagaaattggaagaacaactaagcagaagccatggacaggaagtgaatgaactaaaaactaagatagaaaaactgaaagtggaattagatgaagccaggcttagtgaaaagcagctgaagcaccaagtagatcatcagaaggaactcctctcttgtaaatcagaggaactgcgcgt

SEQ ID NO: 3890 - DNA, 1423 bp, Homo sapiens
  source 1..1423: mol_type = genomic DNA
ctttgcggccatccacgactttcgcaccttccgccattttcctgcctgtgagggtggacagatcgcgctcgggtctcggcctcctgagtgccggtgactgcgggaggcgacggagtgcttctgggggtgtgagctggggaagttcgtggtcacggatgcgtgtggggttgctgctcagtctgtaacggcaggtgggagacggacactgggtggaggatggagtgcggaaagatgaatgggagggctgattttcgagagccgaatgcagaggttccaagaccaattccccacatagggcctgattacattccaacagaggaagaaaggagagtcttcgcagaatgcaatgatgaaagcttctggttcagatctgtgcctttggctgcaacaagtatgttgattactcaaggattaattagtaaaggaatactttcaagtcatcccaaatatggttccatccctaaacttatacttgcttgtatcatgggatactttgctggaaaactttcttatgtgaaaacttgccaagagaaattcaagaaacttgaaaattccccccttggagaagctttacgatcaggacaagcacgacgatcttcaccacctgggcactattatcaaaagtcaaaatatgactcaagtgtgagtggtcaatcatcttttgtgacatccccagcagcagacaacatagaaatgcttcctcattatgagccaattccattcagttcttctatgaatgaatctgctcccactggtattactgatcatattgtccaaggacctgatcccaaccttgaagaaagtcctaaaagaaaaaatattacatatgaggaattaaggaataagaacagagagtcatatgaagtatctttaacacaaaagactgacccctcagtcaggcctatgcatgaaagagtgccaaaaaaagaagtcaaagtaaacaagtatggagatacttgggatgagtgaaaaattacatcattggacatgaaggagtttcaacatccagcttcatctaggtggtcatgattacctgcatgctttgagctcagcagcagtcttcataaacacatttaaaacaagatcctgggtttttgtggtttgacttctatggtgttttaaaaaaacacagatttttagtgttaatattgtgtaaatgtactcaccttagggattcatttgaatgatggtattataccatgattgtatacagtttgtgaaattgttgcaagggcaaagataactcttaaaaaaccgtcgagattacaatgctctagaatcagcatataagaaaataaatgatatctgcatgttgaattggggtggatggggggagcaagcataatttttaagtgtgaagctttgcatcaagaaattattaaaaagctttttttctccagtattttctgtattatcttaatgt

SEQ ID NO: 3891 - DNA, 554 bp, Homo sapiens
  source 1..554: mol_type = genomic DNA
gtgtttaatcgtcgccaagcgggacttactgcaagctatcaaatctgaggtcttattttgttgagtcgaaagtgaaattttcctttggccaacgtgacagggctttgtttggtggtaaaaagggttactagacacccctcattccactgccactggagggcgcatttctcagctcttgctcttcaaacctgctgaaaggaattcctagatctaaacaccagtttccttcatgtccttatcgcttcctgtccaaatctactgaaaaccccttcggctgttacttctggatgtgatgtcgcagtctttagcccatcctgtctgctagtgccatctgaaatccttcctggaacttgcatttgacattgtgcagcaaagaaatggttatggagaagcccagtccgctgcttgtagggcgggagtttgtgaggcaatattatactttgctgaataaagctccggaatatttacacaggttttatggcaggaattcttcctatgttcatggtggagtagatgctagtggaaagccccaggaagctgtttatggccaaaat

SEQ ID NO: 3892 - DNA, 742 bp, Homo sapiens
  source 1..742: mol_type = genomic DNA
tggcctgactcacaggacactaaggctccttttctgaagaagccttttaccagtctcatttaggggatgggaacaacatgtcttcacctagggactttagagcagagcctggtttttgaaaataaagttaattcagagaaggtaaaactttctcttcggaatttcccacataatgattatgaggatgtttttgaagagccttcagaaagtggcagtgatcccagcatgtggacagccagaggccccttcagaagagacaggtggagcagtgaggatgaggaggctgcagggccatcacaggctctctcccctctactttctgatacgcgcaaaattgtttctgaaggagaactagatcagttggctcagattcggccattaatattcaattttcatgagcagacagccatcaaggattgtttgaaaatccttgaggaaaaaacagcagcgtatgatatcatgcaggaatttatggctttagaacttaagaatctgcctggtgagttcaactctgggaatcaaccaagcaacagagaaaaaaacagataccgagatattcttccatttcaacatcatggatatagtggcccaaatgagagaacaacgttctggcatggttcaaacgaaggagcagtatcacttttgttacgatattgtgcttgaagttcttcggaaacttctgactttggattaagaaagacttctgttgcctctcacttgaaattaccaagtgggtttgcac

SEQ ID NO: 3893 - DNA, 1163 bp, Homo sapiens
  source 1..1163: mol_type = genomic DNA
aggcgagggggcggagcaagagaagaaaacacaaagggccggaaggaagccggggagacaggtggggtactcgggaagctggagcgggccggcggtgcagtcacgggggagcgaggcctgctgggcttggcaacgagggactcggcctcggaggcgacccagaccacacagacactgggtcaaggagtaagcagaggataaacaactggaaggagagcaagcacaaagtcatcatggcttcagcgtctgctcgtggaaaccaagataaagatgcccattttccaccaccaagcaagcagagcctgttgttttgtccaaaatcaaaactgcacatccacagagcagagatctcaaagattatgcgagaatgtcaggaagaaagtttctggaagagagctctgcctttttctcttgtaagcatgcttgtcacccagggactagtctaccaaggttatttggcagctaattctagatttggatcattgcccaaagttgcacttgctggtctcttgggatttggccttggaaaggtatcatacataggagtatgccagagtaaattccatttttttgaagatcagctccgtggggctggttttggtccacagcataacaggcactgcctccttacctgtgaggaatgcaaaataaagcatggattaagtgagaagggagactctcagccttcagcttcctaaattctgtgtctgtgactttcgaagttttttaaacctctgaatttgtacacatttaaaatttcaagtgtactttaaaataaaatacttctaatggaacaaaaacattgtgtctgtcactcactgaaatgtattccgtggaaggctttcaagtgaactaagcgttacatgtttttctgctctttaagaacatgtcggggcatggcgcagtggctcatgcctgtaatcccagtactttgggaggccgaggcaggcagatcatttgaggtcaggagttcatgaccagcttggccaacatggtgaaaccccatctctgctaaaaatataaaaattagccaggcgtggtggcacatgcctgtaatcccagctactgagagggaggctgaggcaggagaatcacttgaacccaggaggcgaaagttgcagcgagcagagattgtgccactgcactccagcctgggtgccaga

SEQ ID NO: 3894 - DNA, 3020 bp, Homo sapiens; identical to SEQ ID NO: 3275
  source 1..3020: mol_type = genomic DNA

SEQ ID NO: 3895 - DNA, 542 bp, Homo sapiens
  source 1..542: mol_type = genomic DNA
agctcagctcagacggcgccctagggccgcacagagggtcgggcagtgccggagagaggtttgaaagcgccgccgccaactcgacagcgcgtcccaggaaaaactgaggaaacgcgcctggttccaggggtcggcggggaccgtggagacgctgccagcatcctcaacagcttggaaatcccatcaccttggttccctgagacttggaggactagtaggaactgacagctggctgacagaaaacttatccagggagagaagagacaaaagtgaagtgtgaaattttgaataatgttttcaggcacggccgtcgccagcatagtaccggctcctcttcttctcccagaacctcctgacaccaaccttggtgaaagaaaagctgtgacaatgctttgcattcagaatagacctctgagttgggacccaagctgtcaactgatcccaaattcctaagttcctgacttgcaggtattgagttctaacctccgaagatggatgaaggtatggaaatttcaagtgaaggaaattccttgatcaaagca

SEQ ID NO: 3896 - DNA, 3897 bp, Homo sapiens
  source 1..3897: mol_type = genomic DNA
ccttttgccttcaaccttcgagccgccacgtaatgccacgtccccgcgcatgcgcatcttggccgctgctggcggctgtttccgggcttagagggctggagtggccgccgagttggaggcggtggtggcagcagtaggagtgtgtagagtgcgggattggggcccaggccctgcggagggcgggggaagttgtcttcttttttttccggaggggccggtaaacctggtggctgaacggcaagatgaatttcctccgcggggtaatggggggtcagagtgccggaccccagcacacagaagccgagacgttcagattctgaaataataggttatgctttggacacactatataatataatatctaatgaagaagaagaagaagtagaagaaaattccacaagacagagtgaagatttgggaagccaatttacagaaattttcattaagcagcaggaaaatgtcactcttctgttatctttattggaggagtttgatttccatgtccgctggcctggtgtgaagcttcttacttctcttttaaaacaactagggcctcaggtgcaacaaattattttagtcagtcctatgggtgtttcaagattgatggacttactagcggattccagggaagttatacgtaatgatggcgtcttactactgcaggcactaacaagaagcaatggtgcaatccagaaaattgttgcttttgaaaatgctttcgagagactactggacattatttcagaggaggggaacagtgatggaggtatagtagttgaagattgtttgattttgctccaaaacttattaaaaaacaacaactccaatcaaaatttttttaaagaaggctcatatattcaacgtatgaaaccttggtttgaagttggagatgaaaattctggctggtctgcacagaaagtgaccaatctacatctaatgctacagcttgttcgtgtattggtatctcccaccaaccctcctggtgctaccagtagctgccagaaggctatgttccagtgtgggttattgcagcagctttgtactatcctaatggctactggggttcctgctgatatcctgactgagaccataaatactgtatcagaagttattcgaggctgccaagtaaaccaagactactttgcatctgtaaatgcaccttcaaacccaccaagaccggcaattgtagtacttctcatgtccatggttaatgaaaggcagccatttgttttgcgctgtgctgttctctattgtttccagtgtttcttgtataaaaaccaaaaaggacaaggagaaatcgtgtcaacacttttaccttctaccattgatgcaacaggtaattcagtttcagctggccagttattatgtggaggtttgttttctactgattcactttcaaactggtgtgctgctgtggcccttgcccatgcgttgcaagaaaatgccacccagaaagaacagttgctcagggttcaacttgctacaagtattggcaaccctccagtttctttacttcaacagtgcaccaatattctttcacagggaagcaaaatacaaacaagagttggattattaatgttgctttgtacctggctaagcaattgtcccattgcagtaacgcattttcttcacaattcagccaatgttccatttcttacaggacaaattgcagaaaatcttggagaagaagagcagttggtccaaggcttatgtgcccttttgttgggcatttcgatttatttcaatgataactcacttgagagctacatgaaagagaagctaaaacaactgattgagaagaggattggcaaagagaatttcatagagaaactaggatttattagcaaacatgagttgtattccagagcatctcagaaaccccagccaaactttcccagtccagaatacatgatatttgatcatgagtttacgaagctggtaaaagaacttgaaggtgttataactaaggctatttataagtccagtgaagaagataaaaaagaagaagaggtgaaaaaaacattagaacagcatgacaatattgtgactcactacaaaaatatgattcgagagcaggatctccaacttgaggaattaaggcagcaggtttctacattaaaatgtcaaaatgaacagctccagacggcagtcacacagcaagtatcacagatccagcagcacaaagaccagtataatcttcttaaaatacagctaggaaaagacaatcagcatcaaggttcttacagtgagggggctcagatgaatggcattcagccagaagaaattggtagattgcgagaagagatagaagaattaaaacgtaatcaggaacttttacaaagccagctgactgaaaaggactctatgattgaaaatatgaaatcttcccaaacatctggcacaaatgaacagtcttcagcaatagtttcagctagagattctgaacaagttgcagaattaaaacaggaactggcaactttaaagtctcagttaaactcacaatctgtggagatcaccaaactacagacagaaaagcaggaactgttacagaaaacagaagcgtttgcaaaatcagttgaggtacaaggagagaccgagactataatagccaccaaaactactgatgtagaaggaagactgtcagcattattacaagagaccaaagagttaaagaatgaaattaaagctctgtctgaggaaagaactgccattaaagagcagctggattcatctaatagtaccattgccattttacaaactgagaaagacaaactagagttggaaattacagattctaaaaaagaacaagatgatctcttggtgctcttggccgatcaagatcagaaaatactgtcattgaagaataaactcaaggatcttggtcatccagttgaagaagaggatgaacttgaatctggagaccaagaggatgaggatgatgaaagtgaagatcctggcaaggatctagatcatatctagttttcaaatctctaggaacaatagagattatatcataactctgaagatggactctaaactttggtttacctccatggaaaataaagatttagaaaccaggtggaaaacattcactattaagactattgatatatttttgtaatgttgccacccatgttgaaaaccttaaaactgaatttatgtagaacacacatcttttatttaaatccatctgaactgtcccaaaatgtaatttgcaaagagcttcaaacaccaaaaatataccattttaaggcatgtggtgacaatgctatttgccttagttcattcgttgtttactttgcaaaatttgtgacttttaagtactaacacatttgattgaatgtgtattgaattggaattattatttctaaattcagcatttgagtccttagttgatgattttcttttaaagaaattagtttatttaaaagcaagatagcctgggttgggagttagtgcatatcatcagccctccatctaatgtgattgctaagatgtgcaggataggacagcttagaatgagtgccttgacacctacatatggctgcattccatacctcagtgaagaagccgaaggatgctgacacacagtgatgtggagggcattccggagaaacttttgcaacagtgtattaatgtgattggttttctttttgttttaagctaaacatctaaaacaaatttcaagttaacagttcatacaactcagatttagtagtattgtttatcataaaacatattatgttcctagttttaaaaagacccaaagtatgattaatataatttattggcatttttgctgaataggtttaagtcagataatagattttaaaaaagcaaatgaggcaatgtgtcaaaatttaatgtttcataataaaaatagatacgttgacttaa

SEQ ID NO: 3897 - DNA, 631 bp, Homo sapiens
  source 1..631: mol_type = genomic DNA
tgaggcaccttcgggcaacacccaatactcggggctccgctcggcttctttgcgccgagatgcctaagaaggctggtgcgacgaccaagggtaaaagccagagcaaggaaccagagagaccacttcctcccttaggtcctgtggcagttgatcctaaaggatgcgtcaccatagccatccatgcaaaacctggctccaaacaaaatgctgtaacagatttgacagcagaggctgtaaatgtagctattgcagcacctccatcagagggagaggctaatgctgagctctgtcggtatctttccaaggtcctagaactcaggaagagtgatgtggttttggataagaagttgagagacttactcaagattgtaccatgcaagctggcaactagaacccaaatccttggactacttgttgaatgcagtttttctagattgtaaattaaaaatcatatctccacaacggttctggaattctggggattgccttctaatccagtttacaagtgacagaaaacctgttatgctgctttgtagtcttaccttagatttttaaatgcttatttaaatgtaaaaaaaattttttttttacatcttttaaagactatatttaccattttgttgaaaaagta

SEQ ID NO: 3898 - DNA, 348 bp, Homo sapiens
  source 1..348: mol_type = genomic DNA
agtgcctccgggtcgcggtcattttgagcccctgtctggatgacttcttgcggctgttctacccctccccctccccgcgtcgcctgctgctgtcgtcgggaggaaagatgaatgggagggctgattttcgagagccgaatgcagaggttccaagaccaattccccacatagggcctgattacattccaacagaggaagaaaggagagtcttcgcagaatgcaatgatgaaagcttctggttcagatctgtgcctttggctgcaacaagtatgttgattactcaaggattaattagtaaaggaatactttcaagtcatcccaaatatggttccatccctaaacttatac

SEQ ID NO: 3899 - DNA, 504 bp, Homo sapiens
  source 1..504: mol_type = genomic DNA
gctaaagattcctggagtagttatagtaataatgtcacaggaatatagaaagaaacctggcatctttgggagacctactgatatgtgacttctccacccctccccctccttttttaacctggctgcctgctgtttcccggggagatcatgaaacgaggtcgccttcccagcagcagtgaggattctgacgacaatggcagcctgtcaactacttggtcccagaattcccgatcccagcataggagaagctcctgctccagacatgaagatcgaaagccttcagaggtgtttaggacagacctgatcactgccatgaagttgcatgactcctaccagctgaatccggatgagtactatgtgttggcagatccctggagacaggaatgggagaaaggggtccaggtgcctgtgagcccggggaccatccctcagcctgtggccagggttgtgtctgaagagaaatccctcatgttcatcaggcccaagaagtacatcgtgtcatca

SEQ ID NO: 3900 - DNA, 589 bp, Homo sapiens
  source 1..589: mol_type = genomic DNA
gcagttcttgagttccacatgcagagcagatgcgacagctagaagtgagtagggcccagaccctggcccaggaagatccactaaaggaggccatccttccgccttcttctgcaggagtcagggggcgtgtaaaggtgatttgttcgccaagaaaagcacttttagtaaagcacagatgttaatctagatcatggaaaagtgccacacactagatttagcacataagcaaggagtctctagaacactcagaagaaaatgaatgaatccatgaatgaatggacaagtgagagcccagagcagctgaagccatgaagtgctttggaaagagaagcgtgcctgggaaaagagagtggctgagtgctaagagcagggtgaacaccatggaaaacttgaaattgaaaacatcacaattttaatgagaaaaagcgcaacccaaagtgaagagcaccattataacaaaggtcatgcaggctgagtgaattatcctaaacaaatgatggaaaggcagatgtaaagtccctcatggcgaaatataacacggggggcaacccgacagaggatgtctcagtcaatagccgacccttcagag

SEQ ID NO: 3901 - DNA, 2273 bp, Homo sapiens
  source 1..2273: mol_type = genomic DNA
attctcctgcctcagcctcccgagttgctgggactacaggggtgcaccacctacgcccggctaatttttttgtatttttagtagagaacggggtttcaccgtgttagccaggatggcctcgatctcttgacctcgtgatccgcccgcctcggctgcccaaagtgctgggattacaggcgtgagccaccgcgcccggccgaaaggggggatattaatcattactccaggacgacagagggaaaatcgctttgtactggacaaactggaatgtctgaccaaccattataaagtgcacggagtgggaggaggaatagggacattttaattgtatttctaaaaagtatcttctgtggtgaatcggaaacaaaactcattctttaccacaggcagtttaagcgctgcctgaaagatcgaaggacggtaaaccacagacgtgagaaacggaactttgcgaaaacgcagtcgttttatgtaccggctactcattggagttacaccagagactcactactggagttcatcagccaatccaaagtccaagcgtgagagccagagcctgtaggagagacctgggcaggcctcagacctgaggagtggagctccgcatcactcaaccctgggggcggagctagcccaggctcccacacccgacgctctggcccacacagacgctactctgtagcatctcaggttccctctggctgcactctggaggaccacactcgttttctttttggctgccagaggcccccgcatccaccgctgagctgggagaaagatggcggcagccgtgcgacaggatttggcccagctcatgaattcgagcggctctcataaagatctggctggcaagtatcgtcagatcctggaaaaagccattcagttatctggagcagaacaactagaagctttgaaagcttttgtggaagcaatggtaaatgagaatgtcagtctcgtgatctcgcggcagttgctgactgatttttgcacacatcttcctaacttgcctgatagcacagccaaagaaatctatcacttcaccttggaaaagatccagcctagagtcatttcatttgaggagcaggttgcttccataagacagcatcttgcatctatatatgagaaagaagaagattggagaaatgcagcccaagtgttggtgggaattcctttggaaacaggacaaaaacagtacaatgtagattataaactggagacttacttgaagattgctaggctatatctggaggatgatgatccagtccaggcagaggcttacataaatcgagcatcgttgcttcagaatgaatcaaccaatgaacaattacagatacattataaggtatgctatgcacgtgttcttgattatagaagaaaattcattgaagctgcacaaaggtacaatgagctctcttacaagacaatagtccacgaaagtgaaagactagaggccttaaaacatgctttgcactgtacgatcttagcatcagcagggcagcagcgttctcggatgctagctactctttttaaggatgaaaggtgccagcaacttgctgcctatgggatcctagagaaaatgtatctagataggatcatcagaggaaatcaacttcaagaatttgctgccatgctgatgcctcaccaaaaagcaactacagctgatggttccagcatcttggacagagctgttattgaacacaatttgttgtctgcaagcaaattatataataatattaccttcgaagaacttggagctcttttagagatccctgcagctaagcacgagaagccctgccaacgtgggataagcagatccaatcactttgtttccaagtgaataaccttttggagaaaattagtcaaacagcaccagaatggacagcacaagccatggaagcccagatggctcagtgaatccttgcagaacttctgtgcacatgacatctttttccatgttgtgcagatcagtttcactatctccaaagcatttgcatcatgaccttatacatttcaatcccttttatgctggattccgtttaaagaagacattattagagcaggaagtacaagcatttaaaatatgtagttcccatatatttcagggtctctgtgtattaagctaactcagatgttttgaaagctttttctttaaacagaggtgaaatatctgtggctaaaaagtttgagatttgtgataactttgtagtcatgtaaaacttaagtgcttcatgcctctccaaatgtggttattctaataaatggagaaatgagcc

SEQ ID NO: 3902 - DNA, 514 bp, Homo sapiens
  source 1..514: mol_type = genomic DNA
ttggggatgaggtggcgaagtggggggggaggcacgcagcagctcccgaaggcgcgctgatggaagcttaatacaggaagtgtgggagcaggctttctggaggggatgttttaggcatttgacattgtgcagcaaagaaatggttatggagaagcccagtccgctgcttgtagggcgggagtttgtgaggcaatattatactttgctgaataaagctccggaatatttacacaggttttatggcaggaattcttcctatgttcatggtggagtagatgctagtggaaagccccaggaagctgtttatggccaaaatgatatacaccacaaagtattatctctgaacttcagtgaatgtcatactaaaattcgtcatgtggatgctcatgcaaccttgagtgatggagtagttgtccaggtcatgggtttgctgtctaacagtggacaaccagaaagaaagtttatgcaaacctttgttctggctcctgaaggatctgttccaaataaattttat

SEQ ID NO: 3903 - DNA, 1204 bp, Homo sapiens
  source 1..1204: mol_type = genomic DNA
attcctaggctgctggctctcagacccgcagtgaggtctgacgtcatttcctgccgaaagatgaatgggagggctgattttcgagagccgaatgcagaggttccaagaccaattccccctgtgcctttggctgcaacaagtatgttgattactcaaggattaattagtaaaggaatactttcaagtcatcccaaatatggttccatccctaaacttatacttgcttgtatcatgggatactttgctggaaaactttcttatgtgaaaacttgccaagagaaattcaagaaacttgaaaattccccccttggagaagctttacgatcaggacaagcacgacgatcttcaccacctgggcactattatcaaaagtcaaaatatgactcaagtgtgagtggtcaatcatcttttgtgacatccccagcagcagacaacatagaaatgcttcctcattatgagccaattccattcagttcttctatgaatgaatctgctcccactggtattactgatcatattgtccaaggacctgatcccaaccttgaagaaagtcctaaaagaaaaaatattacatatgaggaattaaggaataagaacagagagtcatatgaagtatctttaacacaaaagactgacccctcagtcaggcctatgcatgaaagagtgccaaaaaaagaagtcaaagtaaacaagtatggagatacttgggatgagtgaaaaattacatcattggacatgaaggagtttcaacatccagcttcatctaggtggtcatgattacctgcatgctttgagctcagcagcagtcttcataaacacatttaaaacaagatcctgggtttttgtggtttgacttctatggtgttttaaaaaaacacagatttttagtgttaatattgtgtaaatgtactcaccttagggattcatttgaatgatggtattataccatgattgtatacagtttgtgaaattgttgcaagggcaaagataactcttaaaaaaccgtcgagattacaatgctctagaatcagcatataagaaaataaatgatatctgcatgttgaattggggtggatggggggagcaagcataatttttaagtgtgaagctttgcatcaagaaattattaaaaagctttttttctccagtattttctgtattatcttaatgtttatggcaaataaaatgtaaaggaacatgcaac

SEQ ID NO: 3904 - DNA, 563 bp, Homo sapiens
  source 1..563: mol_type = genomic DNA
cattttgagcccctgtctggatgacttcttgcggctgttctacccctccccctccccgcggtaccttgcacttttctccctccctgccccctctcgagtccaccctccgggccttctgcccctgatcgcttggttttccttgcagtcgcctgctgctgtcgtcgggaggtgggtgaggtgacgcaaacagccccgttgttgccctccgcgtatcccctcaccacctttgcggccatccacgactttcgcaccttccgccattttcctgcctgtgagggtggacagatcgcgctcgggtctcggcctcctgagtgccggaaagatgaatgggagggctgattttcgagagccgaatgcagaggttccaagaccaattccccacatagggcctgattacattccaacagaggaagaaaggagagtcttcgcagaatgcaatgatgaaagcttctggttcagatctgtgcctttggctgcaacaagtatgttgattactcaaggattaattagtaaaggaatactttcaagtcatcccaaatatggttccatccctaaacttatac

SEQ ID NO: 3905 - DNA, 788 bp, Homo sapiens
  source 1..788: mol_type = genomic DNA
ctgtggctctgtggtaggggaatgccaccaactccctgaggagcagccgtgtggtatgattgtaaacgattatgagggaaatgactctgaagcagaagacttgaatttcagggagactttgccttcatcaagtcaggaaaacacacctagatcaaaggtttttgaaaataaagttaattcagagaaggtaaaactttctcttcggaatttcccacataatgattatgaggatgtttttgaagagccttcagaaagtggcagtgatcccagcatgtggacagccagaggccccttcagaagagacaggtggagcagtgaggatgaggaggctgcagggccatcacaggctctctcccctctactttctgatacgcgcaaaattgtttctgaaggagaactagatcagttggctcagattcggccattaatattcaattttcatgagcagacagccatcaaggattgtttgaaaatccttgaggaaaaaacagcagcgtatgatatcatgcaggaatttatggctttagaacttaagaatctgcctggtgagttcaactctgggaatcaaccaagcaacagagaaaaaaatagataccgagatattcttccatttcaacatcatggatatagtggcccaaatgagagaacaacgttctggcatggttcaaacgaaggagcagtatcacttttgttacgatattgtgcttgaagttcttcggaaacttctgactttggattaagaaagacttctgttgcctctcacttgaaattaccaagtgggtttgcac

SEQ ID NO: 3906 - DNA, 616 bp, Homo sapiens
  source 1..616: mol_type = genomic DNA
aagcgcttgacttgcttccagacaaaggttgtctcaagtttgttgctcaaaccgagttctggagaacgccatcagctcgctgcttaaagggaaatgctgttgtgagagagaatgaggagagaactaggtaaggctgtgagagccatcagacctcgatgcaagtccacccgcgagggaggaaaagaaggaaaccaggttgagtggaagcatcccagacagctgtgcagtctaagagaacttcagcaagattaaaccacaggttccattatgggtcgacttgatgggaaagtcatcatcctgacggccgctgctcaggggattggccaagcagctgccttagcttttgcaagagaaggtgccaaagtcatagccacagacattaatgagtccaaacttcaggaactggaaaagtacccgggtattcaaactcgtgtccttgatgtcacaaagaagaaacaaattgatcagtttgccaatgaagttgagagacttgatgttctctttaatgttgctggttttgtccatcatggaactgtcctggattgtgaggagaaagactgggacttctcgatgaatctcaatgtgcgcagcatgtacctgatgatcaaggcattcc

SEQ ID NO: 3907 - DNA, 718 bp, Homo sapiens
  source 1..718: mol_type = genomic DNA
acttcgtttgtggctaaggttactgtaagcttttcacttaaaaacttttcctacttctttaccagataagaaaacagctaattttaatcactggcttttgttctctaggacttaactgcatcccatattacgtatttaatgagcttgaaaaaatctcagtgtttttcttatcgtttttgaccctaaatatttaaggtgacccaatgaaagaagaaaatgaaagccataaagaaaagtcttacagaagaagaatacctgtacctggacttttctcaccaaacagaaggatgcatctttcctcttcatacatctgtaactttatttctgttatcttactgtgactgtaaaatctttaaaatttgcttagttgtcaccaaagaggtgagtagagatagttcactactaagagatgacctgatccaggatgttgaaatacagattatttcaaggcaggagctcccaccaatagtccaaaattgctgtttgcctgcagtagtagaacgatcagacaatttttgtagagcaggacttgctgttgtattgagacacataatccagaaatcctatgaagcagaccccttaaagaaggaacttttggaacttctgggctttaaaaagacttgcttgaaagcctgtgctgaagttagtcagtggaccaggctatgtgaactcaccatccctttggctattgagaattttctcagagaatcttctgacc

SEQ ID NO: 3908 - DNA, 2480 bp, Homo sapiens
  source 1..2480: mol_type = genomic DNA
agtttctcctttgttttacgtttgggaggaggtggcattggaaatagcagagtgcttcgcggtaacagggacaaatgtactgaggctggagcctgtgtgaacagaacagaagaggccttcactctagtagtgctcacagtccagcaggtgtttgctgaagacagcttactcagatcactactgcctggaggtggttgatatatcctggtgtaaaccttcaagaagggcacaggcaggaaaacatgagccagcaactgaagaaacgggcaaagacaagacaccagaaaggcctgggtggaagagcccccagtggggctaagcccaggcaaggcaagtcaagccaagacctgcaggcggaaatagaacctgtcagcgcggtgtgggccttatgtgatggctatgtgtgctatgagcctggccctcaggctctcggaggggatgatttctcagactgttacatagaatgcgtcataaggggtgagttttctcaacccatcctggaagaggactcactttttgagtccttggaatacctaaagaaaggatcagaacaacagctttctcaaaaggttttcgaagcaagctcccttgaatgttctttggaatacatgaaaaaaggggtaaagaaagagcttccacaaaagatagttggagagaattcgcttgagtattctgagtacatgacaggcaagaagcttccgcctggaggaatacctggcattgacctatcagatcctaaacagctcgcagaatttgctagaaagaagccccccataaataaagaatatgacagtctgagcgcaatcgcttgtcctcagagtggatgcactaggaagttgaggaatagagctgccctgagaaagcatctcctcattcatggtccccgagaccacgtctgtgcggaatgtgggaaagcgttcgttgagagctcaaaactaaagagacatttcctggttcatactggagagaagccgtttcggtgcacttttgaagggtgcggaaagcgcttctctctggactttaatttgcgtacgcacgtgcgcatccacacgggggagaaacgtttcgtgtgtccctttcaaggctgcaacaggaggtttattcagtcaaataacctgaaagcccacatcctaacgcatgcaaatacgaacaagaatgaacaagagggaaagtagtcctccaacaggatgaagcagattaacagaagagtgatcagtgacaaacatgcctcattgattattgtttctaggaaggaatttctaaatcaatattgcaaccccaaaagcggttataatttggtgttactaagatgctcctacactttgtgataccgttttaaggacatggtgcatttttttttcttttatttgttttatttagaactttttttatttgttttatttagaactttgtgtgttcttaaagtgtgcttccaacaggaaggtcagtgataaattttcaaaagcataaccttcaatatattatctgttggattattggatataagacttattttcatgtactataaatatgaaaataactttgatttttaattgtgtagtttccatttcttagcttttgccttttaaatttatacttcagccaggcatagtgactgatgcctgtaatcccaacactttgttgggaggccaaagcaggaggatagcttgaggccaggagttccagaccagcctgggcaacatagtgagatcctgtctctacaaaaaaatttgtttttatttgtatttatatatttttatttttgtttttgttggtaggcgtctcgctctgtcacccaggctggagtctagtgtcgtgatcttggctcactgcaacctccacctcccgggttcaagtgattctctggcctcagcctcccaagtagctgggactacaggtgtgtgtcaccacgcccggctaatttttgtatttttagtagagatggggtttcaccatgttggccaggctagtctcaaactcctgacctccagtgatctgcccacctcggcctcccaaagtgctgggattacaggtgtgagccactgtgcctggccccccacaacatgtttaaacttagctaggcctggttgcatacgcctgtgttcccagctactcaggaggctgaagcaggaggatagcttgagcccaggagtttgaggctacagtgagctgtgattgcaccactgtactccagactggataacagcaagagcccatcttttaaaaaaagtaaaaattaaaaatatacttcatggttcatgtcatagccctagagaatgaaaaatttgcagtagatagtcaataaatgaatcagtagttaaatattccttaaagtcaactgtatttcattgtgatttttgttttctttttatcattgtatcaaactatatggaaatcatatggttagatgtgattatttgataatgttagtccatttgaatccattttagatatttcacaattaaagaatatgaaacttc

SEQ ID NO: 3909 - DNA, 559 bp, Homo sapiens
  source 1..559: mol_type = genomic DNA
cccacgtggtggaagcccggccctgcaggctggagaggatttgattagactacgcgtttcgacttgcagggtgtttaatcgtcgccaagcgggacttactgcaagctatcaaatctgaggtcttattttgttgagtcgaaagtgaaattttcctttggccaacgtgacagtttccttcatgtccttatcgcttcctgtccaaatctactgaaaaccccttcggctgttacttctggatgtgatgtcgcagtctttagcccatcctgtctgctagtgccatctgaaatccttcctggaacttgcatttgacattgtgcagcaaagaaatggttatggagaagcccagtccgctgcttgtagggcgggagtttgtgaggcaatattatactttgctgaataaagctccggaatatttacacaggttttatggcaggaattcttcctatgttcatggtggagtagatgctagtggaaagccccaggaagctgtttatggccaaaatgatatacaccacaaagtattatctctgaacttcagtgaatgtcatactaaaattcg

SEQ ID NO: 3910 - DNA, 945 bp, Homo sapiens
  source 1..945: mol_type = genomic DNA
ctgtggctctgtggtaggggaatgccaccaactccctgaggagcagccgtgtggtatgattggtgaacaaaaattgtttgctggcccccaggatactaactagacctttggcctgactcacaggacactaaggctccttttctgaagaagccttttaccagtctcatttaggggatgggaacaacatgtcttcacctagggactttagagcagagcctgtaaacgattatgagggaaatgactctgaagcagaagacttgaatttcagggagactttgccttcatcaagtcaggaaaacacacctagatcaaaggtttttgaaaataaagttaattcagagaaggtaaaactttctcttcggaatttcccacataatgattatgaggatgtttttgaagagccttcagaaagtggcagtgatcccagcatgtggacagccagaggccccttcagaagagacaggtggagcagtgaggatgaggaggctgcagggccatcacaggctctctcccctctactttctgatacgcgcaaaattgtttctgaaggagaactagatcagttggctcagattcggccattaatattcaattttcatgagcagacagccatcaaggattgtttgaaaatccttgaggaaaaaacagcagcgtatgatatcatgcaggaatttatggctttagaacttaagaatctgcctggtgagttcaactctgggaatcaaccaagcaacagagaaaaaaacagataccgagatattcttccatttcaacatcatggatatagtggcccaaatgagagaacaacgttctggcatggttcaaacgaaggagcagtatcacttttgttacgatattgtgcttgaagttcttcggaaacttctgactttggattaagaaagacttctgttgcctctcacttgaaattaccaagtgggtttgcac

SEQ ID NO: 3911 - DNA, 1244 bp, Homo sapiens
  source 1..1244: mol_type = genomic DNA
ctgtggctctgtggtaggggaatgccaccaactccctgaggagcagccgtgtggtatgattggtttttgaaaataaagttaattcagagaaggtaaaactttctcttcggaatttcccacataatgattatgaggatgtttttgaagagccttcagaaagtggcagtgatcccagcatgtggacagccagaggccccttcagaagagacaggtggagcagtgaggatgaggaggctgcagggccatcacaggctctctcccctctactttctgatacgcgcaaaattgtttctgaaggagaactagatcagttggctcagattcggccattaatattcaattttcatgagcagacagccatcaaggattgtttgaaaatccttgaggaaaaaacagcagcgtatgatatcatgcaggaatttatggctttagaacttaagaatctgcctggtgagttcaactctgggaatcaaccaagcaacagagaaaaaaatagataccgagatattcttccatatgattcaacacgcgttcctcttggaaaaagcaaggactacatcaatgctagttatattagaatagtcaattgtggagaagagtatttttatatcgctactcaaggaccactgctgagcaccatagatgacttttggcaaatggtgttggaaaataattcaaatgttattgccatgataaccagagagatagaaggtggaattatcaaatgctaccattactggcccatttctctgaagaagccattggaattgaaacacttccgtgtattcctggagaactaccagatacttcaatatttcatcattcgaatgtttcaagttgtggagaagtccacgggaactagtcactctgtaaaacagttgcagttcaccaagtggccagaccatggcactcctgcctcagcagatagcttcataaaatatattcgttatgcaaggaagagccaccttacaggacccatggttgttcactgcagtgccggcataggccggacaggggtgttcctatgtgtggatgtcgtgttctgtgccatcgtaaagaactgttcattcaacatcatggatatagtggcccaaatgagagaacaacgttctggcatggttcaaacgaaggagcagtatcacttttgttacgatattgtgcttgaagttcttcggaaacttctgactttggattaagaaagacttctgttgcctctcacttgaaattaccaagtgggtttgcac

SEQ ID NO: 3912 - DNA, 1401 bp, Homo sapiens
  source 1..1401: mol_type = genomic DNA
ctgtggctctgtggtaggggaatgccaccaactccctgaggagcagccgtgtggtatgattggtgaacaaaaattgtttgctggcccccaggatactaactagacctttggcctgactcacaggacactaaggctccttttctgaagaagccttttaccagtctcatttaggggatgggaacaacatgtcttcacctagggactttagagcagagcctggtttttgaaaataaagttaattcagagaaggtaaaactttctcttcggaatttcccacataatgattatgaggatgtttttgaagagccttcagaaagtggcagtgatcccagcatgtggacagccagaggccccttcagaagagacaggtggagcagtgaggatgaggaggctgcagggccatcacaggctctctcccctctactttctgatacgcgcaaaattgtttctgaaggagaactagatcagttggctcagattcggccattaatattcaattttcatgagcagacagccatcaaggattgtttgaaaatccttgaggaaaaaacagcagcgtatgatatcatgcaggaatttatggctttagaacttaagaatctgcctggtgagttcaactctgggaatcaaccaagcaacagagaaaaaaatagataccgagatattcttccatatgattcaacacgcgttcctcttggaaaaagcaaggactacatcaatgctagttatattagaatagtcaattgtggagaagagtatttttatatcgctactcaaggaccactgctgagcaccatagatgacttttggcaaatggtgttggaaaataattcaaatgttattgccatgataaccagagagatagaaggtggaattatcaaatgctaccattactggcccatttctctgaagaagccattggaattgaaacacttccgtgtattcctggagaactaccagatacttcaatatttcatcattcgaatgtttcaagttgtggagaagtccacgggaactagtcactctgtaaaacagttgcagttcaccaagtggccagaccatggcactcctgcctcagcagatagcttcataaaatatattcgttatgcaaggaagagccaccttacaggacccatggttgttcactgcagtgccggcataggccggacaggggtgttcctatgtgtggatgtcgtgttctgtgccatcgtaaagaactgttcattcaacatcatggatatagtggcccaaatgagagaacaacgttctggcatggttcaaacgaaggagcagtatcacttttgttacgatattgtgcttgaagttcttcggaaacttctgactttggattaagaaagacttctgttgcctctcacttgaaattaccaagtgggtttgcac

SEQ ID NO: 3913 - DNA, 788 bp, Homo sapiens
  source 1..788: mol_type = genomic DNA
ctgtggctctgtggtaggggaatgccaccaactccctgaggagcagccgtgtggtatgattgtaaacgattatgagggaaatgactctgaagcagaagacttgaatttcagggagactttgccttcatcaagtcaggaaaacacacctagatcaaaggtttttgaaaataaagttaattcagagaaggtaaaactttctcttcggaatttcccacataatgattatgaggatgtttttgaagagccttcagaaagtggcagtgatcccagcatgtggacagccagaggccccttcagaagagacaggtggagcagtgaggatgaggaggctgcagggccatcacaggctctctcccctctactttctgatacgcgcaaaattgtttctgaaggagaactagatcagttggctcagattcggccattaatattcaattttcatgagcagacagccatcaaggattgtttgaaaatccttgaggaaaaaacagcagcgtatgatatcatgcaggaatttatggctttagaacttaagaatctgcctggtgagttcaactctgggaatcaaccaagcaacagagaaaaaaacagataccgagatattcttccatttcaacatcatggatatagtggcccaaatgagagaacaacgttctggcatggttcaaacgaaggagcagtatcacttttgttacgatattgtgcttgaagttcttcggaaacttctgactttggattaagaaagacttctgttgcctctcacttgaaattaccaagtgggtttgcac

SEQ ID NO: 3914 - DNA, 693 bp, Homo sapiens
  source 1..693: mol_type = genomic DNA
ctgtggctctgtggtaggggaatgccaccaactccctgaggagcagccgtgtggtatgattggtttttgaaaataaagttaattcagagaaggtaaaactttctcttcggaatttcccacataatgattatgaggatgtttttgaagagccttcagaaagtggcagtgatcccagcatgtggacagccagaggccccttcagaagagacaggtggagcagtgaggatgaggaggctgcagggccatcacaggctctctcccctctactttctgatacgcgcaaaattgtttctgaaggagaactagatcagttggctcagattcggccattaatattcaattttcatgagcagacagccatcaaggattgtttgaaaatccttgaggaaaaaacagcagcgtatgatatcatgcaggaatttatggctttagaacttaagaatctgcctggtgagttcaactctgggaatcaaccaagcaacagagaaaaaaacagataccgagatattcttccatttcaacatcatggatatagtggcccaaatgagagaacaacgttctggcatggttcaaacgaaggagcagtatcacttttgttacgatattgtgcttgaagttcttcggaaacttctgactttggattaagaaagacttctgttgcctctcacttgaaattaccaagtgggtttgcac

SEQ ID NO: 3915 - DNA, 457 bp, Homo sapiens; identical to SEQ ID NO: 3878
  source 1..457: mol_type = genomic DNA

SEQ ID NO: 3916 - DNA, 676 bp, Homo sapiens
  source 1..676: mol_type = genomic DNA
aatacaattagagaaccataaagggcaaacatattaaaagagcttaattttgtagtgtggcctgcaggcttccagaaaaaaacaggagatcagtgagctagcagcagagaagccttcctggaaaaggatggaaaggcagatgtaaagtccctcatggcgaaatataacacggggggcaacccgacagaggatgtctcagtcaatagccgacccttcagagtcacagggccaaactcatcttcaggaatacaagcaagaaagaacttattcaacaaccaaggaaatgccagccctcctgcaggacccagcaatgtacctaagtttgggtccccaaagccacctgtggcagtcaaaccttcttctgaggaaaagcctgacaaggaacccaagcccccgtttctaaagcccactggagcaggccaaagattcggaacaccagccagcttgaccaccagagaccccgaggcgaaagtgggatttctgaaacctgtaggccccaagcccatcaacttgcccaaagaagattccaaacctacatttccctggcctcctggaaacaagccatctcttcacagtgtaaaccaagaccatgacttaaagccactaggcccgaaatctgggcctactcctccaacctcagaaaatgaacagaagcaagcgtttcccaaattgactg

SEQ ID NO: 3917 - DNA, 567 bp, Homo sapiens
  source 1..567: mol_type = genomic DNA
ggccgggcgtccccgcggcgctcctcgtggggcggggcgcaggcggggcggggccccctctccagccgcccgccctccggccgcgtccccgccggccctgcagacgtggcggggcgggacccgctgggcactcccgcgcgtactcggccgcctgagcgatactaaaatgtctgatgatgctggtgacaccttagccactggagacaaagcagaagttactgagatgcctaatagtgattctttacctgaggatgcagaagtgcattgtgattcagctgcagtttcacatgagccaacaccagctgaccccagaggggaggggcatgaaaatgcagctgtgcagggtgcaggggctgccgccattgggccccctgtgcagcctcaggatgccaacgccctggagccccctctcaatggagacgtgactgaggatacacttgctgaatgtattgattccgtcagccttgaggcagaacccagatccgaaatacccctgcaagaacagaattatctggctgtggattcccctccaagtggaggaggatgggcaggctggggatcctgggg

SEQ ID NO: 3918 - DNA, 564 bp, Homo sapiens
  source 1..564: mol_type = genomic DNA
gctcaaagtggcggagcgcggcggcgggaggcaggtgcacggcacccgccagtgggggtgcctcaacttccgcgggcgtttaaatagcagcctctctcccctcccaccggctgcctgctgtttcccggggagatcatgaaacgaggtcgccttcccagcagcagtgaggattctgacgacaatggcagcctgtcaactacttggtcccagaattcccgatcccagcataggagaagctcctgctccagacatgaagatcgaaagccttcagaggtgtttaggacagacctgatcactgccatgaagttgcatgactcctaccagctgaatccggatgagtactatgtgttggcagatccctggagacaggaatgggagaaaggggtccaggtgcctgtgagcccggggaccatccctcagcctgtggccagggttgtgtctgaagagaaatccctcatgttcatcaggcccaagaagtacatcgtgtcatcaggctctgagcctcccgagttgggctatgtggacatccggacgctggctgacagcgtgtgtcgctatgacctc

SEQ ID NO: 3919 - DNA, 1524 bp, Homo sapiens
  source 1..1524: mol_type = genomic DNA
aacattcagtacaatctgctgcccaggacctggacattgacagataaaatgaagaagaatatgaagaactgcttcattatgctatagtgactccaaatattgaaccctgtgcttcacagtcatctcatcctaagggagaattggtgccagatgtcagaatttctacaattcatgatattcttcatagtcaaggaaataactctgaagtaagagaaactgcaatagaagttggaaaaggatgtgatttccatatttcaagtcattcaaagacagatgagtcatcaccagtgttatcgccaaggaagccttctcacccagtcatggattttttcagttcacatcttttagctgactcttcctcaccagcaacaaattctagtcatacagatgcccatgaaatacttgtgagcgattttcttgtttctgatgaaaaccttcagaagatggaaaatgtgcttgatctttggagttcaggtcttaagacaaacatcatatctgaactaagtaaatggagacttaattttattgactggcaccgaatggaaatgagaaaagagaaagaaaaacatgcagcacatttaaaacaactgtgtaatcagatcaatgaattgaaggagctgcaaaaaacctttgaaatctccattgggagaaaagatgaggtgatttctagcttgtctcatgccataggcaagcaaaaggaaaagatagagttgatgagaacattcttccactggcgaatcggccatgtcagagccagacaggatgtttatgaaggtaaactagctgaccagtactaccagagaactttactgaagaaagtctggaaagtctggcgttccgtagtgcaaaagcagtggaaagatgtggtagaaagagcttgtcaagcaagagctgaagaagtttgtatccagatttccaatgattatgaagccaaagttgctatgttatctggagctttggaaaatgcaaaagctgagattcaaagaatgcaacatgaaaaagagcactttgaagattccatgaaaaaagctttcatgaggggtgtatgtgcattaaatcttgaagccatgactatatttcaaaacagaaatgatgcagggatagactccacaaataataaaaaggaagagtatggtcctggtgttcaaggaaaagaacattctgctcatttggatccttcagctcctccgatgcccttaccagttacatcaccactgctgccatccccaccagccgccgtcggaggagccagcgcgactgccgttccctcagctgcttcgatgacttctaccagggctgcttccgcatcttctgttcacgttcctgtttctgctcttggtgcaggatctgcagctactgctgcatcagaagaaatgcaaaccattcctcaagcaactgcagcaaaatatccccggaccattcatcctgaaagtagtacctcagcttccagatcacttggaaccagatcagctcacacccagtctctcacaagtgttcattccataaaagtggttgactaaagtg

SEQ ID NO: 3920 - DNA, 591 bp, Homo sapiens
  source 1..591: mol_type = genomic DNA
cagagtttatcaactactgccctgaagggcgcttttctgttttagctgctttcaagcaaatctgtgtcttttagaattgtcaaccttcagctctttttggttgggcaaaattaaacagttctatttttaataacagcgaagaaacatatgtatttaatattgggatcatttaccacgagcgattacatgaggcatggtttcttaaacgctaaagtggcttaaaaaagggaatttagttggatataaaagtaaatttcagagcaaagtctgaaatggatgttacatgagtcattttaagggatgcacacaactatgaacatttctgaagattttttctcagtaaagtagataaagatggatgaatcagccttgttggatcttttggagtgtccggtgtgtctagagcgccttgatgcttctgcgaaggtcttgccttgccagcatacgttttgcaagcgatgtttgctggggatcgtaggttctcgaaatgaactcagatgtcccgagtgcaggactcttgttggctcgggtgtcgaggagcttcccagtaacatcttgctggtcagacttctggatggcatcaaacagagg

SEQ ID NO: 3921 - DNA, 854 bp, Homo sapiens; identical to SEQ ID NO: 3827
  source 1..854: mol_type = genomic DNA

SEQ ID NO: 3922 - DNA, 578 bp, Homo sapiens
  source 1..578: mol_type = genomic DNA
agatgattccctgattctccagagagattacacacttcgtttgtggctaaggttactgtgacccaatgaaagaagaaaatgaaagccataaagaaaagtcttacagaagaagaatacctgtacctggacttttctcaccaaacagaaggatgcatctttcctcttcatacatctgtaactttatttctgttatcttactgtgactgtaaaatctttaaaatttgcttagttgtcaccaaagaggtgagtagagatagttcactactaagagatgacctgatccaggatgttgaaatacagattatttcaaggcaggagctcccaccaatagtccaaaattgctgtttgcctgcagtagtagaacgatcagacaatttttgtagagcaggacttgctgttgtattgagacacataatccagaaatcctatgaagcagaccccttaaagaaggaacttttggaacttctgggctttaaaaagacttgcttgaaagcctgtgctgaagttagtcagtggaccaggctatgtgaactcaccatccctttggctattgagaattttctcagagaatcttctga

SEQ ID NO: 3923 - DNA, 782 bp, Homo sapiens
  source 1..782: mol_type = genomic DNA
gctttgtgtaactgggcagagctaacacctgagctgttaaagatcctgcattctcagcatgctcttcactaggatttgcaaaggtaactgccacacagagccatctttaccttcctaacaccccctcccgccccttgccatgtgctgggagatgtggacctggcctggggacagggtgtttctcagggccttgtctcaacttctcccacaacctctgtgttgtgtctgtcccctgccctgcaggttgctggcagactgatcatccgtgcagaggagctggcccagatgtggaaagtggtgaatctcccaacagatctgtttaatagtgtgatgaatgtgggtcgcttcacggaggagatcgagtggctgaagtttttagcccttgcttgcagcgctctgggagttactattaccaaaactctcaagatagtgtgtgaggtcttatcatgtgaccacaatggtgggttgccccgaatcccattcagcaccttccagtttctctacacgtatattgccgaagtggatggggagatctgtgcatcacatgtcagcaggatgctaaactacattgaacaggaagtaattggtcctgatggtttaatcacggtgaatgactttacccaaaaccccagggtttggctggagtaacagcacaattttggcaattttaaaggaagatacagaggtgattgtacttcagaatgataaacccatataccacctaaaatcaattttcttgtacaactggtacacactaataaacaaacatgtgagatcagaaa

SEQ ID NO: 3924 - DNA, 577 bp, Homo sapiens
  source 1..577: mol_type = genomic DNA
aaaagaggttgtgtcgacggaggcagaagcgacgcagatgcgaaagtggcggcctccgggcaccatttctgtgcacggaaacagaatccgggtttgaaggcagccgccgcttcgcttacccagtacctagtgttccgtcgtgtttgaccaacccccctctccctgccaccgcgggtttaatccgaacgtgttcggatactggaactcatttgacattgtgcagcaaagaaatggttatggagaagcccagtccgctgcttgtagggcgggagtttgtgaggcaatattatactttgctgaataaagctccggaatatttacacaggttttatggcaggaattcttcctatgttcatggtggagtagatgctagtggaaagccccaggaagctgtttatggccaaaatgatatacaccacaaagtattatctctgaacttcagtgaatgtcatactaaaattcgtcatgtggatgctcatgcaaccttgagtgatggagtagttgtccaggtcatgggtttgctgtctaacagtggacaaccagaaagaaagtttatgcaaacctttgttctggctcc

SEQ ID NO: 3925 - DNA, 1134 bp, Homo sapiens
  source 1..1134: mol_type = genomic DNA
ttcaggaatgtctgatcacagatacggggatggtggctctactttccagagcacaacaggacactgtgtacacatgcggggattaccttacagagctactgagaatgacatttataattttttttcaccgctcaaccctgtgagagtacacattgaaattggtcctgatggcagagtaactggtgaagcagatgtcgagttcgcaactcatgaagatgctgtggcagctatgtcaaaagacaaagcaaatatgcaacacagatatgtagaactcttcttgaattctacagcaggagcaagcggtggtgcttacggtagccaaatgctaggaggcatgggtttgtcaaaccagtccagctacgggggcccagccagccagcagctgagtgggggttacggaggcggctacggtggccagagcagcatgagtggatacgaccaagttttacaggaaaactccagtgattttcaatcaaacattgcataggtaaccaaggagcagtgaacagcagctactacagtagtggaagccgtgcatctatgggcgtgaacggaatgggagggttgtctagcatgtccagtatgagtggtggatggggaatgtaattgatcgatcctgatcactgactcttggtcaaccttttttttttttttttttttttctttaagaaaacttcagtttaacagtttctgcaatacaagcttgtgatttatgcttactctaagtggaaatcaggattgttatgaagacttaaggcccagtatttttgaatacaatactcatctaggatgtaacagtgaagctgagtaaactataactgttaaacttaagttccagcttttctcaagttagttataggatgtacttaagcagtaagcgtatttaggtaaaagcagttgaattatgttaaatgttgccctttgccacgttaaattgaacactgttttggatgcatgttgaaagacatgcttttatttttttgtaaaacaatataggagctgtgtctactattaaaagtgaaacattttggcatgtttgttaattctagtttcatttaataacctgtaaggcacgtaagtttaagctttttttttttttaagttaatgggaaaaatttgagacgcaataccaat

SEQ ID NO: 3926 - DNA, 545 bp, Homo sapiens; identical to SEQ ID NO: 3841
  source 1..545: mol_type = genomic DNA

SEQ ID NO: 3927 - DNA, 685 bp, Homo sapiens
  source 1..685: mol_type = genomic DNA
aaaagtgtagcaacaactgagtttgctgtctcactaccctcagcctaggccaacctggactccttcaccccaaatgaggtgaccgctacattttatatgaagacactgatttaccattcaactgtgatccatcttataacatggcaatccaatacagacaggaagataaaactcaacaacagctaaaataaagtgtattcccagaatacacattgcagaaaaaggatgaagttgaccagtgaaaagttgcccaagaaccccttttatgcctctgtatctcagtatgctgctaaaaaccaaaaatttttccagtggaaaaaggaaaagactgattacacccatgctaatttggtggataaggcattgcagctcttgaaggaaagaatactgaaaggagacactctggcatatttcctacgaggtcaactatattttgaagagggatggtatgaagaagcattagaacagtttgaagaaatcaaggagaaagaccatcaagcaacttaccagctaggagtgatgtactatgatgggctggggaccactctagacgctgagaaaggggtggactatatgaagaaaattcttgattctccatgtcccaaagcaagacacttaaaatttgcagctgcttacaacctcggaagagcttattatgaaggaaaaggtgttaaacgatcaaatg

SEQ ID NO: 3928 - DNA, 629 bp, Homo sapiens
  source 1..629: mol_type = genomic DNA
gatgtgggtgagttcatttgctcgcgtgcaggggaagtctggagaaggcattgtttcaattattaaaagtgtgggggcagtgggcggaacaaacgcgccgactacagaggctggacttgccaaaacaaaggggatttggtgatggaggctttgttagaaggaatacaaaatcgagggcatggtgggggatttttgacatcttgtgaagcagaactacaggagctcatgaaacagattgacataatggtggctcataaaaaatctgaatgggaaggacgtacacatgctctagaaacttgcttgaaaatccgtgaacaggaacttaagagtcttaggagtcagttggatgtgacacataaggaggttggaatgttgcatcagcaggtagaagaacatgaaaaaatcaagcaagagatgaccatggaatataagcaggagttgaagaaactacatgaagaattatgcatactgaagagaagctatgaaaagcttcagaaaaagcaaatgagggaattcagaggaaataccaaaaatcacagggaagatcggtctgaaattgagaggttaactgcaaaaatagaggaattccgtcagaaatcgctggactgggagaagcaacgcttgattta

SEQ ID NO: 3929 - DNA, 3560 bp, Homo sapiens
  source 1..3560: mol_type = genomic DNA
cataacaagccaaacgccagaccgagagtgcctccgtgcgcgagtgcccggtgtgtgcgcgccggcgagagcaggggcccgcccggctccccgcccgccgcggcccgaactcatgcagctccgagcgagcgagcggcgcccagcccagcgcctcggccgaacccctccgcagcaggctgcctgctgtttcccggggagatcatgaaacgaggtcgccttcccagcagcagtgaggattctgacgacaatggcagcctgtcaactacttggtcccagaattcccgatcccagcataggagaagctcctgctccagacatgaagatcgaaagccttcagaggtgtttaggacagacctgatcactgccatgaagttgcatgactcctaccagctgaatccggatgagtactatgtgttggcagatccctggagacaggaatgggagaaaggggtccaggtgcctgtgagcccggggaccatccctcagcctgtggccagggttgtgtctgaagagaaatccctcatgttcatcaggcccaagaagtacatcgtgtcatcaggctctgagcctcccgagttgggctatgtggacatccggacgctggctgacagcgtgtgtcgctatgacctcaatgacatggatgctgcatggctggaactgaccaatgaagaatttaaggagatgggaatgcctgaactagatgaatacaccatggagagggtcctagaggaatttgagcagcgatgctacgacaatatgaatcatgccatagagactgaggaaggcctggggatcgaatatgatgaagatgttgtctgtgatgtctgccagtctcctgatggtgaggacggcaatgagatggtgttctgtgacaaatgcaacatctgtgtgcaccaggcctgttatggaatcctcaaggtaccagagggcagctggctgtgccggacatgtgccctgggggttcagccaaaatgtctgctgtgtccgaagaagggtggagctatgaagcccacccgtagcggaaccaagtgggtccacgttagctgtgctctgtggatccctgaggtgagcattggcagcccagagaagatggagcccatcaccaaggtgtcacacattcccagcagccggtgggcgctagtgtgcagcctctgcaatgagaagtttggggcctctatacagtgctctgtgaagaactgccgcacagccttccatgtgacctgtgcttttgaccggggcctggagatgaagaccatcttagcagagaatgatgaagtcaagttcaagtcctattgcccaaagcacagctcacataggaaacccgaggagagtcttggcaagggggctgcacaggagaatggggcccctgagtgttccccccggaatccgctggagccctttgccagccttgagcagaaccgggaggaggcccaccgggtgagtgtccgtaagcagaagctgcagcagttggaggatgagttctacaccttcgtcaacctgctggatgttgccagggctctgcggctgcctgaggaagtagtggatttcctgtaccagtactggaagttgaagaggaaggtcaacttcaacaagcccctgatcaccccaaagaaagatgaagaggacaatctagccaagcgggagcaggatgtcttatttaggaggctgcagctgttcacgcacctgcggcaggacctggagagggtaatgattgacactgacaccttatagtgacttagagaagaagatgcaaagaggcgaacgctcgcccagagcaagaaatgatagccagtcatatactctcagacccttgtacacaccacagcatgaggttgtgttggttaaaaatatttatgggctggtaaactcattgtacatatgtgcaaaactgctactgagtggggagcttctttgtggtttttttttttttaaaaacactttcccattaatctttactgttttgtaagatcaaatggggtgtgtcttccccacccccattccttcattctagagctagagtgaatgagccccaagaaaatgacccaaggagttgactcaggatggtttacagactgatttagaaaaccagaacggatttcatttctaatggagggggccagagatgggaaaatttcttgttcagtccggggaaacacacctaggtgctggtgatgggcttatgaaggaagctaagcacggctgctcactggcccccactttgtttcttgggtaattcacaggggaattcccagtactgtcatggagcagagcaggcagtgggtgctgatgtgtgtgcatgagctgtatgtacacatgcatatatctgttacagaagatactcctggcagtgaggtgctaagtcatcactgaggctgtgtgtgtgtgtgtgtgtgcgcgtgcccgtgtccatccatgtctctgttgtgtgtctgtgtgcgggtatgggtgggattcctggtggacaggggtgtcagatctgtctgaggagccccagtcatgctcagcacgctacagatgtgttgtttgtcacactgagattgctgaatgtcgtggctgttggctgccgagcctcagctgctggcatttccttctgctgtttgctgcttttgtgcctcccccactttccatcacctctggagtcccgtctggacgtcccttcctgctacaggaataatgaggcgtgggctgcctcccgctagggcctcctgctccctgtaggtagtttctggctgaggcttgctaattggggatgcttcttagagcatcttccacatcaactcccctggctgctggctaccgattaaattcattagtgtgaaagaggtgggagtgaggttttctggcctgaagcagtctgcactgaaaggtacccaagtggcctgaaacagtgtagggaaagacctgggaaacactggaccaaaaaagcctgatctcatggagacctgcatggccctgttagagatggcgtagaagtgaaagtcttaaagggagcattagagatccttttaatacacgactgagtgccagcttatttgtgatgccccttcccagaccaggttaggattcctgggaaggccgcggattccggccctggaagaggcaggatcctggagcagttttgtgaggcttttgtgctcccatacgccccctggtggtgagtgtaaagaagactttgcctctcacaactacatgtatgtgtggcatttttgttagagatgagaaaaggattgagaaggataaactggaatcctggtaagaagcctttatgccagcccgacacctgctgtaattggggtgcatgagctatggagtcagatagttgttgggagggggaggacaagaagtctattgtttggactgtgtttgtctcacaatcaccacaaaataaaagtgtagaaaatgcttgtggtgtactaactcttttctgtacttaagttactcagattaacatgcacttctaattctaaacattttttttggagtcatcactgtcgctgtttaagtagaacaatgccaacgatgtatgagaaacagggaataaatcaggatttgtgtgtgta

SEQ ID NO: 3930 - DNA, 441 bp, Homo sapiens
  source 1..441: mol_type = genomic DNA
agtgcctccgggtcgcggtcattttgagcccctgtctggatgacttcttgcggctgttctacccctccccctccccgcgtcgcctgctgctgtcgtcgggaggtgggtgaggtgacgcaaacagccccgttgttgccctccgcgtatcccctcaccacctttgcggccatccacgactttcgcaccttccgccattttcctgcctgtgagggtggacagatcgcgctcgggtctcggcctcctgagtgccggtgactgcgggaggcgacggagtgcttctgggggtgtgagctggggaagttcgtggtcacggatgcgtgtggggttgctgctcagtctgtaacggcaggaaagatgaatgggagggctgattttcgagagccgaatgcagaggttccaagaccaattccccacatagggcctgattacattccaacagag

SEQ ID NO: 3931 - DNA, 1339 bp, Homo sapiens
  source 1..1339: mol_type = genomic DNA
ctgtggctctgtggtaggggaatgccaccaactccctgaggagcagccgtgtggtatgattgtaaacgattatgagggaaatgactctgaagcagaagacttgaatttcagggagactttgccttcatcaagtcaggaaaacacacctagatcaaaggtttttgaaaataaagttaattcagagaaggtaaaactttctcttcggaatttcccacataatgattatgaggatgtttttgaagagccttcagaaagtggcagtgatcccagcatgtggacagccagaggccccttcagaagagacaggtggagcagtgaggatgaggaggctgcagggccatcacaggctctctcccctctactttctgatacgcgcaaaattgtttctgaaggagaactagatcagttggctcagattcggccattaatattcaattttcatgagcagacagccatcaaggattgtttgaaaatccttgaggaaaaaacagcagcgtatgatatcatgcaggaatttatggctttagaacttaagaatctgcctggtgagttcaactctgggaatcaaccaagcaacagagaaaaaaacagataccgagatattcttccatatgattcaacacgcgttcctcttggaaaaagcaaggactacatcaatgctagttatattagaatagtcaattgtggagaagagtatttttatatcgctactcaaggaccactgctgagcaccatagatgacttttggcaaatggtgttggaaaataattcaaatgttattgccatgataaccagagagatagaaggtggaattatcaaatgctaccattactggcccatttctctgaagaagccattggaattgaaacacttccgtgtattcctggagaactaccagatacttcaatatttcatcattcgaatgtttcaagttgtggagaagtccacgggaactagtcactctgtaaaacagttgcagttcaccaagtggccagaccatggcactcctgcctcagcagatagcttcataaaatatattcgttatgcaaggaagagccaccttacaggacccatggttgttcactgcagtgccggcataggccggacaggggtgttcctatgtgtggatgtcgtgttctgtgccatcgtaaagaactgttcattcaacatcatggatatagtggcccaaatgagagaacaacgttctggcatggttcaaacgaaggagcagtatcacttttgttacgatattgtgcttgaagttcttcggaaacttctgactttggattaagaaagacttctgttgcctctcacttgaaattaccaagtgggtttgcac

SEQ ID NO: 3932 - DNA, 573 bp, Homo sapiens
  source 1..573: mol_type = genomic DNA
ctgcgcagaccccgcctcccaccgcaggggcacgcctcctacccccacccttcgcggattgatcctgctggccgcagccacccacgtggtggaagcccggccctgcaggctggagaggatttgattagactacgcgtttcgacttgcagggtgtttaatcgtcgccaagcgggacttactgcaagctatcaaatctgaggtcttattttgttgagtcgaaagtgaaattttcctttggccaacgtgacagcatttgacattgtgcagcaaagaaatggttatggagaagcccagtccgctgcttgtagggcgggagtttgtgaggcaatattatactttgctgaataaagctccggaatatttacacaggttttatggcaggaattcttcctatgttcatggtggagtagatgctagtggaaagccccaggaagctgtttatggccaaaatgatatacaccacaaagtattatctctgaacttcagtgaatgtcatactaaaattcgtcatgtggatgctcatgcaaccttgagtgatggagtagttgtccaggtcatgggtttgctgtctaa

SEQ ID NO: 3933 - DNA, 859 bp, Homo sapiens
  source 1..859: mol_type = genomic DNA
atgaaaggatggggacctcaccagagaggactggtctcagcaatgtccttaagtggtcaaaacatgctgcggttgagtctccacccacatttgcacaaaggaccatcacctgtccttcctggaatctctaaagttttctgctttccttctgtcctgatggccagctctgctaagtcagctgagatgcccaccatctccaaaaccgttaaccctactcctgatcctcatcaagaatatctggaccctaggattaccattgccttattcgaaattggatcacattccccttcctcctggggctctctccctttcctaaagaatagcagccatcaagttacagaacaacagactgcacagaagtttaacaatctcttaaaagaaattaaagatattcttaaaaatatggcaggttttgaagagaagatcacagaagcaaaagaactttttgaggaaaccaatattactgaggatgtgtcagcccacaaagaaaatatcagaggacttgacaaaatcaatgaaatgttatcaacaaacctgcctgttagtttagccccagagaaagaagacaatgaaaagaaacaggagatgatattggaaaccaatattactgaggatgtgtcagcccacaaagaaaatatcagaggacttgacaaaatcaatgaaatgttatcaacaaacctgcctgttagtttagccccagagaaagaagacaatgaaaagaaacagcagatgataatggaaaaccagaactctgagaacaccgcacaagtttttgcaagagatttggtaaatcgtttagaagaaaaaaaagtccttaacgaaactcaacaaagtcaggaaaaagcaaaaaacagactta

SEQ ID NO: 3934 - DNA, 3692 bp, Homo sapiens
  source 1..3692: mol_type = genomic DNA
agcacttgaagttcaggcagcgagagttgacatggggccagggctgcgcccctggggcgggttgaagacagggtgagtctcttgatattcaggaaatcatcgcgcacccagtcaccagcgttcgggagcctgtcgcagcgggaccgacggaatccggagcaggcgacagggcgcagaagcgggatgtacttctgttggggcgccgactccagggagctgcagcgccggaggacggcgggcagccccggggctgagctactgcaggcggccagcggggagcgccactctctgctgctgctgaccaaccacagggtcctctcgtgcggagacaacagcaggggtcagctgggccgcaggggcgcgcagcgcggggagctgccagaaccaattcaggcattggaaaccctaattgttgatctcgtgagctgcgggaaggagcactccctggctgtgtgccacaaaggaagggtcttcgcatggggagctggttctgaagggcagctggggattggagaattcaaggaaataagtttcacacctaagaaaataatgactctgaatgatataaaaataatacaagtttcctgtggacactaccactccctggcattatcaaaagatagccaagtgttttcgtggggaaagaacagccatgggcagctgggcttggggaaggagttcccctcccaagccagcccgcagagggtgaggtccctggaggggatcccactggctcaggtggctgccggaggggctcacagctttgccctgtctctctgtgggacttcgtttggctggggaagtaacagtgccgggcagctggccctcagtgggcgtaatgtcccagtgcaaagcaacaagcctctctcagtcggtgcactgaagaatctaggtgtggtttatatcagctgtggtgatgcacacactgcggtgcttacccaggacgggaaagtgttcacatttggagacaatcgctctggacagctgggatacagccccactcctgagaagagaggtccacaacttgtggaaagaattgatggcctagtttcgcagatagattgtggaagttatcacaccctggcatatgtgcacaccactggtcaggtggtatcttttggtcatggaccaagtgacacaagcaagccaactcatccggaggccctgacagagaactttgacattagctgcctgatttctgctgaagacttcgtggatgttcaagtcaaacacatttttgctggaacatatgccaactttgtgacaactcatcagtgaaattagaatgatattttcatctcctgcttgtctgactgcaagttttttaaagaaaagaggaactggagaaacgacttccattgatgtggacttagaaatggcaagagataccttcaagaagttaacaaaaaaggaatggatttcttccatgataactacgtgtctcgaggatgatctgctcagagctcttccatgccattctccacaccaagaagctttatcagttttcctcctgctcccagaatgtcctgtgatgcatgattctaagaactggaagaacctggtggttccatttgcaaaggctgtgtgtgaaatgagtaaacaatctttgcaagtcctaataaacaaagctaactgtcgactaccagaaaatactttcaacataaatgaactctccaacttattaaacttttatatagatagaggaagacagctctttcgggataaccacctgatacctgcagaaacccccagtcctgttattttcagtgattttccatttatctttaattcgctatccaaaattaaattattgcaagctgattcacatataaagatgcaggctggagtacaatggtgcaatctcagctcaccacaacctctgcctcccgggttcaagcgattcttctgcctcagcctcccaaatgtcagaaaagaaagcatacatgcttatgcatgaaacaattctgcaaaaaaaggatgaatttcctccatcacccagatttatacttagagtcagacgaagtcgcctggttaaagatgctctgcgtcaattaagtcaagctgaagctactgacttctgcaaagtattagtggttgaatttattaatgaaatttgtcctgagtctggaggggttagttcagagttcttccactgtatgtttgaagagatgaccaagccagaatatggaatgttcatgtatcctgaaatgggttcctgcatgtggtttcctgccaagcctaaacctgagaagaaaagatatttcctctttggaatgctgtgtggactctccttattcaatttaaatgttgctaaccttcctttcccactggctctgtataaaaaacttctggaccaaaagccatcattggaagatttaaaagaactcagtcctcggttggggaagagtttgcaagaagttctagatgatgctgctgatgacattggagatgcgctctgcatacgcttttctatacactgggaccaaaatgatgttgacttaattccaaatgggatctccatacctgtggaccaaaccaacaagagagactatgtttctaagtatattgattacattttcaacgtctctgtaaaagcagtttatgaggaatttcagagaggattttatagagtctgtgagaaggagatacttagacatttctaccctgaagaactaatgacagcaatcattggaaatactgattatgactggaaacagtttgaacagaattcaaagtatgagcaaggataccaaaaatcacatcctactatacagttgttttggaaggctttccacaaactaaccttggatgaaaagaaaaaattcctctttttccttacaggacgtgataggctgcatgcaagaggcatacagaaaatggaaatagtatttcgctgtcctgaaactttcagtgaaagagatcacccaacatcaataacttgtcataatattctctccctccctaagtattctacaatggaaagaatggaggaagcacttcaagtagccatcaacaacaacagaggatttgtctcacccatgctcacacagtcataatcacctctgagagactcagggtgggctttctcacacttggatccttctgttcttccttacacctaaataatacaagagattaatgaatagtggttagaagtagttgagggagagattgggggaatggggagatgatgatgatggtcaaagggtgcaaaatctcacacaagactgaggcaggagaatagggtacagagatagggatctaaggatgacttggacacactccctggcactgaagagtctgaacactggcctgtgattggtccattccaggaccttcatttgcataaggtatcaaaccacatcagcctctgattggccatgggccagacctgcactctggccaatgattggttcattccaggacattcatttgcataaggagtcaaaccacaccagtcttggattggctgtgagccaattcacctcagtctctaattggctgtgagtcagtctttcatttacatagggtgtaaccatcaagaaacctctacagggtacttaagccccagaagattttgctaccagggctcttgagccacttgctctagcccactcccaccctgtggaatgtactttcacttttgctgcttcactgccttgtgctccaataaatccactccttcaccaccc

SEQ ID NO: 3935 - DNA, 583 bp, Homo sapiens
  source 1..583: mol_type = genomic DNA
gcacattcactatccaagctgcaccatcttcggggtcattgtgtgccaggcatatcaactcttttcaataaaaatgtttttctagccacttcccagcactcgcagcatgaagctcacaccagaagtttccagagatcaccccagaggtgataagatctcgcccgcccttccgtcccaggatagtgtgattgcgggaccatggaatttacaaggatggaaaggcagatgtaaagtccctcatggcgaaatataacacggggggcaacccgacagaggatgtctcagtcaatagccgacccttcagagtcacagggccaaactcatcttcaggaatacaagcaagaaagaacttattcaacaaccaaggaaatgccagccctcctgcaggacccagcaatgtacctaagtttgggtccccaaagccacctgtggcagtcaaaccttcttctgaggaaaagcctgacaaggaacccaagcccccgtttctaaagcccactggagcaggccaaagattcggaacaccagccagcttgaccaccagagaccccgaggcgaaagtgggatttctgaaacctgtaggccc

SEQ ID NO: 3936 - DNA, 2569 bp, Homo sapiens
  source 1..2569: mol_type = genomic DNA
gccggaacaaaaatgcctcagtttggaggtcgcgctcactgcgacggcaggctttgagtgtagcacttggtagttcttcctctgctctgcttcccttcggaggaaaatttcaggctgaaggtttagcgggtgccgcctctaaagagagcaatcactacacttatggctgggattttgcgcttagtagttcaatggcccccaggcagactacagactgtgacaaaaggtgtggagtctcttatttgtacagattggattcgtcacaaattcaccagatcaagaattccagaaaaagtgtttcaggcctcacctgaagatcatgaaaaatacggtggggatccacagaaccctcataaactgcatattgttaccagaataaaaagtacaagaagacgtccatattgggaaaaagatataataaagatgcttggattagaaaaagcacatacccctcaagttcacaagaatatcccttcagtgaatgcaaaattgaaagtagttaagcatttgataagaatcaagcccttgaagttgccacaaggacttccagcagaggagaacatgtctaacacgtgcctcaaaagcactggggagttagtagtgcagtggcatctgaaacctgtggagcagaaagcacatgagtcctaatgccccagcagcttccgattggaaaatgcaaattgtttttatttaaagatggtgagaaagtgttttcattaaaatatgttttcaaaaccattttcaggccgggcacggtggctcacctgtaatcccagcactttgggaggccaaggcgggcagatcacctgaggtcaagagttcgagaccagcctgaccaacatggagaaacccccatctctactgaaaatacagaattagccaggcatggtggcacatgcctgtaacccagctactcgggaggctgaagcaggagaatcacttgaacccgggaggcagaggttgcagtgagctgagatggtgccactgtactccagcctgggtgataggatgagactccatctcaggggaaaaaaaaaaatttttttttcactgactaaacctgctgcagctctcttttactacagacttggagattttagtttaatttggtttaattctctgtcctttccctttcactgtttcactccaaaacatgtaagaatggcaatgtttgaacatctgcgtttgggtctactgccaccttagcaagcctcattaaccattttataaaaattgcgttagtattgttgttgttgtttttgagacagggtcttgctctgtcacccaagctggaatacagtggcatgatttcagttcactgcagcctcgacctcccaggctcaagtgatcctcccacctcagcctccagagtagctaggactacaggcagtgtgccaccacatccagctaattttttaaagttttttcatagagacagggactcactatgttgtccaagctggtctcaaactcctgggttcaagccatcctcccacctcagcctcccaaaatgctgggattacaggcatgagccactgtacccagccaaaattgttttcttttttaagtgaattcaacaatttctgtgagtggctctttgcatgaacactgtgcaaggtgttggagaaatccaaagctgaccaaaacatggtccccaccttttggagcttacagtctgttctggggaacagagattcagccaaagtcaagaaacactggatgccagctagattatctgttctgtgctttggtgtctataagtacatatgtggatatgggttcattttatccctaaacttagtaccaaaccagcatttaatatctaattataaatctaatttggcctaaactttattattgcacactgcctgaacaaaacctatttgtctctatgtaaattttttcctcatggaacaagggtgtgaaatgaaaatattttaggatttattcaaaaacagactattctgttttcagcttcagaattgttctttgaatcctaaggaacctctgtcaacagttgaggttgctgttgaaaagaaagaagaaggaggcggaaatctctcagggagaattatttcctttcttttctattttagatacctggaggggtggggagaagtaagaattgtaagggaggttcagtagtggggaattctgtgacagctgattgaagatgatgatgaagaacctctgcattctagttaccctttgcttcccttcacctcttgtaaaatttggcttggcaacaatgacattgtcatgcttattgtcccaatatccatcctgtcgtagatcttaatgtttttgatcgttgcgttaaagtggaagtgccacccacagtgaaaccagatcccattaataaataagcttaaaggcaactgcagttttaattccatagttattgaatatccagtgtgtgtaaggcctggaggggagccaaaggacactaacttctaagagctccgtctagttggagagaaacctgtgtgccacaacatacagtgtccttgcttatgtggggtcgaagacatctgtgaaaataaaagcagcctctgctaatttagcgcca

SEQ ID NO: 3937 - DNA, 594 bp, Homo sapiens
  source 1..594: mol_type = genomic DNA
gcctccgggtcgcggtcattttgagcccctgtctggatgacttcttgcggctgttctacccctccccctccccgcggaaagatgaatgggagggctgattttcgagagccgaatgcagaggttccaagaccaattccccacatagggcctgattacattccaacagaggaagaaaggagagtcttcgcagaatgcaatgatgaaagcttctggttcagatctgtgcctttggctgcaacaagtatgttgattactcaaggattaattagtaaaggaatactttcaagtcatcccaaatatggttccatccctaaacttatacttgcttgtatcatgggatactttgctggaaaactttcttatgtgaaaacttgccaagagaaattcaagaaacttgaaaattccccccttggagaagctttacgatcaggacaagcacgacgatcttcaccacctgggcactattatcaaaagtcaaaatatgactcaagtgtgagtggtcaatcatcttttgtgacatccccagcagcagacaacatagaaatgcttcctcattatgagccaattccattcagttcttctatgaatgaatct

SEQ ID NO: 3938 - DNA, 599 bp, Homo sapiens; identical to SEQ ID NO: 3821
  source 1..599: mol_type = genomic DNA

SEQ ID NO: 3939 - DNA, 549 bp, Homo sapiens
  source 1..549: mol_type = genomic DNA
gcattttaccggcttggcctctgacggggatggggatgggggtgggggagcgggaagaccagcgatttcacatttagagaaccgactgctggtcggaggccgagatggggggaaagagccagttccgtcgccttaaactgccgtctggttgtcaggcctccccggtttcgtcgtcgaccatgctgctttcttttttgccacttcttgggagaaaaatgtggagaatatcgcgctgagccatgaataagggtgggggagcaatgggaagaaatattcgatgggcttctccaaggccgaatacatcaagcaatggtaacatctttaaatgaagataatgaaagtgtaactgttgaatggatagaaaatggagatacaaaaggcaaagagattgacctggagagcatcttttcacttaaccctgaccttgttcctgatgaagaaattgaacccagtccagaaacacctccacctccagcatcctcagccaaagtaaacaaaattgtaaagaatcgacggactgtagcttctattaagaatgaccctccttca

SEQ ID NO: 3940 - DNA, 572 bp, Homo sapiens
  source 1..572: mol_type = genomic DNA
agtgacgttacttccctttttccggtccgccggattatgaatgacggccggcgcgagtattttccacataaggtggctgtcgtttttctcctggcgtctgtggaggcgagtggtctgcgggcagcagctcccagaggcagccttggaattccagctcggactgggcgggaaggcgcaggcggcccaggtcgccgacacgctcacgcaccctccctgcctggccgcgcctctgcgaccaggtaaagagggcgctcgggccgccggcttctcagcctccgcgaccccctaagaactggtcttttcttcgggggtctgcagggctgaggatgcgggggaagggtgggaaggacaagggcgtggtatcatcgtcctgatttttctcccgccctggggccgcctcaaactcctttttggccactcctgctgaaggtgacccaatgaaagaagaaaatgaaagccataaagaaaagtcttacagaagaagaatacctgtacctggacttttctcaccaaacagaaggatgcatctttcctcttcatacatctgtaactttatttctgttatcttactg

SEQ ID NO: 3941 - DNA, 566 bp, Homo sapiens
  source 1..566: mol_type = genomic DNA
aacggcgggaaggctcaggggcgtgcttgcggcaaccctgtaaccgccggtgcgcaagttggaggggcaaggggctgccgtgtcctggtctggaggcggcccaggctgccttggtgattctggcttcgcggcctcatggcttgcggccggtttgcgcaacggcctgcgaaccaccaggcgcgtccccgccggcttgggtccgccccgaagcccagtccctcggcctggcccgctatgccctgcacactggcggagtctggcgtggcgcagcccggcgtggggttcggccccgccaggtggtcagcccttcctcggagtccaggtggctgggggcgcttcggagagtggccagttgccaaaacaaaggggatttggtgatggaggctttgttagaaggaatacaaaatcgagggcatggtgggggatttttgacatcttgtgaagcagaactacaggagctcatgaaacagattgacataatggtggctcataaaaaatctgaatgggaaggacgtacacatgctctagaaacttgcttgaaaatccgtgaacaggaacttaagagt

SEQ ID NO: 3942 - DNA, 818 bp, Homo sapiens
  source 1..818: mol_type = genomic DNA
ctgtggctctgtggtaggggaatgccaccaactccctgaggagcagccgtgtggtatgattggtttttgaaaataaagttaattcagagaaggtaaaactttctcttcggaatttcccacataatgattatgaggatgtttttgaagagccttcagaaagtggcagtgatcccagcatgtggacagccagaggccccttcagaagagacaggtggagcagtgaggatgaggaggctgcagggccatcacaggctctctcccctctactttctgatacgcgcaaaattgtttctgaaggagaactagatcagttggctcagattcggccattaatattcaattttcatgagcagacagccatcaaggattgtttgaaaatccttgaggaaaaaacagcagcgtatgatatcatgcaggaatttatgacgggaactagtcactctgtaaaacagttgcagttcaccaagtggccagaccatggcactcctgcctcagcagatagcttcataaaatatattcgttatgcaaggaagagccaccttacaggacccatggttgttcactgcagtgccggcataggccggacaggggtgttcctatgtgtggatgtcgtgttctgtgccatcgtaaagaactgttcattcaacatcatggatatagtggcccaaatgagagaacaacgttctggcatggttcaaacgaaggagcagtatcacttttgttacgatattgtgcttgaagttcttcggaaacttctgactttggattaagaaagacttctgttgcctctcacttgaaattaccaagtgggtttgcac

SEQ ID NO: 3943 - DNA, 3000 bp, Homo sapiens
  source 1..3000: mol_type = genomic DNA
cgcgcgtgtgtccgcgcgtgtccgcgtgtgggtccgtgtgcgcgtcccggtcccgcggcggcgacggcggcggcggcggcggcggctgcaggacgagccgagaggctcagccatatttgatggttttgttgctttgctcgggagttctcgggagtaatttaatgccgaaggtcgctgcctagtggaaataatataatacgtcattaatatggcgccaaaagattgggttctcgatctgtagcgaggagggagggaggcagccgctgagcgcagcgttactatcccaccagtaacttgggcattgccggggcgggggccggaggaggaggagaggatgatttttggatcctgagaattgatctatgttggatcagctgcctgctgtttcccggggagatcatgaaacgaggtcgccttcccagcagcagtgaggattctgacgacaatggcagcctgtcaactacttggtcccagaattcccgatcccagcataggagaagctcctgctccagacatgaagatcgaaagccttcagaggtgtttaggacagacctgatcactgccatgaagttgcatgactcctaccagctgaatccggatgagtactatgtgttggcagatccctggagacaggaatgggagaaaggggtccaggtgcctgtgagcccggggaccatccctcagcctgtggccagggttgtgtctgaagagaaatccctcatgttcatcaggcccaagaagtacatcgtgtcatcaggctctgagcctcccgagttgggctatgtggacatccggacgctggctgacagcgtgtgtcgctatgacctcaatgacatggatgctgcatggctggaactgaccaatgaagaatttaaggagatgggaatgcctgaactagatgaatacaccatggagagggtcctagaggaatttgagcagcgatgctacgacaatatgaatcatgccatagagactgaggaaggcctggggatcgaatatgatgaagatgttgtctgtgatgtctgccagtctcctgatggtgaggacggcaatgagatggtgttctgtgacaaatgcaacatctgtgtgcaccaggcctgttatggaatcctcaaggtaccagagggcagctggctgtgccggacatgtgccctgggggttcagccaaaatgtctgctgtgtccgaagaagggtggagctatgaagcccacccgtagcggaaccaagtgggtccacgttagctgtgctctgtggatccctgaggtgagcattggcagcccagagaagatggagcccatcaccaaggtgtcacacattcccagcagccggtgggcgctagtgtgcagcctctgcaatgagaagtttggggcctctatacagtgctctgtgaagaactgccgcacagccttccatgtgacctgtgcttttgaccggggcctggagatgaagaccatcttagcagagaatgatgaagtcaagttcaagtcctattgcccaaagcacagctcacataggaaacccgaggagagtcttggcaagggggctgcacaggagaatggggcccctgagtgttccccccggaatccgctggagccctttgccagccttgagcagaaccgggaggaggcccaccgggtgagtgtccgtaagcagaagctgcagcagttggaggatgagttctacaccttcgtcaacctgctggatgttgccagggctctgcggctgcctgaggaagtagtggatttcctgtaccagtactggaagttgaagaggaaggtcaacttcaacaagcccctgatcaccccaaagaaagatgaagaggacaatctagccaagcgggagcaggatgtcttatttaggaggctgcagctgttcacgcacctgcggcaggacctggagagggttcggaacctcacttacatggtgacccgcagggaaaagattaaacggtctgtgtgcaaagtccaggaacagatattcaatctttacactaagcttttggagcaagaaagagtttcaggtgtgccttcttcctgctcctcctcctcactggaaaacatgcttttgtttaacagtccttctgttggccctgatgctcccaagatagaggacttgaagtggcattctgcattcttcagaaaacaaatgggtacttccttggttcattcgctgaaaaagccccataagcgagatcctttgcagaatagccctggaagtgaaggcaaaaccctgctgaagcagccagacctgtgtggtagaagggaggggatggtggtcccagagagctttttgggtttagaaaagacctttgcagaagcacgtctcatatcagcacaacagaaaaatggtgtggtgatgccagaccatgggaaaagaagagacaatcgttttcattgtgatctcattaaaggagacttaaaggacaaatcttttaaacagagtcacaagcctctcaggtccacagatgtgtcccagaggcatctggacaacacaagagctgccacctcccctggagtggggcagtcagcacctggcacaaggaaggagatagtgcccaagtgcaatggctccctaatcaaagtaaactataatcagactgcagtcaaagtgcctacaacacctgccagcccagtgaaaaactggggaggattccggattccaaagaagggggaacggcagcagcagggagaggcccacgatggggcctgccaccagcactcagactacccatatttgggcttaggccgagttccagccaaggaaagggcaaaaagcaaattaaaatccgacaatgagaatgacgggtatgtccccgatgtggaaatgagtgactcagagagtgaggcatcagaaaagaaatgtatacacaccagcagcactatcagcagaaggacagacattatcaggagaagcatcttggcttcttgatgcaacagagatgatgcggaagccctttgggctcgtcattgggtttgctagaggagagctctgatgtggggg

SEQ ID NO: 3944 - DNA, 2747 bp, Homo sapiens
  source 1..2747: mol_type = genomic DNA
gcatagctaacttgcacattcactatccaagctgcaccatcttcggggtcattgtgtgccaggcatatcaactcttttcaataaaaatggatggaaaggcagatgtaaagtccctcatggcgaaatataacacggggggcaacccgacagaggatgtctcagtcaatagccgacccttcagagtcacagggccaaactcatcttcaggaatacaagcaagaaagaacttattcaacaaccaaggaaatgccagccctcctgcaggacccagcaatgtacctaagtttgggtccccaaagccacctgtggcagtcaaaccttcttctgaggaaaagcctgacaaggaacccaagcccccgtttctaaagcccactggagcaggccaaagattcggaacaccagccagcttgaccaccagagaccccgaggcgaaagtgggatttctgaaacctgtaggccccaagcccatcaacttgcccaaagaagattccaaacctacatttccctggcctcctggaaacaagccatctcttcacagtgtaaaccaagaccatgacttaaagccactaggcccgaaatctgggcctactcctccaacctcagaaaatgaacagaagcaagcgtttcccaaattgactggggttaaagggaaatttatgtcagcatcacaagatcttgaacccaagcccctcttccccaaacccgcctttggccagaagccgcccctaagtaccgagaactcccatgaagacgaaagccccatgaagaatgtgtcttcatcaaaagggtccccagctcccctgggagtcaggtccaaaagcggccctttaaaaccagcaagggaagactcagaaaataaagaccatgcaggggagatttcaagtttgccctttcctggagtggttttgaaacctgctgcgagcaggggaggcccaggtctctccaaaaatggtgaagaaaaaaaggaagataggaagatagatgctgctaagaacaccttccagagcaaaataaatcaggaagagttggcctcagggactcctcctgccaggttccctaaggccccttctaagctgacagtgggggggccatggggccaaagtcaggaaaaggaaaagggagacaagaattcagccaccccgaaacagaagccattgcctcccttgtttaccttgggtccacctccaccaaaacccaacagaccaccaaatgttgacctgacgaaattccacaaaacctcttctggaaacagtactagcaaaggccagacgtcttactcaacaacttccctgccaccacctccaccatcccatccggccagccaaccaccattgccagcatctcacccatcacaaccaccagtcccaagcctacctcccagaaacattaaacctccgtttgacctaaaaagccctgtcaatgaagacaatcaagatggtgtcacgcactctgatggtgctggaaatctagatgaggaacaagacagtgaaggagaaacatatgaagacatagaagcatccaaagaaagagagaagaaaagggaaaaggaagaaaagaagaggttagagctggagaaaaaggaacagaaagagaaagaaaagaaagaacaagaaataaagaagaaatttaaactaacaggccctattcaagtcatccatcttgcaaaagcttgttgtgatgtcaaaggaggaaagaatgaactgagcttcaagcaaggagagcaaattgaaatcatccgcatcacagacaacccagaaggaaaatggttgggcagaacagcaaggggttcatatggctatattaaaacaactgctgtagagattgactatgattctttgaaactgaaaaaagactctcttggtgccccttcaagacctattgaagatgaccaagaagtatatgatgatgttgcagagcaggatgatattagcagccacagtcagagtggaagtggagggatattccctccaccaccagatgatgacatttatgatgggattgaagaggaagatgctgatgatggctccacactacaggttcaagagaagagtaatacgtggtcctgggggattttgaagatgttaaagggaaaagatgacagaaagaaaagtatacgagagaaacctaaagtctctgactcagacaataatgaaggttcatctttccctgctcctcctaaacaattggacatgggagatgaagtttacgatgatgtggatacctctgatttccctgtttcatcagcagagatgagtcaaggaactaatgttggaaaagctaagacagaagaaaaggaccttaagaagctaaaaaagcaggaaaaagaagaaaaagacttcaggaaaaaatttaaatatgatggtgaaattagagtcctatattcaactaaagttacaacttccataacttctaaaaagtggggaaccagagatctacaggtaaaacctggtgaatctctagaagttatacaaaccacagatgacacaaaagttctctgcagaaatgaagaagggaaatatggttatgtccttcggagttacctagcggacaatgatggagagatctatgatgatattgctgatggctgcatctatgacaatgactagcactcaactttggtcattctgctgtgttcattaggtgccaatgtgaagtctggattttaattggcatgttattgggtatcaagaaaattaatgcacaaaaccacttattatcatttgttatgaaatcccaattatctttac

SEQ ID NO: 3945 - DNA, 913 bp, Homo sapiens
  source 1..913: mol_type = genomic DNA
ctgtggctctgtggtaggggaatgccaccaactccctgaggagcagccgtgtggtatgattgtaaacgattatgagggaaatgactctgaagcagaagacttgaatttcagggagactttgccttcatcaagtcaggaaaacacacctagatcaaaggtttttgaaaataaagttaattcagagaaggtaaaactttctcttcggaatttcccacataatgattatgaggatgtttttgaagagccttcagaaagtggcagtgatcccagcatgtggacagccagaggccccttcagaagagacaggtggagcagtgaggatgaggaggctgcagggccatcacaggctctctcccctctactttctgatacgcgcaaaattgtttctgaaggagaactagatcagttggctcagattcggccattaatattcaattttcatgagcagacagccatcaaggattgtttgaaaatccttgaggaaaaaacagcagcgtatgatatcatgcaggaatttatgacgggaactagtcactctgtaaaacagttgcagttcaccaagtggccagaccatggcactcctgcctcagcagatagcttcataaaatatattcgttatgcaaggaagagccaccttacaggacccatggttgttcactgcagtgccggcataggccggacaggggtgttcctatgtgtggatgtcgtgttctgtgccatcgtaaagaactgttcattcaacatcatggatatagtggcccaaatgagagaacaacgttctggcatggttcaaacgaaggagcagtatcacttttgttacgatattgtgcttgaagttcttcggaaacttctgactttggattaagaaagacttctgttgcctctcacttgaaattaccaagtgggtttgcac

SEQ ID NO: 3946 - DNA, 805 bp, Homo sapiens
  source 1..805: mol_type = genomic DNA
ctcgaatgcagcgtctacgcctggtgaatggacgcactcttaccaattctgctctgggagatgcagcggtaacctaccgagcgcagaggccggcgcgcacccgtggagcccgcgctcgcgatccctcctcgtgccagggccccagggcagtcaaggcctgccgaccgttaggcgggtcaaggggtacacagggtgcgaattcgttaggcaaaagctgggtacaggcgcgagccacaggcacggaaacctcgcgccgaccggggccctaggcccgacgacggcagtttgtttcgacgccggaccgcgtaagagacgatgatgttgggcacggaaggtggagagggattcgtggtgaaggtccggggcttgccctggtcttgctcggccgatgaagtgcagaggtttttttctgactgcaaaattcaaaatggggctcaaggtattcgtttcatctacaccagagaaggcagaccaagtggcgaggcttttgttgaacttgaatcagaagatgaagtcaaattggccctgaaaaaagacagagaaactatgggacacagatatgttgaagtattcaagtcaaacaacgttgaaatggattgggtgttgaagcatactggtccaaatagtcctgacacggccaatgatggctttgtacggcttagaggacttccctttggatgtagcaaggaagaaattgttcagttcttctcagggttggaaatcgtgccaaatgggataacattgccggtggacttccaggggaggagtacgggggaggccttcgtgcagtttgcttcacaggaaa

SEQ ID NO: 3947 - DNA, 759 bp, Homo sapiens
  source 1..759: mol_type = genomic DNA
atggcggcgacggcccgggaagatggcgccagcggtcaagagcgaggtcagcggggctgcgagcactatgacagaggatgtctcctaaaggcaccttgctgtgacaagctttatacttgccgcttgtgtcatgataacaatgaagatcatcaactagatcgctttaaagtgaaggaagtgcagtgcataaactgtgaaaaaattcaacatgcccaacagacttgtgaagaatgtagcacattgtttggagaatattattgcgatatatgccatttgtttgacaaagataagaagcagtatcactgtgaaaactgtggaatttgtaggattggtccaaaggaagattttttccattgtttgaaatgtaacttatgcctagctatgaatcttcaaggaagacacaagtgtattgaaaatgtgtcccgacagaattgtccaatatgtttggaggacattcacacatcccgtgttgttgctcatgtcttgccatgtggacatcttttacatagaggctacagatgtccattatgtatgcactctgctttagatatgaccaggtattggagacagctggatgatgaagtagcacagactcctatgccatcagaatatcagaacatgactgtggatattctctgcaatgactgtaatggacgatccactgttcagtttcatatattaggcatgaaatgtaagatttgtgaatcctataatactgctcaagctggaggacgtagaatttcactggatcagcaatga

SEQ ID NO: 3948 - DNA, 818 bp, Homo sapiens; identical to SEQ ID NO: 3942
  source 1..818: mol_type = genomic DNA

SEQ ID NO: 3949 - DNA, 5361 bp, Homo sapiens
  source 1..5361: mol_type = genomic DNA
gcctcctccgccacctccaccgatgtggaatccaatgattcctgcttttgacctcttccaaggaaaccatggctttgtagctcctgttgtaaccacagctgcacactggagatctgtcaactacacatttccaccctcagttatttctcacacttccccaacaaaagtatggagaaataaagatggaacaagtgcttatcaagtacaagaaaccccagtttctcaggttgtaagaaagaagacatcttacgttggactagttcttgttcttctcagaggtcttccgggatctggaaaatcttttttggcaaggactttgcaagaggataatccaagtggagtcattcttagtactgatgattatttttatataaatggacagtaccagtttgatgtaaagtacttaggagaagcacatgaatggaaccagaatcgtgcaaaagaagcatttgagaagaagatatctcctataattatagataatacaaacctacaggcatgggaaatgaaaccatatgttgctttgtctcagaaacacaaatataaagtcctttttcgggaaccagacacatggtggaagtttaaaccaaaggaacttgcaaggcgtaacattcatggggtaagcaaagaaaaaataacaagaatgttggaacattatcaacgttttgtttcagtgccaataattatgagttcttcggttccagagaaaattgaacgtattgagttgtgtgcatattcttgtgaggatagaagcactagcccaagagacgatgaagatattatctctgaaaaagaagaaaatattttatctttatctttgaagcatctagagttcactgaagagaagaatcttgatgtaaccaaagaaacaatgttacctgagaatgttgcatatctctctaatgcagatttaaacaaaagaagaaaagaaataagtgatatgaatcctagcattcaaagtgctttaattctggaaactccacacatgtatttttctgactctgaaagcaaactacaggcaacagacaaaagtgaaaacgagcaaatagaaatggtggctgtaaaagggtatagtaaaactgacacagatagttctatggagagagtatcacctagtacttgctgtagtgaaaataatcaagaagactgtgatcttgcaaatagtggaccacttcaaaatgaaaaatcctcacctggtgaaatagtggaagaaagagcaacagtaacgaaaaaagcctttgggaaacaaaaaagcaaatcgactttggaaaagttcccaagacatgagctatcaaattttgttggtgactggccagttgataagactattggtcagaggacaaaaaggaacagaaaaactgaaaaaacttcatccgtacaaagcgacaaaaagtataattaccctcagtcacacaaattagttaacagtgtatctgtgaatacagattgtgtccagcaacgaggatctccacatgaaagtgtagaggatggcagaaagtcacagtgtgatgatgcttcagagccactcaatagctataaatatgatgcttataaaaatattgacaaaaactcattcaacattatgggtgactggccttcatctgattctttagctcagagggaacacagatcaagaatgccaaagactggtttaagtgagcccaacctagaaattggaacaaatgacaaaatgaatgaaatatccttatctacagcacatgaggcctgttggggcacaagctctcaaaaactaaagacattgggtagctccaatctaggaagttctgaaatgctgctcagtgaaatgacctgtgagagtcagacttgtctaagtaaaaagagtcatgggcaacacacatcgttgcctcttacttttaccaatagtgcaccaactgtttctggagtagtagaaccacaaacgttagctgaatgtcaagagcaaatgcctaagagagaccctggaaaagaagtaggcatgtgcacccagactgaaccacaggattttgctcttttatggaaaatagaaaagaataaaattagcatttcagattctatcaaagtattaacaggaagattagatggatttaagccgaaagttttcaatattaacacaaaatcagacgttcaagaagcaattccatatagagtaatgtatgataaaagcacgtttgttgaagaaagtgagcttaccagtgcagatgaatctgaaaatcttaacattctttgtaaactgtttggatccttttcattagaagccctgaaagacttatatgagaggtgcaataaagatattatttgggccacaagccttttgttggattctgaaactaagttatgtgaggatacagagtttgagaatttccaaaaatcgtgtgatggatcacaaattgggcctttttctctggggttgaatttgaaagaaattattagccaaagaggaactttagagaattctaattctcctgtgccagagtttagccatgggattggtattagtaacgctgactcacagtctacttgtgatgcagaaagaggaaactcagagcaggcggaaatgagagctgtcactcctgaaaaccatgaatcgatgacaagtatatttcccagtgctgctgtgggtctaaagaataataatgacatacttcctaacagccaggaagaacttttatatagcagtaagcagtcctttccaggtattctaaaagctactactcctaaagatatgagtgaaacagaaaaaaacctagtagtcacagagactggagacaacatacattctccttcacatttctctgatatttttaactttgtatctagtacttcaaatcttgaattaaatgaagaaatttattttactgattctcttgaaataaagagaaatgaaaattttccaaaggattatgtgaaattttcagatgaagaagaatttatgaatgaagatgagaaggaaatgaaggaaattctaatggcaggaagtagtttatcagctggagttagtggggaagataaaaccgagatattgaatcccactccagcgatggccaaatctctgaccatagactgtctggaattggcattaccccctgaactggcttttcaacttaatgaattatttggtcctgttggtattgattcagggtctctaacagttgaagattgtgtggttcatatagatctgaatctggcgaaagtgattcatgagaaatggaaagaatctgtaatggagcgacaaagacaagaagaggtgtcttgtggcaagtttatgcaagatccttccttggttggacatactgggcttgataatcctgaacaaaaatcatctcagagaacaggcaaaaaattactgaagactttaacagcatctgaaatgctacctttattggatcattggaatactcaaactaaaaaagtatcactcagagaaataatgtcagaagaaattgccttacaggaaaaacataatttgaaaagggagacccttatgtttgaaaaagattgtgccactaaactaaaggagaagcagctctttaagatatttccagccattaaccaaaattttctggtggacattttcaaggaccacaactattcattagaacacacagtgcaatttcttaactgtgttcttgaaggggaccctgtaaaaacagttgtagcccaagagtttgttcaccaaaatgagaatgtcacatctcatactggccagaagtctaaagagaaaaaggactttgagtacccagactatgatgactacagagcagaggctttccttcaccaacagaagaggatggagtgctacagcaaggccaaagaagcttatcggatagggaaaaaaaatgtcgccaccttttatgcccagcagggtactcttcatgagcagaagatgaaagaagccaatcaccttgctgccatagagatctttgagaaagtcaatgcttcgctgctgccacagaatgttttagacctccatgggctgcatgtggatgaagctctagaacatttgatgagagttttagagaagaagactgaagaatttaagcagaacggtgggaagccctatttgtctgtgattacggggagaggaaaccacagccagggaggagttgctcgcatcaaaccagctgtcattaagtacctcataagccatagcttcaggttctctgaaattaaaccagggtgcttgaaagtcatgctaaagtaaaataaacatccttgaattagaagtatgaaggtttgtaggttaaaattacttttatttgcagtaattcagtcaattctaccctaaagatgtgttttattataaataatattcaattatgaaacaaaaaaattatgatgtttttcaaaatgcaagtgaggtttgattttttactgaatcaaatgcaaatgttacctgttaaagatattacagagaaattttattgattacaaaatatgtaagaaaattatcagctacagttttaaagtttaaaatgctctgattgtttctcagaaaaggttacctttgtattaattgttgtatgacatttagtaatgtcctaaaagtcttttgtgagaggtatttaaagtgctttgagacctgattcatgccccccaaagggtggtattaaaagaggaaaaaggacatagtagtggtagtaaagaaaaaaaggagatctaacaaaaacacttgaatattttttattttcaaaactaaacacataaaatgcttttattttgccatatcctacaggaaggaagacatgcttttgccctttcttctgctttgtatatgaccttgatcttttaccttttgttctgttcttctgtgtgcattttatggaaagaaagttgggtctgagattatattgtaattttatactttctatagacagaaaggttttcagagaaaaagaaatggttaaatatcttccagatgttgctgccttatcgaaatgcttctagaactgtctgtataagtcgtatttcagacagtactaaatacttatattttatttttgaggcatgtaattttaaaactgcagtaggttaaaattctattaaacaaatatagaaaatattttgtttataattggcctggtgtggtggcccacgcctgtaatcccagcactttgggaggccgaggtaggtggatcgcctgaggtcagaagttcaagaccagcctggccaacatggtgaatccccgtctctattaaaaatacaaaaattagctgggtgtggtggcgtgtgcctgtaatcccagctacttgggaggctgaggcaggagaaccgcttaaacctgggaggtggaggttgcagtgacccgagatcgagatcacaccactgcactcagcctgggtgacagagcaagactccgtctcc

SEQ ID NO: 3950 - DNA, 582 bp, Homo sapiens
  source 1..582: mol_type = genomic DNA
aggaaacgctgccgaggagtaggcggggcgggcgctttggttccgagggtgcttctgctccgactgcttttcccacgggcgtcatctatagtccggaggacagccccagggcagaggcctctgaactgcaaggtgtggaatatttctggcttctagtccaatgccaagtgtgtgacctgtgagttaattctgcattttagttttggccctacatttatttaaagcctgaatttggggagtatctgcaaagcactgaaggttttggacattgtcttttcctgctgttgaaagagaccctcttcatatatacaacattcaggctacatgattccctgaaagataagaacaatgttatgttggggatattggtctctgggccaacctggtatcagcaccaacctgcagggaattgtggctgagccccaggtgtgtgggttcatatctgacagaagtgtcaaggaagtggcctgtgggggaaaccactctgtgttcctgctggaagatggggaagtttacacatgtggtttgaacaccaaggggcaactgggccatgagagggaaggaaacaagccagaacaaatt

SEQ ID NO: 3951 - DNA, 1288 bp, Homo sapiens
  source 1..1288: mol_type = genomic DNA
ttttcctgcctgtgagggtggacagatcgcgctcgggtctcggcctcctgagtgccggaaagatgaatgggagggctgattttcgagagccgaatgcagaggttccaagaccaattccccacatagggcctgattacattccaacagaggaagaaaggagagtcttcgcagaatgcaatgatgaaagcttctggttcagatctgtgcctttggctgcaacaagtatgttgattactcaaggattaattagtaaaggaatactttcaagtcatcccaaatatggttccatccctaaacttatacttgcttgtatcatgggatactttgctggaaaactttcttatgtgaaaacttgccaagagaaattcaagaaacttgaaaattccccccttggagaagctttacgatcaggacaagcacgacgatcttcaccacctgggcactattatcaaaagtcaaaatatgactcaagtgtgagtggtcaatcatcttttgtgacatccccagcagcagacaacatagaaatgcttcctcattatgagccaattccattcagttcttctatgaatgaatctgctcccactggtattactgatcatattgtccaaggacctgatcccaaccttgaagaaagtcctaaaagaaaaaatattacatatgaggaattaaggaataagaacagagagtcatatgaagtatctttaacacaaaagactgacccctcagtcaggcctatgcatgaaagagtgccaaaaaaagaagtcaaagtaaacaagtatggagatacttgggatgagtgaaaaattacatcattggacatgaaggagtttcaacatccagcttcatctaggtggtcatgattacctgcatgctttgagctcagcagcagtcttcataaacacatttaaaacaagatcctgggtttttgtggtttgacttctatggtgttttaaaaaaacacagatttttagtgttaatattgtgtaaatgtactcaccttagggattcatttgaatgatggtattataccatgattgtatacagtttgtgaaattgttgcaagggcaaagataactcttaaaaaaccgtcgagattacaatgctctagaatcagcatataagaaaataaatgatatctgcatgttgaattggggtggatggggggagcaagcataatttttaagtgtgaagctttgcatcaagaaattattaaaaagctttttttctccagtattttctgtattatcttaatgtttatggcaaataaaatgtaaaggaacatgcaaca

SEQ ID NO: 3952 - DNA, 2770 bp, Homo sapiens
  source 1..2770: mol_type = genomic DNA
gtgcttgcggcaaccctgtaaccgccggtgcgcaagttggaggggcaaggggctgccgtgtcctggtctggaggcggcccaggctgccttggtgattctggcttcgcggcctcatggcttgcggccggtttgcgcaacggcctgcgaaccaccaggcgcgtccccgccggcttgggtccgccccgaagcccagtccctcggcctggcccgctatgccctgcacactggcggagtctggcgtggcgcagcccggcgtggggttcggccccgccaggtggtcagcccttcctcggagtccaggtggctgggggcgcttcggagagtggccaggggcccccaaacccggggccgcagagcagtaccagtccgtggcctgttaggaaccaggctacagagcaggagttgccaaaacaaaggggatttggtgatggaggctttgttagaaggaatacaaaatcgagggcatggtgggggatttttgacatcttgtgaagcagaactacaggagctcatgaaacagattgacataatggtggctcataaaaaatctgaatgggaaggacgtacacatgctctagaaacttgcttgaaaatccgtgaacaggaacttaagagtcttaggagtcagttggatgtgacacataaggaggttggaatgttgcatcagcaggtagaagaacatgaaaaaatcaagcaagagatgaccatggaatataagcaggagttgaagaaactacatgaagaattatgcatactgaagagaagctatgaaaagcttcagaaaaagcaaatgagggaattcagaggaaataccaaaaatcacagggaagatcggtctgaaattgagaggttaactgcaaaaatagaggaattccgtcagaaatcgctggactgggagaagcaacgcttgatttatcagcaacaggtatcttcactggaggcacaaaggaaggctctggctgaacaatcagagataattcaggctcagcttgtcaatcggaaacagaaattagagtctgtggaactttctagccaatcagaaattcaacacttaagcagtaaactggagcgggctaatgacactatctgtgccaatgagttggaaatagagcgcctcaccatgagggtcaatgacttggttggaaccagtatgactgtcctacaggagcagcagcaaaaagaagaaaaattgagggaatctgaaaaactattagaggctctgcaggaagaaaagagagaattgaaggcagctcttcagtctcaagaaaatctcatacatgaggccagaatacaaaaggagaagttacaagaaaaagtaaaggcaactaacactcaacatgctgtagaagctataaggccacgggaagaatctctggcagaaaagaagtacacctctcaagggcagggggacttagacagtgtgctctcccagttgaattttacccatactagtgaggaccttctgcaggcagaggtgacttgtcttgaaggcagtttggaatctgtgagtgcaacgtgtaaacagctgagccaagaactaatggaaaaatatgaagaactgaagaggatggaagcacataacaatgaatacaaagcagagattaagaagttgaaagaacagattttacagggtgaacaaagttacagttctgcactagaaggaatgaagatggaaatctcccatctaactcaggagttacatcagcgagatatcactattgcttccaccaaaggttcttcctcagacatggaaaagcgactcagagcagagatgcaaaaggcagaagacaaagcagtagagcataaggagattttggatcagctggagtcactcaaattagaaaatcgtcatctttctgaaatggtgatgaaattggaattgggtttacatgaggcaaaagagatttcactagcagacctccaggagaattatattgaggcattaaataaattagtgtctgaaaatcaacaactacagaaagatttgatgaataccaaatctcagctggagatttctactcagatgtgcaaaaaacaaaatgacaggatctttaaaccaacacacagcagaacaactgagttcaagaatacagagttcaagccaacccatggccagcacagacatgatggaataaagactgagcactacaaaacagatcttcattctccaagaggacaagcgtcggatagtataaaccccatgtctagggtgctaagccccctgagtcctcaaatcagcccttgcagctccaccaggtctttgacttcctactctctatgtaaaactcattctttgccttcagcgctagatacaaatgaagccaatttttctgacactatgtctgagagtatgaatgaccaagaagagtttatatcttcgtgttccttgcctgtatctccccttggttcaatagctaccagatttttggaagaggaggaactgaggtctcatcacattctagagcgcttggatgcccatattgaagaactaaaaagagagagtgaaaagacagtgagacaattcacagccttaaagtagcctcttaaaaaaatcactatcttggaaataaaaataaacaccaaagagttactgtcatctgaagtagcagctctttaaaaacatgaagagataaaattataaaaatgatacatctaaagcagtggtgaagaaagctgaaaaactgatacttttgataggcattttctctgcactggtttgtttaaaggacttcttccagcaataagttgaaagaataaaccactttgctag

SEQ ID NO: 3953 - DNA, 665 bp, Homo sapiens
  source 1..665: mol_type = genomic DNA
aaggtggcttgggagggaccagttttcctagatgcaggagacagcgtccatagtttcagttcgaagcaactggtggcaaaaggttagcatttaagatggcagggacagcgcgccatgaccgagagatggcgatccaggccaagaaaaagctcaccacggccaccgaccccattgaaagactccgactgcagtgcctggccaggggctctgctgggatcaaaggacttggcagagtgtttagaattatggatgacgataataatcgaacccttgattttaaagaatttatgaaagggttaaatgattatgctgtggtcatggaaaaagaagaggtggaagaacttttccggaggtttgataaagatggaaatggaacaatagacttcaatgaatttcttctcacattaagacctccaatgtccagagccagaaaagaggtaatcatgcaagcttttagaaagttagacaagactggagatggtgttataacaatcgaagaccttcgtgaagtatataatgcaaaacaccacccaaagtaccagaatggggaatggagtgaggaacaagtatttaggaaatttctggataactttgattcaccctatgacaaagatggattggtgacccctgaggagttcatgaactactatgcaggtgtgagcgca

SEQ ID NO: 3954 - DNA, 582 bp, Homo sapiens
  source 1..582: mol_type = genomic DNA
aatgtgctgtgtcacggcagagccgggctgtgtcgcggtgactcagcggggccggtggtttcctaacgcccggggctgaggcagcctggcctgacccagctgtactcgcttaggtgaccagcctcacctagattttgcctctgcacaagggtcagctctttctttgagaatgtttcagaagatctgggtctaaccttgaaacagtgaggtcccaggtcgctggccggctctgcacctgtcgccatccccggctccctgcccagagcaccatcgctacactcgccatcctctgcgtccacctcgccgctcggttcgctgtcccagcccctcccagggccggtgggctcctcagccatgacgcctccccagcagccgccacccctgcgttcagagccgggcacactgggctctgcagcctcatcctacagccccctaggtttgaacggtgtccccgggagcatctgggactttgtttccggcagcttctcccccagcccctcccccatcctgagtgccggccccccatcctcttcgagtgcaagtccaaacggagctgagctggcccgggtcaggcggcagctg

SEQ ID NO: 3955 - DNA, 574 bp, Homo sapiens
  source 1..574: mol_type = genomic DNA
gatgactacatcataatgggaaggataaggcgttcctcaaaatggatgccataagtaaagggaagctgaagcctgattaacttcgtcagtgccacaggaagaaacaagagacagaaggaaaaagcactttggatgcccgctgtaattcacagagatctccacggtaggagcgggacgtcagcttctgcggctaaaatctcgtgactgaagcagcacagatcagaaagaacgatttaccagcagctgcagactacataatgaaaaataacaaaagtgcccatgcgcgaggctgtgcaactaaccacccgacgattgcggggaggaggagtaagagtcggctaagcggcgcccagtgtcctactgcgcctgtgcgccggtggcgtgcgcagaggcctctgggtaggtggctcaaccccgcctctcagttgaggactctgaaggctgtttctgtggcgcttcccctgcgaggatggctaccctggttgtaaacaagctcggagcgggagtagacagtggccggcagggcagccgggggacagctgtagtgaaggtgctagagtgtggagtttgtgaa

SEQ ID NO: 3956 - DNA, 637 bp, Homo sapiens
  source 1..637: mol_type = genomic DNA
cttatacactgggttccgagccggtcttatcttccgctggaccacctcgccgccctcagggattctggacaaatatggaacgttgggtcggttgccgggtcctcaaaattataaccgccactggatctgcgctgtgcgttggctaaaaaaaagaaaagaacatggaggcagatataatcacaaatcttcgatgcaggctcaaagaggctgaagaagagcgactaaaagctgcacagtatggtttacaactagtagagagtcaaaatgaattacagaatcaattggataaatgtcgtaatgaaatgatgaccatgactgagagttatgaacaagaaaaatatacccttcaaagagaagttgaactcaagagtcgaatgttagaaagtttgagctgcgaatgtgaagctattaaacaacaacaaaaaatgcacctggagaaattggaagaacaactaagcagaagccatggacaggaagtgaatgaactaaaaactaagatagaaaaactgaaagtggaattagatgaagccaggcttagtgaaaagcagctgaagcaccaagtagatcatcagaaggaactcctctcttgtaaatcagaggaactgcgcgtaatgtctgaacgtgtgcaggaaagcat

SEQ ID NO: 3957 - DNA, 769 bp, Homo sapiens
  source 1..769: mol_type = genomic DNA
aggcggagcgctaacgtctaacgctaacggcggtcgtgccccgccgctgctgtcacccccggccgctgctgccctccccgccgaggttctactgctctccttcttaagaagggtgggaggcactcggtctctccccacacctctcgcctgaggccaggcgccaggtgtcgcctgaagccagacagccggtttgggagcgagcctgagttccaggcactgggctaggcactgggatggtgtggtgagcaaaaactgaccagtcctgccgtggagtttgctgggggagacacatgttactcaaagaatcacactaaggatagcaatttatctcaaagcttcaagttcctgccatctacatgtgcccaggtcaaccaatcaatggctcagacagataagccaacatgcatcccgccggagctgccgaaaatgctgaaggagtttgccaaagccgccattcgggcgcagccgcaggacctcatccagtggggggccgattattttgaggccctgtcccgtggagagacgcctccggtgagagagcggtctgagcgagtcgctttgtgtaactgggcagagctaacacctgagctgttaaagatcctgcattctcaggttgctggcagactgatcatccgtgcagaggagctggcccagatgtggaaagtggtgaatctcccaacagatctgtttaatagtgtgatgaatgtgggtcgcttcacggaggagatcgagtggctgaagtttttagcccttgcttgcagcgctctgg

SEQ ID NO: 3958 - DNA, 896 bp, Homo sapiens
  source 1..896: mol_type = genomic DNA
tgagcgaatgggccggcgactgtggagttagcgtcctcaatgtggacgccctgagctcccattaggagccgctggctgcggcagcaggggactagcgtgagagggattctggacaaatatggaacgttgggtcggttgccgggtcctcaaaattataaccgccactggatctgcgctgtgcgttggctaaaaaaaagaaaagaacatggaggcagatataatcacaaatcttcgatgcaggctcaaagaggctgaagaagagcgactaaaagctgcacagtatggtttacaactagtagagagtcaaaatgaattacagaatcaattggataaatgtcgtaatgaaatgatgaccatgactgagagttatgaacaagaaaaatatacccttcaaagagaagttgaactcaagagtcgaatgttagaaagtttgagctgcgaatgtgaagctattaaacaacaacaaaaaatgcacctggagaaattggaagaacaactaagcagaagccatggacaggaagtgaatgaactaaaaactaagatagaaaaactgaaagtggaattagatgaagccaggcttagtgaaaagcagctgaagcaccaagtagatcatcagaaggaactcctctcttgtaaatcagaggaactgcgcgtaatgtctgaacgtgtgcaggaaagcatgtcttcagagatgctggctcttcaaattgagctgacagaaatggagagtatgaagaccaccctcaaagaagaagtgaatgaactacaatacagacaagaacagctagaacttcttattactaacctaatgcgccaggtagaccggcttaaagaggaaaaagaggagcgagagaaagaagcagtttcttactataatgccctagagaaagctcgtg

SEQ ID NO: 3959 - DNA, 1088 bp, Homo sapiens
  source 1..1088: mol_type = genomic DNA
gctacccctggtgacctggcagcggagcccgcgcagggtttgccaggcgaaggcggagcgctaacgtctaacgctaacggcggtcgtgccccgccgctgctgtcacccccggccgctgctgccctccccgccgaggttctactgctctccttcttaagaagggtgggaggcactcggtctctccccacacctctcgcctgaggccaggcgccaggtgtcgcctgaagccagacagccggtttgggagcgagcctgagcaatttatctcaaagcttcaagttcctgccatctacatgtgcccaggtcaaccaatcaatggctcagacagataagccaacatgcatcccgccggagctgccgaaaatgctgaaggagtttgccaaagccgccattcgggcgcagccgcaggacctcatccagtggggggccgattattttgaggccctgtcccgtggagagacgcctccggtgagagagcggtctgagcgagtcgctttgtgtaactgggcagagctaacacctgagctgttaaagatcctgcattctcaggttgctggcagactgatcatccgtgcagaggagctggcccagatgtggaaagtggtgaatctcccaacagatctgtttaatagtgtgatgaatgtgggtcgcttcacggaggagatcgagtggctgaagtttttagcccttgcttgcagcgctctgggagttactattaccaaaactctcaagatagtgtgtgaggtcttatcatgtgaccacaatggtgggttgccccgaatcccattcagcaccttccagtttctctacacgtatattgccgaagtggatggggagatctgtgcatcacatgtcagcaggatgctaaactacattgaacaggaagtaattggtcctgatggtttaatcacggtgaatgactttacccaaaaccccagggtttggctggagtaacagcacaattttggcaattttaaaggaagatacagaggtgattgtacttcagaatgataaacccatataccacctaaaatcaattttcttgtacaactggtacacactaataaacaaacatgtgagatcagaaa

SEQ ID NO: 3960 - DNA, 2844 bp, Homo sapiens
  source 1..2844: mol_type = genomic DNA
atgaatttcctccgcggggtaatggggggtcagagtgccggaccccagcacacagaagccgagacggtgagaggagcagcggacccgaaggtcacctccagctgtggacttaaatttagacatagttttcgtttagtcaagcacattttataccatgttactataaatgtgtattcagattctgaaataataggttatgctttggacacactatataatataatatctaatgaagaagaagaagaagtagaagaaaattccacaagacagagtgaagatttgggaagccaatttacagaaattttcattaagcagcaggaaaatgtcactcttctgttatctttattggaggagtttgatttccatgtccgctggcctggtgtgaagcttcttacttctcttttaaaacaactagggcctcaggtgcaacaaattattttagtcagtcctatgggtgtttcaagattgatggacttactagcggattccagggaagttatacgtaatgatggcgtcttactactgcaggcactaacaagaagcaatggtgcaatccagaaaattgttgcttttgaaaatgctttcgagagactactggacattatttcagaggaggggaacagtgatggaggtatagtagttgaagattgtttgattttgctccaaaacttattaaaaaacaacaactccaatcaaaatttttttaaagaaggctcatatattcaacgtatgaaaccttggtttgaagttggagatgaaaattctggctggtctgcacagaaagtgaccaatctacatctaatgctacagcttgttcgtgtattggtatctcccaccaaccctcctggtgctaccagtagctgccagaaggctatgttccagtgtgggttattgcagcagctttgtactatcctaatggctactggggttcctgctgatatcctgactgagaccataaatactgtatcagaagttattcgaggctgccaagtaaaccaagactactttgcatctgtaaatgcaccttcaaacccaccaagaccggcaattgtagtacttctcatgtccatggttaatgaaaggcagccatttgttttgcgctgtgctgttctctattgtttccagtgtttcttgtataaaaaccaaaaaggacaaggagaaatcgtgtcaacacttttaccttctaccattgatgcaacaggtaattcagtttcagctggccagttattatgtggaggtttgttttctactgattcactttcaaactggtgtgctgctgtggcccttgcccatgcgttgcaagaaaatgccacccagaaagaacagttgctcagggttcaacttgctacaagtattggcaaccctccagtttctttacttcaacagtgcaccaatattctttcacagggaagcaaaatacaaacaagagttggattattaatgttgctttgtacctggctaagcaattgtcccattgcagtaacgcattttcttcacaattcagccaatgttccatttcttacaggacaaattgcagaaaatcttggagaagaagagcagttggtccaaggcttatgtgcccttttgttgggcatttcgatttatttcaatgataactcacttgagagctacatgaaagagaagctaaaacaactgattgagaagaggattggcaaagagaatttcatagagaaactaggatttattagcaaacatgagttgtattccagagcatctcagaaaccccagccaaactttcccagtccagaatacatgatatttgatcatgagtttacgaagctggtaaaagaacttgaaggtgttataactaaggctatttataagtccagtgaagaagataaaaaagaagaagaggtgaaaaaaacattagaacagcatgacaatattgtgactcactacaaaaatatgattcgagagcaggatctccaacttgaggaattaaggcagcaggtttctacattaaaatgtcaaaatgaacagctccagacggcagtcacacagcaagtatcacagatccagcagcacaaagaccagtataatcttcttaaaatacagctaggaaaagacaatcagcatcaaggttcttacagtgagggggctcagatgaatggcattcagccagaagaaattggtagattgcgagaagagatagaagaattaaaacgtaatcaggaacttttacaaagccagctgactgaaaaggactctatgattgaaaatatgaaatcttcccaaacatctggcacaaatgaacagtcttcagcaatagtttcagctagagattctgaacaagttgcagaattaaaacaggaactggcaactttaaagtctcagttaaactcacaatctgtggagatcaccaaactacagacagaaaagcaggaactgttacagaaaacagaagcgtttgcaaaatcagttgaggtacaaggagagaccgagactataatagccaccaaaactactgatgtagaaggaagactgtcagcattattacaagagaccaaagagttaaagaatgaaattaaagctctgtctgaggaaagaactgccattaaagagcagctggattcatctaatagtaccattgccattttacaaactgagaaagacaaactagagttggaaattacagattctaaaaaagaacaagatgatctcttggtgctcttggccgatcaagatcagaaaatactgtcattgaagaataaactcaaggatcttggtcatccagttgaagaagaggatgaacttgaatctggagaccaagaggatgaggatgatgaaagtgaagatcctggcaaggatctagatcatatctag

SEQ ID NO: 3961 - DNA, 1642 bp, Homo sapiens
  source 1..1642: mol_type = genomic DNA
agagcactgctgcggccgccgccattttagcgttttgtcagaagcgtccgcgccgcgaggaggaggccctgctggtttctgtgcgggctcttgtcaggatggtgaagctgttcatcggaaacctgccccgggaggctacagagcaggagattcgctcactcttcgagcagtatgggaaggtgctggaatgtgacatcattaagaattacggctttgtgcacatagaagacaagacggcagctgaggatgccatacgcaacctgcaccattacaagcttcatggggtgaacatcaacgtggaagccagcaagaataagagcaaaacctcaacaaagttgcatgtgggcaacatcagtcccacctgcaccaataaggagcttcgagccaagtttgaggagtatggtccggtcatcgaatgtgacatcgtgaaagattatgccttcgtacacatggagcgggcagaggatgcagtggaggccatcaggggccttgataacacagagtttcaaggcaaacgaatgcacgtgcagttgtccaccagccggcttaggactgcgcccgggatgggagaccagagcggctgctatcggtgcgggaaagaggggcactggtccaaagagtgtccgatagatcgttcaggccgcgtggcagacttgaccgagcaatataatgagcaatacggagcagtgcgtacgccttacaccatgagctatggggattcattgtattacaacaacgcgtacggagcgctcgatgcctactacaagcgctgccgtgctgcccggtcctatgaggcagtggcagctgcagctgcctccgtgtataattacgcagagcagaccctgtcccagctgccacaagtccagaatacagccatggccagtcacctcacctccacctctctcgatccctacgatagacacctgttgccgacctcaggagctgctgccacagctgctgctgcagcagcagccgctgctgctgttactgcagcttccacttcatattacgggcgggatcggagccccctgcgtcgcgctacagccccagtccccactgttggagagggctacggttacgggcatgagagtgagttgtcccaagcttcagcagccgcgcggaattctctgtacgacatggcccggtatgagcgggagcagtatgccgatcgggcgcggtactcagccttttaaagcttgaggtgggatgtgtgtgggctgaaattccgagctgcggttgtgcatgagaatacacccttcgtggtaccccatctccgggacgttctcggctctgtgcgttcagtccctcaggaaccgtggaccttaatttaccttgctaagttcagaccttctcttcctttcctttcctttcctctcctgcccattttcctgttcttctgtccttcaatacttctgtagcttcccattcatgttctcttctcccagcaggcctcattgtgtgcagaaactgtggtgggggctgtgctgtctcctccctgcctcctgcctcctgcggctgttggatttgggaatgaccttggtgagagtctcactgctccagggtctctttttggtccaaaggctagacctatagagttggatcactttttttctttccggtgaaataaatggtttttcaactt

SEQ ID NO: 3962 - DNA, 1339 bp, Homo sapiens
  source 1..1339: mol_type = genomic DNA
ctgtggctctgtggtaggggaatgccaccaactccctgaggagcagccgtgtggtatgattgtaaacgattatgagggaaatgactctgaagcagaagacttgaatttcagggagactttgccttcatcaagtcaggaaaacacacctagatcaaaggtttttgaaaataaagttaattcagagaaggtaaaactttctcttcggaatttcccacataatgattatgaggatgtttttgaagagccttcagaaagtggcagtgatcccagcatgtggacagccagaggccccttcagaagagacaggtggagcagtgaggatgaggaggctgcagggccatcacaggctctctcccctctactttctgatacgcgcaaaattgtttctgaaggagaactagatcagttggctcagattcggccattaatattcaattttcatgagcagacagccatcaaggattgtttgaaaatccttgaggaaaaaacagcagcgtatgatatcatgcaggaatttatggctttagaacttaagaatctgcctggtgagttcaactctgggaatcaaccaagcaacagagaaaaaaatagataccgagatattcttccatatgattcaacacgcgttcctcttggaaaaagcaaggactacatcaatgctagttatattagaatagtcaattgtggagaagagtatttttatatcgctactcaaggaccactgctgagcaccatagatgacttttggcaaatggtgttggaaaataattcaaatgttattgccatgataaccagagagatagaaggtggaattatcaaatgctaccattactggcccatttctctgaagaagccattggaattgaaacacttccgtgtattcctggagaactaccagatacttcaatatttcatcattcgaatgtttcaagttgtggagaagtccacgggaactagtcactctgtaaaacagttgcagttcaccaagtggccagaccatggcactcctgcctcagcagatagcttcataaaatatattcgttatgcaaggaagagccaccttacaggacccatggttgttcactgcagtgccggcataggccggacaggggtgttcctatgtgtggatgtcgtgttctgtgccatcgtaaagaactgttcattcaacatcatggatatagtggcccaaatgagagaacaacgttctggcatggttcaaacgaaggagcagtatcacttttgttacgatattgtgcttgaagttcttcggaaacttctgactttggattaagaaagacttctgttgcctctcacttgaaattaccaagtgggtttgcac

SEQ ID NO: 3963 - DNA, 913 bp, Homo sapiens; identical to SEQ ID NO: 3945
  source 1..913: mol_type = genomic DNA

SEQ ID NO: 3964 - DNA, 574 bp, Homo sapiens
  source 1..574: mol_type = genomic DNA
atctgtacaagggagatctagaggtctggcccaaagggaaacttttgctgccaccactttcaaagctttcgttaaaaaaacaaaagggagggggaaggtggagaaacaaccaaaattctgtcattccaaataaatctaagtgaactattgattttgatacaaagcaacagcctctgccacactgaagaagtgagctttaagcagagactagaagggtatggcatcacagctgcaagtgttttcgcccccatcagtgtcgtcgagtgccttctgcagtgcgaagaaactgaaaatagagccctctggctgggatgtttcaggacagagtagcaacgacaaatattatacccacagcaaaaccctcccagccacacaagggcaagccaactcctctcaccaggtagcaaatttcaacatccctgcttacgaccagggcctcctcctcccagctcctgcagtggagcatattgttgtaacagccgctgatagctcgggcagtgctgctacatcaaccttccaaagcagccagaccctgactcacagaagcaacgtttctttgcttgagccatatcaa

SEQ ID NO: 3965 - DNA, 605 bp, Homo sapiens
  source 1..605: mol_type = genomic DNA
agctttgaaggtcttgcggtggtgcgtggcgggcaggaacccacaattccaaatacaaacggtcggcgcgagaagcgcttctgggcgcaggcgcctggctgtagcgactggttgcgggaggctggactctggtgactgtgtatggttgcatatgctccgttttcctctccctgtcgtgctgggcctttgaaaccggcttctttgctggtggctgcttggtgaaaaattagacgatttcaagaattggagctgaatctgatgttaagtaatggcaacaggtgacttaaaaagaagcttacggaacctagaacaggtgctccgcttgctaaattatcctgaagaggtggactgtgtaggtttgataaagggagacccagcagcatctttgcccatcatcagctattcttttacctcatactcaccttatgtaacagaacttataatggaatccaatgtagagctcatagcaaaaaatgacttgcgctttatagatgctgtctataagcttcttcgtgatcaatttaattataaaccaattttgacaaaaaagcagtttatccaatgtgggtttgcagaatggaaaatccaaattgtttgtgatattt

SEQ ID NO: 3966 - DNA, 532 bp, Homo sapiens
  source 1..532: mol_type = genomic DNA
atatttgatggttttgttgctttgctcgggagttctcgggagtaatttaatgccgaaggtcgctgcctagtggaaataatataatacgtcattaatatggcgccaaaagattgggttctcgatctgtagcgaggagggagggaggcagccgctgagcgcagcgttactatcccaccagtaacttgggcattgccggggcgggggccggaggaggaggagaggatgatttttggatcctgagaattgatctatgttggatcagtaagttttattatgattttttttttcaaatttggggggctgaagacttagagctatttcttcttttggatttgcgaagaacatgcggttttcagttcatagccctgatgaagcaagttactctgctctcctaataaatgcaagaaaatgaccttggagggcctttttaattacacatagaagtgacaatttgctgcctgctgtttcccggggagatcatgaaacgaggtcgccttcccagcagcagtgaggattctgacgacaatggcag

SEQ ID NO: 3967 - DNA, 1697 bp, Homo sapiens
  source 1..1697: mol_type = genomic DNA
gcagaagtccggggctggcaagcgcttcctgcgcagcgcctaggcgacctggagtttgtgacgctgtgatggtctagaggctggagattcaagatctgggtgccatcattttctggttctgttgatgaccctcttccagtttttcttataaggctaaaaattcacaaagcatatatcaatgaatcaggaggatctagatccggatagtactacagatgtgggagatgttacaaatactgaagaagaacttattagagaatgtgaagaaatgtggaaagatatggaagaatgtcagaataaattatcacttattggaactgaaacactcaccgattcaaatgctcagctatcattgttaattatgcaagtaaaatgtttaaccgctgaactcagtcaatggcagaaaaaaacacctgaaacaattcccttgactgaagacgttctcataacattaggaaaagaagagttccaaaagctgagacaagatcttgaaatggtactgtccactaaggagtcaaagaatgaaaagttaaaggaagacttagaaagggaacaacggtggttggatgaacagcaacagataatggaatctcttaatgtactacacagtgaattgaaaaataaggttgaaacattttctgaatcaagaatctttaatgaactgaaaactaaaatgcttaatataaaagaatataaggagaaactcttgagtaccttgggcgagtttctagaagaccattttcctctgcctgatagaagtgttaaaaagaaaaagaaaaacattcaagaatcatctgtaaacctgataacactgcatgaaatgttagagattcttataaatagattatttgatgttccacatgatccatatgtcaaaattagtgattccttttggccaccttatgttgagctgctgctgcgtaatggaattgccttgagacatccagaagatccaacccgaataagattagaagctttccatcagtaaaaggatgttttcttttttcacacagtaaaaattcttatcattcaaggatattggaaccacaggactatttggataaaaaacattatttgcaaattaatgcgcataggccatcttacttttattgcaaaatggcatgtgctgccatctattattcatttttaaatggtcatttcttattcagtgagtgctttagtgttttaaactatatggataagaatgcaggtagataatattctaggcataaaacatttaatgtaccttacctcatgcaatattctttggattctttgttgatttatgatattgctaatataatattttcttaaaatatataacaatatcttttatgcattttgagttccagctggtgcttctttatatttagaaattataatgggaaggtcatttaatttacagatggttttaaaattgaggtaatatctgaggtggcataatttaaaaatatttagcaaatttgtttcatatatactgtcttatttctagatttgtttaaaattggaatatgaaaaactaatggataaagctagcataaaattgatattttagtttgtattattaatatatcatgttaccttatatattaatctactcttgattctgctaattattaccaacaaaattgtattcatgacattttattaatcctctgtgaattttctgtaaataaaattatttctgaaaatctcta

SEQ ID NO: 3968 - DNA, 653 bp, Homo sapiens
  source 1..653: mol_type = genomic DNA
tttcctgccgtaagtatacagtgcctccgggtcgcggtcattttgagcccctgtctggatgacttcttgcggctgttctacccctccccctccccgcgtcgcctgctgctgtcgtcgggaggtgggtgaggtgacgcaaacagccccgttgttgccctccgcgtatcccctcaccacctttgcggccatccacgactttcgcaccttccgccattttcctgcctgtgagggtggacagatcgcgctcgggtctcggcctcctgagtgccggaaagatgaatgggagggctgattttcgagagccgaatgcagaggttccaagaccaattccccacatagggcctgattacattccaacagaggaagaaaggagagtcttcgcagaatgcaatgatgaaagcttctggttcagatctgtgcctttggctgcaacaagtatgttgattactcaaggattaattagtaaaggaatactttcaagtcatcccaaatatggttccatccctaaacttatacttgcttgtatcatgggatactttgctggaaaactttcttatgtgaaaacttgccaagagaaattcaagaaacttgaaaattccccccttggagaagctttacgatcaggacaagcacgacgatcttcaccacctggg

SEQ ID NO: 3969 - DNA, 1305 bp, Homo sapiens
  source 1..1305: mol_type = genomic DNA
aaaagcgaccttttctgagcgcgtttgcctgttgagtggtagcctttcccctcaaccagcaatggaggagcagccccagatgcaagacgccgacgagcccgcggactccggaggggaaggccgggcaggcgggccaccgcaggtcgccggcgcccaggcggcgtgcagcgaggaccgcatgaccctgctcctcaggctgagagcacagacaaaacaacaactcttagaatataaatcaatggttgatgcaagtgaagaaaaaactccagaacaaattatgcaagaaaagcaaatcgaagctaaaattgaagacctggaaaatgaaattgaagaggtaaaagttgcttttgagataaaaaagcttgcattagacagtgtgctcatggataacatgaaacacctattagagctaaataaattaataatgaaatcacagcaggaatcttgggatttagaggaaaaactgcttgatattagaaagaagagattgcaattaaaacaagcttcagaaagtaagcttttagaaatacagactgaaaagaacaaacagaagattgatttggacagtatggaaaactcagagaggataaagatcatacgacaaaacctacagatggagataaaaattactactgttattcaacatgtgttccagaaccttattttggggagtaaagtcaattgggcagaggatcctgcccttaaggaaattgttctgcagcttgagaagaatgttgacatgatgtaataagaattcatttctgacatattttacatttctggcaatctcaactcttatttggaatacttctgtgcatttgtctgtccaccgtaattttagaaaagcatatccataacgtttacagttgtagtacagttgtggttagttatttgtagtgggattgaaagtaatttttttctttttatatttctatatttagtttgtttttttgttgttgttgttttttgagatggagtctcgctttgttgcccagactggagggcagtggcgcgatctcggctcactgcaacctctgcctcccgggttcaagcagttctgcctcagcctcccaagtagctgtgactaaaggtgcacgccgccatgcccagctaattttttgtattttagtagagacggggtttcaccgtgttgcccaggctgctctcagaactcctgagctcaggcagtccaccgcctcggcctaccgaagtgctaggattacagacgtaagccaccgagcctggtctagtttgcattttttttctatcagttttataagttaagaaataaaaggaattaatgtt

SEQ ID NO: 3970 - DNA, 2578 bp, Homo sapiens
  source 1..2578: mol_type = genomic DNA
cttttgtctctcagctattttttgttccctatgtttgtaggatggaaaggcagatgtaaagtccctcatggcgaaatataacacggggggcaacccgacagaggatgtctcagtcaatagccgacccttcagagtcacagggccaaactcatcttcaggaatacaagcaagaaagaacttattcaacaaccaaggaaatgccagccctcctgcaggacccagcaatgtacctaagtttgggtccccaaagccacctgtggcagtcaaaccttcttctgaggaaaagcctgacaaggaacccaagcccccgtttctaaagcccactggagcaggccaaagattcggaacaccagccagcttgaccaccagagaccccgaggcgaaagtgggatttctgaaacctgtaggccccaagcccatcaacttgcccaaagaagattccaaacctacatttccctggcctcctggaaacaagccatctcttcacagtgtaaaccaagaccatgacttaaagccactaggcccgaaatctgggcctactcctccaacctcagaaaatgaacagaagcaagcgtttcccaaattgactggggttaaagggaaatttatgtcagcatcacaagatcttgaacccaagcccctcttccccaaacccgcctttggccagaagccgcccctaagtaccgagaactcccatgaagacgaaagccccatgaagaatgtgtcttcatcaaaagggtccccagctcccctgggagtcaggtccaaaagcggccctttaaaaccagcaagggaagactcagaaaataaagaccatgcaggggagatttcaagtttgccctttcctggagtggttttgaaacctgctgcgagcaggggaggcccaggtctctccaaaaatggtgaagaaaaaaaggaagataggaagatagatgctgctaagaacaccttccagagcaaaataaatcaggaagagttggcctcagggactcctcctgccaggttccctaaggccccttctaagctgacagtgggggggccatggggccaaagtcaggaaaaggaaaagggagacaagaattcagccaccccgaaacagaagccattgcctcccttgtttaccttgggtccacctccaccaaaacccaacagaccaccaaatgttgacctgacgaaattccacaaaacctcttctggaaacagtactagcaaaggccagacgtcttactcaacaacttccctgccaccacctccaccatcccatccggccagccaaccaccattgccagcatctcacccatcacaaccaccagtcccaagcctacctcccagaaacattaaacctccgtttgacctaaaaagccctgtcaatgaagacaatcaagatggtgtcacgcactctgatggtgctggaaatctagatgaggaacaagacagtgaaggagaaacatatgaagacatagaagcatccaaagaaagagagaagaaaagggaaaaggaagaaaagaagaggttagagctggagaaaaaggaacagaaagagaaagaaaagaaagaacaagaaataaagaagaaatttaaactaacaggccctattcaagtcatccatcttgcaaaagcttgttgtgatgtcaaaggaggaaagaatgaactgagcttcaagcaaggagagcaaattgaaatcatccgcatcacagacaacccagaaggaaaatggttgggcagaacagcaaggggttcatatggctatattaaaacaactgctgtagagattgactatgattctttgaaactgaaaaaagactctcttggtgccccttcaagacctattgaagatgaccaagaagtatatgatgatgttgcagagcaggatgatattagcagccacagtcagagtggaagtggagggatattccctccaccaccagatgatgacatttatgatgggattgaagaggaagatgctgatgatggtttccctgctcctcctaaacaattggacatgggagatgaagtttacgatgatgtggatacctctgatttccctgtttcatcagcagagatgagtcaaggaactaatgttggaaaagctaagacagaagaaaaggaccttaagaagctaaaaaagcaggaaaaagaagaaaaagacttcaggaaaaaatttaaatatgatggtgaaattagagtcctatattcaactaaagttacaacttccataacttctaaaaagtggggaaccagagatctacaggtaaaacctggtgaatctctagaagttatacaaaccacagatgacacaaaagttctctgcagaaatgaagaagggaaatatggttatgtccttcggagttacctagcggacaatgatggagagatctatgatgatattgctgatggctgcatctatgacaatgactagcactcaactttggtcattctgctgtgttcattaggtgccaatgtgaagtctggattttaattggcatgttattgggtatcaagaaaattaatgcacaaaaccacttattatcatttgttatgaaatcccaattatctttacaaagtgtttaaagtttga

SEQ ID NO: 3971 - DNA, 850 bp, Homo sapiens
  source 1..850: mol_type = genomic DNA
agggaccttatttaggttgcgcaggcgcccgctggccatttcgtcttagccacgcagaagtcgcgtgtctaggtgagtcgcggtgggtcctcgcttgcagttcagcgaccacggtgggtaccgtttttgcgaggattgtttgtccccatatctctgggagggccacggggaccttggcgagctgcaggctgccgtcgagagccgcgagtggttcgctgaatctcggcaccgccgctgaggcctgcaggccgcgccgactctattgtgtgagaagtcggaggaggcggagcggaagcggccgccgccatttcctttcctctacgctggctctcggcccgggcccccacggttcggggcgccgacagctgttgctcaggacagctttgggggtccggtcgccggacgaggaggtgttggagtcgccgggtttgtttcgacgccggaccgcgtaagagacgatgatgttgggcacggaaggtggagagggattcgtggtgaaggtccggggcttgccctggtcttgctcggccgatgaagtgcagaggtttttttctgactgcaaaattcaaaatggggctcaaggtattcgtttcatctacaccagagaaggcagaccaagtggcgaggcttttgttgaacttgaatcagaagatgaagtcaaattggccctgaaaaaagacagagaaactatgggacacagatatgttgaagtattcaagtcaaacaacgttgaaatggattgggtgttgaagcatactggtccaaatagtcctgacacggccaatgatggctttgtacggcttagaggacttccctttggatgtagcaaggaagaaattgttcagttctt

SEQ ID NO: 3972 - DNA, 552 bp, Homo sapiens
  source 1..552: mol_type = genomic DNA
ctcgcgggaactgcattcaaatatcccaggcgcttactcgagagctagctgagcgaatgggccggcgactgtggagttagcgtcctcaatgtggacgccctgagctcccattaggagccgctggctgcggcagcaggggactagcgtgagagaatggaacctagtatataaggcattcaagaaatactcgttcagtgaatgactacattgacttgagacatgggggaacatcttgcaatgacctggtgccctttgaaggcaaagttggctaaaaaaaagaaaagaacatggaggcagatataatcacaaatcttcgatgcaggctcaaagaggctgaagaagagcgactaaaagctgcacagtatggtttacaactagtagagagtcaaaatgaattacagaatcaattggataaatgtcgtaatgaaatgatgaccatgactgagagttatgaacaagaaaaatatacccttcaaagagaagttgaactcaagagtcgaatgttagaaagtttgagctgcgaatgtgaagctattaaacaacaacaaaaaa

SEQ ID NO: 3973 - DNA, 4273 bp, Homo sapiens
  source 1..4273: mol_type = genomic DNA
atgacggccggcgcgagtattttccacataaggtggctgtcgtttttctcctggcgtctgtggaggcgagtggtctgcgggcagcagctcccagaggcagccttggaattccagctcggactgggcgggaaggcgcaggcggcccaggtcgccgacacgctcacgcaccctccctgcctggccgcgcctctgcgaccaggtgacccaatgaaagaagaaaatgaaagccataaagaaaagtcttacagaagaagaatacctgtacctggacttttctcaccaaacagaaggatgcatctttcctcttcatacatctgtaactttatttctgttatcttactgtgactgtaaaatctttaaaatttgcttagttgtcaccaaagaggtgagtagagatagttcactactaagagatgacctgatccaggatgttgaaatacagattatttcaaggcaggagctcccaccaatagtccaaaattgctgtttgcctgcagtagtagaacgatcagacaatttttgtagagcaggacttgctgttgtattgagacacataatccagaaatcctatgaagcagaccccttaaagaaggaacttttggaacttctgggctttaaaaagacttgcttgaaagcctgtgctgaagttagtcagtggaccaggctatgtgaactcaccatccctttggctattgagaattttctcagagaatcttctgaccagcccccaactatacctgtagaaatactacagctagagaaaaagcttagtgagcctgttagagtgcataatgatgataaactccgcaggcagaagctcaagcaacagaaggctgatggagttgggcctccccttactaagggaaaggcaaagagcaaggtccacacacaggaaacatctgaagggttggattcttcatccaagagtctggaactgaaagtggcattctcaaagctcacagtacaggaagaaccagctactaccaacagagagccttctcacatcagaaaagcaaaagcctccgaccttccacctctggagcatgtgtttgcagaagggctttacttcactctggcagatattgtgctcttgccctgtatccatcatttcttggtaattatcagcaggaaattttctgagaagctggtagaatttccattgctagcctcttggtaccagaggattcaggaagtgccaggagtaaaaacagcagcttctaagtgtgggatccaatttctccatttaccaaagttgttgacaacctcaactgaacagcatccaaacttatgtgaagtcccaggtgtagaagagcaaagcgatcctttatttataggaggaccaagaccaaccatggccaagttaatggaaaagggcattgaagtgatgttttctccccacccttgccctacttggactcttgattggaatgttctccctgcagcagtcagcccaaaggaaggtaaaatgtccagtgatcgagctttgaggaagcagcaacagttgaacaaccttgtctatgtggtaacaaatcaggccaaacctggtgacagaattgtggatttctgcagcggtgggggccatgttggaattgtccttgctcacatgctgccatcatgtcaggttacattaatagaaaacaaggaattatcattaattcgtgctaagaagagaagtgatgaactgggtttaagcaacatttggttcattcaagcaaatatggaatattttactgggatgtttaatattggagtagcattgcatgcttgtggagtggcaacagacatggtgattgagcactgtatcaaaacacgggcttccttcgtcacatgcccttgctgttatggtttcattcagaacacctcaaagttcaattttccaaaaagtgaacaattcaagaaaactttatcatacaaggaacacatgattctgtgcagatttgcagaccagacagctgtccagctcccaccccaacgaaggctcataggaaaacagtgcatgtgcttggtggatctggatcgagcaagagctgcagaagaatgtggatactccgttcaagtgatatccatggagccagagagctgctctcccaaaaataacatgattgtgggagtccccatttaaaatgagatattcacatttgatattttgccatccgtcttcacgttggatgcccagtggcattcaggaggttcttggcataactaggaaacagcattagccatcttgaacctattgtgctcaggaaggaaagcaacagggaaatcttggaagtaaaggctccctgcaaagcatcacaaatgctttacaatgtgtgattaaaggactgctggtttttatagtgagaatcccctgaagtctcagctgccaaaagaataatactagtggaggttccatcacaggaataacaatttccttctcacttcacaagctcctctgatcttgccaatgtgatgtttaattcaaaacagcgcacttacagcctttattttatacttatttagatattcacatgggaactgaaagtagactcagtggagttttttgttttttatatttttaacaattgtactttttctatcactttaaaaaaatctagtcaggtaattatagtacagttatttttaagctggggttagttgaacttgtatagcatttaatatactccttttaaatatatttctgccaggcatggtggctcatgcctataatcccagcactttgagaggccaaggtgggaggatcatttgagcccaggatatcgagaccagcctgcactacaaaaaaatccaaaaaatgaggtgggaggatcacttgagcccaggaagtcaaggctgcagtgagccttgatagcgccactgcactcctgcctgggaaaatgagacccagactcaaaataaatcaatgaatgaattaataaacaaataaataaataaataaatttcccataaattaccaaatgagattgtcactggttcaaattattaaataattgccataaatttcctattacgggaatgtggaatttggacatacattttaacaataagtacattgattaatacatttaagtttataagtaattattgaggatccagtattttcaagaccttggcctagtttcttttcaattcaaagatgagttgcaaaagacataatgttttgcctatggaagtagatcatctagaagaaaaagattaaagaattagttaagcttttttttttttttttttttgagacagagtttcactcttgttgcccaggctggaattcagtggctcgatcttggctcaccacaacctctgcattctcctgcctcagcctcccgagtagctaggattataggcacctgccaccatgcccggctaattttgtttgtaattttagtagagatggggtttctccatgttggccaggctggtttcgaactcctgacctcaggtgatctacccgcctcagcctcccaaagtgctgaaattacaggcgtgagccacctcacctggccatgttctttatggaatactacaatgtgttgtcacaggatttgttattcagatgtcaatcatttttatttatatatttctgggtaaaacttattagtggtgtgaggagtgcagaatatggaagcttacctaaattctttttctgccagccaacattttaaaagacaaatgatgcatcctttctcaatgctgctaattctttaaattttacatgtcccaatttattccatttgagatttattttaatgttttcaacccctgtgtaacatgtatcatgaggagaaagcactatcattgatcatcactatggattaaaatataggaatattttacagggcagtatgggtgggggtgggagacatattggaatcgtgttttctgggataaaatttttaaaaagaattaatcattagccctgagtattttagtcatttgtgcctatagaaaacaacatgctcttttattgtggactttcttcttttaagtgaggtttaatttatatacaatacaataacagatttttaagtattcatttgagatgttttgacaactgtatatatacatgtaaccatcactggaatcagatatagaatattccccttaaatattgtcaggtaaacacattgagaatattttttccagtctgtggcttacctacttattttcataatgaatgttttacttgtgatgaagatttaacttacccttttactttaatgattaatattttctgtgttctttctaataaattttacgaactctgaggttataa

SEQ ID NO: 3974 - DNA, 913 bp, Homo sapiens
  source 1..913: mol_type = genomic DNA
ttccaaatacaaacggtcggcgcgagaagcgcttctgggcgcaggcgcctggctgtagcgactggttgcgggaggctggactctggtgactgtgtatggttgcatatgctccgttttcctctccctgtcgtgctgggcctttgaaaccggcttctttgctggtggctgcttgaagcatcaagtgtacctgatttgtgaacctatcttgcttcagttggtttcctcctaaatattaggcagatgggattggctggtctgtgctctgctaggtgaaaaattagacgatttcaagaattggagctgaatctgatgttaagtaatggcaacaggtgacttaaaaagaagcttacggaacctagaacaggtgctccgcttgctaaattatcctgaagaggtggactgtgtaggtttgataaagggagacccagcagcatctttgcccatcatcagctattcttttacctcatactcaccttatgtaacagaacttataatggaatccaatgtagagctcatagcaaaaaatgacttgcgctttatagatgctgtctataagcttcttcgtgatcaatttaattataaaccaattttgacaaaaaagcagtttatccaatgtgggtttgcagaatggaaaatccaaattgtttgtgatattttgaattgtgtgatgaaaaagcacaaggaattaagcagtcttcagaagattccatcacaacaaagaaagaaaatcagttctggtaagtcagaacctcctttgggcaatgagaaaatatctgcagaggctgttggcgttgatatcagtggcaggtttatgacctcaggaaagaagaaagctgtggtgattcgtcacttgtataatgaagataatgttgacatttctgaggatacattaagtccaataacagatgttaat

SEQ ID NO: 3975 - DNA, 560 bp, Homo sapiens
  source 1..560: mol_type = genomic DNA
gcagcgcctggcgcccgggaagaggtggttgtgaggcagacgaactcgcggctctccggcttccgaggcttccgagttgtcggaggaagggggcggcgagcaataagaacccgccgcacccggtcctcagcgactcttctgacctccgcgcgacgtacccgccgccgccgttggctggagttattcttgtgtttgctccctcagcatttgacattgtgcagcaaagaaatggttatggagaagcccagtccgctgcttgtagggcgggagtttgtgaggcaatattatactttgctgaataaagctccggaatatttacacaggttttatggcaggaattcttcctatgttcatggtggagtagatgctagtggaaagccccaggaagctgtttatggccaaaatgatatacaccacaaagtattatctctgaacttcagtgaatgtcatactaaaattcgtcatgtggatgctcatgcaaccttgagtgatggagtagttgtccaggtcatgggtttgctgtctaacagtggacaaccagaaagaaagtttatgcaaac

SEQ ID NO: 3976 - DNA, 945 bp, Homo sapiens
  source 1..945: mol_type = genomic DNA
ctgtggctctgtggtaggggaatgccaccaactccctgaggagcagccgtgtggtatgattggtgaacaaaaattgtttgctggcccccaggatactaactagacctttggcctgactcacaggacactaaggctccttttctgaagaagccttttaccagtctcatttaggggatgggaacaacatgtcttcacctagggactttagagcagagcctgtaaacgattatgagggaaatgactctgaagcagaagacttgaatttcagggagactttgccttcatcaagtcaggaaaacacacctagatcaaaggtttttgaaaataaagttaattcagagaaggtaaaactttctcttcggaatttcccacataatgattatgaggatgtttttgaagagccttcagaaagtggcagtgatcccagcatgtggacagccagaggccccttcagaagagacaggtggagcagtgaggatgaggaggctgcagggccatcacaggctctctcccctctactttctgatacgcgcaaaattgtttctgaaggagaactagatcagttggctcagattcggccattaatattcaattttcatgagcagacagccatcaaggattgtttgaaaatccttgaggaaaaaacagcagcgtatgatatcatgcaggaatttatggctttagaacttaagaatctgcctggtgagttcaactctgggaatcaaccaagcaacagagaaaaaaatagataccgagatattcttccatttcaacatcatggatatagtggcccaaatgagagaacaacgttctggcatggttcaaacgaaggagcagtatcacttttgttacgatattgtgcttgaagttcttcggaaacttctgactttggattaagaaagacttctgttgcctctcacttgaaattaccaagtgggtttgcac

SEQ ID NO: 3977 - DNA, 2044 bp, Homo sapiens
  source 1..2044: mol_type = genomic DNA
ttattagcccctcctcctcgctcggtccaggaccggctctgcgggcgccgccaggcccagaccaagctactatcagaagttgaattctaataattagctattttataaaggtaacgagaaaaaatacactatgtctgatgaagtttttagcaccactttggcatatacaaagagtccaaaagttaccaaaagaactactttccaggatgagctaataagagcaattacagctcgctcagccagacaaaggagttctgaatactcagatgactttgacagtgatgagattgtttctttaggtgatttttctgacacttcagcagatgaaaattcagttaataaaaaaatgaatgactttcatatatcagatgatgaagaaaagaatccttcaaaactattgtttttgaaaaccaataaatcaaacggtaacataaccaaagatgagccagtgtgtgccatcaaaaatgaagaggaaatggcacctgatgggtgtgaagacattgttgtaaaatctttctctgaatctcaaaataaggatgaggaatttgaaaaagacaaaataaaaatgaaacctaaacccagaattctttcaattaaaagcacatcttcagcagaaaacaacagccttgacacagatgatcactttaaaccatcacctcggccaaggagtatgttgaaaaagaaaagtcacatggaggagaaggatggactagaagataaagaaactgccctcagtgaagaattggagttacattctgcaccttcttcccttccaacgccgaatggcatacaattagaagctgagaaaaaagcattctctgaaaaccttgatcctgaggattcatgcttaacaagtctagcatcatcatcacttaaacaaattcttggagattctttttcaccaggatctgagggaaacgcatctggaaaagcagaccatgtgactactgcagttgagaaatccaaggaaagtcaagtgactgctgatgaccttgaagaagaaaaggcaaaagcggaactgattatggatgatgacagaacagttgatccactactatctaaatctcagagtatcttaatatctaccagtgcaacagcatcttcaaagaaaacaattgaagatagaaatataaagaataaaaagtcaacaaataatagagcatccagtgcatctgccagattaatgacctctgagtttttgaagaaatctagttctaaaaggagaactccatcgacaactacctcttctcactatttagggactttaaaagtcttggaccaaaaaccttcacagaaacagagcatagaacctgatagagcagataacataagggcagctgtttatcaggagtggttagaaaagaaaaatgtgtatttacatgaaatgcacagaataaaaagaattgaaagtgaaaacttaaggatccaaaatgaacagaaaaaagctgctaaaagagaagaagcattagcatcatttgaggcctggaaggctatgaaagaaaaggaagcaaagaaaatagctgccaaaaagaggcttgaagaaaaaaacaagaagaaaactgaagaagaaaatgctgcaagaaaaggagaagcactacaagcttttgaaaaatggaaagagaaaaagatggaatatcttaaagagaaaaatagaaaggagagagaatatgaaagagcaaagaaacagaaagaggaggaaactgttgccgagaaaaagaaagataatttaactgctgttgagaaatggaatgaaaaaaaggaagcttttttcaagcaaaaggaaaaagaaaaaataaatgagaaaagaaaggaagaactgaaaagagctgagaaaaaagataaagataaacaagctattaatgaatatgaaaaatggctggaaaataaggaaaaacaagaaagaattgaacgaaaacagaagaaacgtcattcctttcttgaaagtgaggcacttcctccgtggagccctccaagcagaactgtgttcgcaaaagtgttttgataattctagttcttacattatttggttatttatcggtttgcc

SEQ ID NO: 3978 - DNA, 690 bp, Homo sapiens
  source 1..690: mol_type = genomic DNA
acgcctggtgaatggacgcactcttaccaattctgctctgggagatgcagcggtaacctaccgagcgcagaggccggcgcgcacccgtggagcccgcgctcgcgatccctcctcgtgccagggccccagggcagtcaaggcctgccgaccgttaggcgggtcaaggggtacacagggtgcgaattcgttaggcaaaagctgggtacaggcgcgagccacaggcacggaaacctcgcgccgaccggggccctaggcccgacgacggcaggtcggccaggagcgcgccggtaagagcctgggggcaaggggtagaaagacgcccacctcatcacaacccagagctcgggactcctatacagtcccatagggaacaggcggccgccattcccctcccccacgctggcggtttgtttcgacgccggaccgcgtaagagacgatgatgttgggcacggaaggtggagagggattcgtggtgaaggtccggggcttgccctggtcttgctcggccgatgaagtgcagaggtttttttctgactgcaaaattcaaaatggggctcaaggtattcgtttcatctacaccagagaaggcagaccaagtggcgaggcttttgttgaacttgaatcagaagatgaagtcaaattggccctgaaaaaagacagagaaactatgggacacagatatgttgaag

SEQ ID NO: 3979 - DNA, 4113 bp, Homo sapiens
  source 1..4113: mol_type = genomic DNA
gcactctagcctgggtgacagagtgagactccgtctcaaaaatatgcactgctgatctgttaatagagttatggaatcattgagctaaatgaagtttgcatatgaacaaatgaatgaattggctacaaattgatatgatttatagaaactctgttcgaaagtattggggacttgatgtttaaacattattttagtaaaaattcctataaccatgtatcatctgtaggattgatttggtacctatttctcctgttggaccatgagttcctccagagcagagcttttgtcttagactattttatttctatttctatttcttttttttctttctttttttttttttttttgagacagtctcttgctctgtcacccaggctggaatgcagtggcatgatctcggctcactgcaacctctgcctgcagggttcaaatgattctcctgcttcagcctccccagtagctgggacaggcgcatgccaccgtacccggctaatttttgtatctttagtagagacagggtgttggtcagactggtcttgaactcctgaccttgtgatccgcccacctcggcctcccaaagtgctgggattacagatgtgagccaccatgcccagcctagactgttttatttcttaagcactgttttcctaatttcttaagcactgagctcccttaaaattcagcaaatgtttgttaatgatgatgaatattttactaatttctttaaaaacatattttcaattgaagttgcaaaaccttggaacctcttaatttatatcttgcataaatgacaatttgttaaagttaagatacattgctgtggaaatctatgtatttctttactgcaaaatagtattaaaggaaactaaatgaatttcaagaatatgagctttataatttaatttttaggattcgctaaatattgtaatggatcaaggagatacacctacactagaggaagatttgaagaaacttcagctctctgaattctttgatatctttgagaaggagaaagtagataaggaagctctggctttatgtacagaccgagatcttcaggaaataggaattcctttaggaccaagaaagaagatattaaactatttcagcaccagaaaaaactcaatgggtattaagagaccagccccgcagcctgcttcaggggcaaacatccccaaagaatctgagttctgcagtagcagtaatactagaaatggtgactatctggatgttggcattgggcaggtgtctgtgaaatacccccggctcatctataaaccagagatattctttgcctttggatctcccattggaatgttccttactgtccgaggactaaaaagaattgatcccaactacagatttccaacgtgcaaaggtttcttcaatatttatcacccttttgatcctgtggcctataggattgaaccaatggtggtcccaggagtggaatttgagccaatgctgatcccacatcataaaggcaggaagcggatgcacttagaactgagagagggcttgaccaggatgagtatggaccttaagaacaacttgctaggttcgctgcggatggcctggaagtcttttaccagagctccataccctgccttacaagcttcagaaacaccagaagaaactgaagcagaacctgaatcaacttcagagaagcctagtgatgttaacacagaagagacctctgtggcagttaaagaagaagtcctgcctatcaatgtggggatgctgaatggaggccaacgcattgactatgtgctacaggagaagcctattgaaagttttaatgagtatttatttgctttacaaagccatctatgctactgggagtctgaagatacagtattgctcgtcctcaaagagatctaccaaacccagggtatcttccttgatcagcctttacagtaaaaatgacccatctatggctgcttaatacggacattgagggatccttccccagaaaatccacctgtttgttgctgcaattttcctctcctcagctgcgtcatttcctgcatgttgcctgccacttactcaccactggggtctttggaagataatcttcctctttggaaatgaatggaaaagcaaaaggccctattacttttaaccactggcttcatataaacacttgccatttttttctgcatagctgggggtggtttgtgtctttaattctttgatgatagtttatagttgccacactttattgattagtacttgacagggtgtaaagcctattttgggtttgatttgttttgggtggggtagacatgtttttaaggaacttattgcttatctttagaaaatgttctagtttggaaacagattcttgagattcagaaggcattttggagtacacttatctcttgtttgtgttgaactgaaggctaagtctcagtggacatggaaaagacttttgggtgatttatttttgaacctgcatttctttcttatgtgtagtgtatgaagaaagactagaatgtagctttaaaaaagtgttgtttactctcttagaactgacagacttattgccagaaatcactgatgttcattgtttttgcaactgtttgagctgctgtaagagtctaaagttgacaagttagttcatgttaggtgcatctttataaagcaaagatgttgtatatcctaggcctcccttttatatttgatagaagttatttgctaatagcttctattcttacgttgaaaatagttgtaaaagctgatgaacctgaaattgtgtagcctctacaggctgctgaggttctaaataaaaccttttagtggtgcctttatggtgaaacagaatttgtcacctgccatttctacttgagctaaggtagtattgtgtatcctctttccttcttaggtatccataatccacaaagcatatttaaaaggctcttggcacgggcagcattggttgagcaggtaggtttggctagggggaaatgtttaacttgttctgaaagaaaaacttatgtctgtagggtccaagaaacagctattccagagtcagtgtcagctgagtctggaacatatgaagtgaggtttacttctaagaacacaagtgactgcacactaattttgtcaaggcatcttttcactactttgctgtagatttttcttcttcattggtcagtttgtcattgtctttgtagttctctttatgataatcctttatacttgctctcagattccacaggcctctgtttatagagtggcaaaggcaggcgagctgtggtttattgtttataaatttttttataaatgttatggtattcaaagccactgacatttaatatttactgaagccattccttagacagcagtggtctttatccctttctggaaagaaaaggaaaatgaagggtaattactgtcaccatggagattgtagaggtaaggttggggtataggtcaggcctggcctttctttgtcatctgcttatagtctagtgctaagtatgccactaagtttcagatatatggaatactttatttttttaaaggtatataaactctgagttattgagaattaagtattcactgtatattaaggggaagcttttgccaagttgtggtcttcaaatttatgtttactcttcctattggcagaataggtgctatttaagagtaaaccaaaggataagcagagggagtccctataaccaaagatggacagcatagccctggatagccagataaaccactctttgtattaagaaatgtttctttcctagtggtgaggggtgggtaactgtgaaagagctttatatcttgtctattcatggtattatagctgtatattcccaggatgataagcttgattgaaatcctgtatttagtcatatattatttgcgctgcttcatttgtatcatgtgcaatctctagaccaaccctatttttaaactctggtacagcatcattttgtacatattcccagctgcagaactagtatcacttatctcagcaaaagagattgtttgcatggaaagattaatagcactgattagatttctaatattttgcatttttgaaatgtttgttttctacgtgattatatttaaaactttagtaaatactaacatgaaacc

SEQ ID NO: 3980 - DNA, 2771 bp, Homo sapiens
  source 1..2771: mol_type = genomic DNA
gaactgggccaagcgcccccggaggcgctaagcttgcgccctgaggcggtttccgttcccggacgtttggactctgtcctggagaaggggaaggaaaaagtaagacgtagaagtacactgagacttcgtcacacataaaacaagcacgacaaagaaagagggcgcgaagggactcctggaagaaattgagtctacatttaagatcaccctaaaagtagtgacggcctcttcattactccaaaccccagatttaagtcggtaggacgtcttcgcgttgacttgtggggaatgtagtttcgatgctgccggcgcgttttgtttgcgacagaaactacaacccccaggggccaccgcgacgttgcctgtgggtgcccgcgaaccaacggttagcggtggcaggggctgactgagagcgtctgcttgataatggattctgaattaatgcatagtatagtaggaagctatcataaacctccagaaagagtatttgttccctcattcacccagaatgaaccatctcagaattgccatcctgcaaacttagaagttacctctcctaagatacttcatagcccaaatagccaagctcttattttagccttaaaaactcttcaggaaaaaattcatcgtttagagctggagagaacacaagctgaagataacctgaacattctttccagagaagcagcacagtataagaaggccttagagaatgaaacaaatgagagaaatctggcacaccaggagctgataaagcagaaaaaagatataagtatacagttaagctcagcccagtctcgttgtactcttctagagaagcaactagaatatacaaagagaatggttctcaacgtagagcgagaaaagaacatgatcctagaacaacaggcccagcttcagagggaaaaagaacaagatcagatgaagctgtatgcaaaacttgaaaagcttgatgtcttagaaaaagagtgtttcagacttacaacaactcagaaaactgctgaggacaagattaaacatttagaagaaaaacttaaggaagaagaacatcagcgtaagctatttcaagacaaagcttctgagcttcaaactggacttgaaatcagtaaaattataatgtcttcagtttcaaatctaaagcactccaaggaaaagaagaaatcttcaaagaaaactaaatgtataaagagacgaccaccttggcaaatttgttcaaagtttggagcactgccttttgtggctgaaaagatgaggcaacatcgtgacccacatatccttcagaaaccttttaacgtgactgagactagatgtctccccaagccttctagaacaacttcctggtgtaaagctattcctcctgactcagaaaagtccatttccatttgtgacaatttatctgaacttttgatggcaatgcaagatgagctggaccaaatgagcatggagcaccaagaactactgaaacaaatgaaggaaactgaaagtcattcagtctgtgacgacatagaatgtgaactagagtgtttactcaagaaaatggaaattaaaggagaacaaatctccaaactgaagaagcatcaagacagtgtctgtaaactgcagcaaaaagttcaaaactcaaagatgagtgaagcttcaggtattcagcaagaagacagctaccctaaaggatcaaagaacataaaaaatagccccagaaaatgtttgactgacactaacctttttcagaaaaacagcagctttcatccaatacgagttcataatcttcaaatgaaattgagaagagatgatatcatgtgggaacagtaacaaaacagcaaaactgtcaccttaatgaactttgtcagtgagaccttgaattgtctaaagtggttttaatttaatataactttgtgacattttgaatcatgtttctagtttctataaaacatgaagttgcagtatttaaaaattaatgcctaatgacctggtgggttccaaataataaattaattgcttttttatttttcttattgattgaagcccgtaacctcatcttgtcttagaaacattgttggctttgcagatatcttaagctaaatttaagaaattgtactagattgacaatattcaaaattgagttaaatccaagctacaagtaccattcattccacttttcatttagtaggtttggaaccttaaaaaccaatgttcaatgaacagagttcagaaagatcatttagctttcctggtgccttctttctattttgttttagagctgtgaaatgtttttctcttttggaaaaggaaaaacttaatagttacacagttttgtgaagaagcctttaatccaagttttatgagacagtaggaacctatagctacttaatttttaggagacagtaattcagttgcagaagctttcctctgctattcccattctcttttacaaaactagttttttttaaaaaatcaatgatcaattttatcttactactttataacttttgctgacttttattctttgcattgtatgtaatgtccatcagtataaattgagactgtgaatttctaggacccacaaaagtggtattttttttttgtacaagaaagtatagaggaagaggaagctgggcattaaattacctcatccagcagaaattcacggtagtatggtatatttttattttttatattttaaaatcaataatgtcaaatgtcattgtgtatgcatgctttataataaatttacacttgatcatttttctggaagcctatgggaactagtacaa

SEQ ID NO: 3981 - DNA, 1068 bp, Homo sapiens
  source 1..1068: mol_type = genomic DNA
atgaccggctccgcggccgacactcaccgctgcccccaccccaaaggcgccaaaggcacccggtcccggagcagccacgcgcggcccgtgagcctcgccaccagcgggggctcagaggaggaggacaaagacggcggggtgctgttccacgtcaacaagagcggcttccccatcgacagccacacctgggagcgcatgtggatgcacgtggccaaggtgcaccctaaggggggagaaatggtgggcgccatcaggaacgccgccttcttggcaaagccttcaataccccaggtcccaaactacaggctgtcgatgacgatcccagactggctccaggcgatccagaattacatgaagaccctacaatataatcacacagggacccagttctttgaaattaggaaaatgagaccgctgagtgggttaatggaaacagcaaaagaaatgacccgagagtccttgcctatcaaatgccttgaagctgtcatcctgggcatctacttaaccaatgggcagccttccattgagcggttccccatcagctttaaaacctacttctcaggaaactactttcaccacgttgtgctggggatttactgcaatggccgctatggctcattgggcatgagccgcagggctgagctgatggacaagccattgacttttcggactctgagtgacctcatctttgactttgaggactcttacaagaaatacctgcacacagtcaagaaggtcaagattgggctgtacgtcccccatgagcctcatagcttccagcccattgagtggaagcagctggtcctcaacgtctcaaagatgctgagggctgacataaggaaggagctggagaaatatgccagggacatgagaatgaagatcctgaaacctgcaagtgcccactctccgacccaagtgagaagccggggaaaatccctgtcccccagaaggagacaggcaagccccccgaggaggctcggccggcgagagaagtcgcctgcactgcctgaaaagaaggtggctgatctgagcactctgaatgaagtgggctatcaaatccgaatttag

SEQ ID NO: 3982 - DNA, 563 bp, Homo sapiens
  source 1..563: mol_type = genomic DNA
gtcccaaccgccgacgccgatgcggagctgagctggctttcctccagggctctggactccctgctgagcaagagagaaagaggcccgcccttccaccaggacgcctgaccctggggtccttcccaaacccgggtctcttccgactccgggcccaacagtttgtgcgattaaagtgaagaaacaatggccagcaatcacaaatcttcagcagctcgccctgtttcaagaggtggagttgggttaacaggaaggcctccttctgggatacgacccctatcaggaaatattcgagtggcaactgcaatgccacctgggacagcaagaccaggttctcgtggttgtcccatagggactggtggagttctgtcttctcaaatcaaagttgcccatcgccctgtaacacaacaaggtttgactggaatgaaaactgggacgaaaggtccccagaggcaaattttagacaaatcttactatcttgggcttcttagaagtaaaataagtgaacttacaactgaagttaataaacttcagaagggaatagaaatgtacaatcaagagaattc

SEQ ID NO: 3983 - DNA, 2287 bp, Homo sapiens
  source 1..2287: mol_type = genomic DNA
ctaagcctcgattgaaggagcacatcccttccattgaagctgcagaggagcagctgccaccctgtgcacccacacttgcttaagggtctagctggataacaaaaggaggcccagaatcggtggagcttggagatgagcgaagcagtcctgcaccaggttctgaactaattagctggtggaggggacaatacgagtttaaacagcggctctgggtgcctaagattctacattttatacagacatccttggttccagagggggctgagcaggggggtccgaggtgagtctgtgagcatgtgcaagtctgtaccagcttgtgaaggacatgccatgtcccctgagtactcatagaaagacaccaacatgacaaaggtagtttggctttatacctagaaaaggcccccaggtcacaagcttctcaggactttgtgggattttccaggtgggccctgaggggtggcactaaagcagactcaagaggagtctggggtggaggtgggttgcttggaaaagagggcggaggaaaaagctaaatgcagtcagccaggaggggctgcccaggacccaagtcaaagagaagaatttgaaagctttggaagcaagtgctgttgtgggggctgcatagcccagggctggctgaagctgatccaccacgctctgccactctggctccacagagcacagagcttgtccctaaagcttcctgtagctgaccatgagaaatggtcatgcagccacacacacttccccagcccctctctctgctctaccagcctgtcacccacgtttgggccacgagaagtcactgctctgtaagtagttgtgactgcagtgggtctttttggtcacccctgtcctgggcttacttcaggtggaagcttgaagctggatggcagctgagccagcagaccgattctgacacttacagatgaggaaactaaggcagagatggtaggacctgcccagtgttacagctgagtaaagtggcagagctgggaccagaacccaggtttgctgactccctgtctagcactccttccttcaggctatgtagtccctgagcagaatgtggcatctcaggttgtgagaaatgatggagttcaaatttataacaaggaaggcttctaaagggctaggaaggcttctaaagggctggggctcacctgggacctgtccagtcttatttgaggagccacacccttagaggtcattctggaacagacctgggaatccatggaatgtgctggaaagagccctgggctgggatctggtccagttctggtgctcacatgctatgtggtcttaagcaagccccttcccctctctggtgctccaattactaaatgcaaaatgagggtttggccccagtgcttttccagctccgatgctccatggcccagttctaacagagagccctgatcttgaagtggactcactcccctgggctggagcctggtaaagataggaaaagggtacacagtcccatcccggtcactctgccttcctgaagtgctctccttgggtcctctgcaggtgatttgtctacagcaaccaagagcaaaacaagtgaagacatcagccagacctccaagtacagtcccatctactcgccagacccctactatgcttcggagtctgagtactggacctaccatgggtcccccaaagtgccccgagccagaaggttctcgtctggaggagaggaggatgattttgaccgcagcatgcacaagctccaaagtggaattggccggctgattctgaaggaagaaatgaaggcccggtcgagctcctatgcagatccctggacccctccccggagctccaccagcagccgggaagccctgcacacagctggctatgagatgtccctcaatggctcccctcggtcgcactacctggctgacagtgatcctctcatctccaaatctgcctccctgcctgcctaccgaagaaatgggctgcacaggacacccagcgcagacctcttccactacgacagcatgaacgcagtcaactggggcatgcgagagtacaagatctacccttatgaactgctgctggtgactacaagaggaagaaaccgactgcccaaggatgtagacaggacccgtttagagcgccacctgtcccaggaagagttctaccaagtctttggcatgaccatctctgagtttgaccggctggccctctggaagaggaatgaactgaagaagcaagcccggctgttctaggcagaggctctataaatatatatgcatttatataaagatatatgtaaaatctc

SEQ ID NO: 3984 - DNA, 224 bp, Homo sapiens
  source 1..224: mol_type = genomic DNA
tcgggttctgtggacacaggcaggaagcttaagaggctctgctgagcagggacctggggaagaggagaggagaggcagcagcatggcgagtgtcctgtcccgacgccttggaaagcggtccctcctgggagcccgggtgttgggacccagtgcctcggaggggccctcggctgccccaccctcggagccactgctagaaggggccgctccccagcctttcacca

SEQ ID NO: 3985 - DNA, 1094 bp, Homo sapiens
  source 1..1094: mol_type = genomic DNA
aagcaagcctcttataggcagcataagttgagtgtttttaaaaatccatttaactactttgcctttttattggagaacttaatccacttacgttcagggttatcattcataggctgctgatactttggctgtgaggcaaaaaaggagaatttatgatatcaccaatgtcttagagggaattgacttgattgaaaaaaagtcaaaaaacagtatccagtggaaaggtgtaggtgctggctgtaatactaaagaagtcatagatagattaagatatcttaaagctgaaattgaagatctagaactgaaggaaagagaacttgatcagcagaagttgtggctacagcaaagcatcaaaaatgtgatggacgattccattaataatagattttcctatgtaactcatgaagacatctgtaattgctttaatggtgatacacttttggccattcaggcaccttctggtacacaactggaggtacccattccagaaatgggtcagaatggacaaaagaaataccagatcaatctaaagagtcattcaggacctatccatgtgctgcttataaataaagagtcgagttcatctaagcccgtggtttttcctgttcccccacctgatgacctcacacagccttcctcccagtccttgactccagtgactccacagaaatccagcatggcaactcaaaatctgcctgagcaacatgtctctgaaagaagccaggctctgcagcagacatcagctacagatatatcttcagcaggatctattagtggagatatcattgatgagttaatgtcttctgacgtgtttcctctcttaaggctttctcctaccccggcagatgactacaactttaatttagatgataacgaaggagtttgtgatctgtttgatgtccagatactaaattattagattccatggaaacttgggactgttatctacctctaactgtgtaacattttagacttcttaataacctaaatatttaaaataatgaatgtaacaccttttttagttcactgattctgaagtgttcttccctaatactttctttacttcacaaaacttcaaccataaaaacaaaggg

SEQ ID NO: 3986 - DNA, 876 bp, Homo sapiens
  source 1..876: mol_type = genomic DNA
gttgtcgaccctgttcttcgggagaccctaccaggttccgttcacctgccccgcccccgactcagcgaggcctcctctggccgggcgtcctcacggcgctccataaacataaatgagcatattctgatgtactctttggatctgaactcatcttcacagatgccttcaattaagttgcagagttctgatggagagatatttgaagttgatgtggaaattgccaaacaatctgtgactattaagaccatgttggaagatttgggaatggatgatgaaggagatgatgacccagttcctctaccaaatgtgaatgcagcaatattaaaaaaggtcattcagtggtgcacccaccacaaggatgaccctcctcctcctgaagatgatgagaacaaagaaaagcgaacagatgatatccctgtttgggaccaagaattcctgaaagttgaccaaggaacactttttgaactcattctggctgcaaactacttagacatcaaaggtttgcttgatgttacatgcaagactgttgccaatatgatcaaggggaaaactcctgaggagattcgcaagaccttcaatatcaaaaatgactttactgaagaggaggaagcccaggtacgcaaagagaaccagtggtgtgaagagaagtgaaatgttgtgcctgacactgtaacactgtaaggattgttccaaatactagttgcactgctctgtttataattgttaatattagacaaacagtagacaaatgcagcagcaagtcaattgtattagcagaatattgtcctcattgcatgtgtagtttgagcacagatcccaaaccttacggccaagtttcttctagtatgatggaaagtttcttttttctttgctctg

SEQ ID NO: 3987 - DNA, 1972 bp, Homo sapiens
  source 1..1972: mol_type = genomic DNA
ggcagagaccgcatattccggaggggctggctccaggccacgcgagccggagctggagacatttccagagccttgaggatggcaccggccctcgcacgctcaactcctgctcctcctcttcgcaatgagtaaacgacgcagattaaagcaaggagagccaatcatgactggcaaaacacagaccagcaacgtcaccaataagaatgaccccaagtccatcaactcccgtgttttcatcggcaatctaaatacggcaattgtcaagaaagttgacattgaagccattttttcaaagtatggaaaaatagttggatgttccgttcacaaaggttatgcatttgtacagtacatgagtgagcgacatgcaagagctgcagtggctggagaaaatgccagagtcatcgccggccaaccacttgatatcaacatggcaggagagcccaaaccatacagaccaaaacctggaaacaagaggcccctttctgcactttacagacttgaatcaaaggaacctttcctgtctgttggcggttatgtctttgactatgattactacagagatgatttctacaatcggttatttgattaccacgggcgtgtgcctccacctccccgtgcagtaattccgctgaagcgtcccagagtggcagtcacaacgactcgcagggggaaaggagtcttttccatgaaaggtggatcgagatctactgccagtgggtcaacaggttctaaattgaaatcagatgagttacagaccatcaagaaagaattaacccagatcaaaactaaaattgactccttgctagggcgcctggagaagattgagaaacagcagaaggcggaggcagaagctcagaagaagcaattggaagagagtctagtgctgatccaagaggaatgtgtgtcagagattgcagatcactctacagaggagcctgctgaaggagggccagatgccgatggagaagagatgacagatgggatagaggaggacttcgatgaagatgggggtcatgagctgtttctacagataaagtgatctgaaataacgcatgatgccacaaagcagaaaagagaaactgtgacaacccccagaaatgtgaaaggaggtttcttactggacagcagcatctttggttcaatttatataaaaacccaaataaataaaatggacagtattgctcagttttagaaattccatttcttctatgttttaagctgtacaattgtcaggtttttatggtttaaattgtaaatgtgttttcccctttgctaattatgttttttttttcagtcttaaaatgtgaaaggcatttatgaatggtaagggaaacactatatacaaatgtatatttgtaaaagctatttttatgattagcatgtttcactgttgatcatatataaagtcaggtgatattgcaattctgtatttaaagcttatttccaacaatgtcatgtaagaaaagatgcatcttatgctagtttttataatttatttataatttatagtttaaagtacttcagatcataatgataaaatacttgaaaaagttatatttctgccctgtataagcaccctttttattaataaagaatgcagatatttcagatgtgatataatagttaaagaactgttggtttgatctgtgattaagttgagcatgctccgctctactgaactaaatgatccaattattacttcagtctgggtatgagattccatggacaagtaaggactagattgccaaggaaaagactgtcttgcccttggatccaaaagtttaaattagtgcatacatcatgtcatttcacctcctgttcctaggaactctccattcccaagcattgccagtgttttccagataatcttagctgttgtcttgtgctgtggaaatggaagaaaccatcttcacagaccgtaggagaattcaacatataatttcttaataaatactgtttcttttaaaacaaa

SEQ ID NO: 3988 - DNA, 579 bp, Homo sapiens
  source 1..579: mol_type = genomic DNA
acttggaaaggaggagcagcctcgggtgggactgagcggatcttctggttctagagcggcctctgattggacaaacttgacttagggaccgtgtctgtctgcgatggggcttggtaaagaaacagatacagagtgttcgctgtggactcccattattgtcccagttgtttagaaaatatgccatcggctgaagccaaactaaaaaagaatagatgtgccaattgttttgactgtcctggctgcatgcacaccctctctactcgggccacgagcatctccacacagcttccagatgacccagccaagaccaccatgaagaaagcctattacctggcatgtggattttgtcgctggacgtctagagatgtgggcatggcagacaaatctgtagctagtggcggttggcaggaacctgaaaatcctcacacacaacggatgaacaaattgattgaatattaccagcagcttgctcagaaagagaaggttgagcgagatcgcaagaaactggcacgacgtagaaactatatgcctctggctttttcggacaaatatggtcttggaaccaggcttcagcgacca

SEQ ID NO: 3989 - DNA, 1697 bp, Homo sapiens
  source 1..1697: mol_type = genomic DNA
tttgctcagcccgcctgcgccgcttgggacgcctctgcctttccctccctcccttccccgacggcttctggcggccaagtggatgtggcgggtgatcgagccaccctgcccaggggcgcccagcactgagaatggcaaatcggttcattggaaacttggagctgataaggaagtctgggtatgggtgatgggcgaacaccatctagataaaccctatgatgtgctctgtaatgaaattattgctgagagggcccggctgaaagcagaacaggaggcagaagagcccagaaaaactcactctgaagaattcaccaatagcttgaaaacaaaatcacagtaccatgatctgcaggctccggataaccagcagactaaagacatctggaagaaagtggcagaaaaggaggaactggagcaaggatcgaggccagcaccaaccctggaagaagagaaaatccgatcactctccagttcttcaagaaatattcaacaaatgttggcagattcaatcaatcgtatgaaggcatatgcatttcaccagaagaaagaatctatgaagaaaaaacaagatgaagaaataaatcaaatagaagaagagagaacgaagcagatttgtaagagctggaaagaagactcggaatggcaggcatctctgcgaaaatccaaagcagctgatgagaagagacgctccttggctaaacaagcacgagaagactacaagaggttatccctcggggcccagaaaggaagaggcggtgagaggctgcaaagccccttgcgtgttccgcagaaaccagaaagacctccccttccacccaagcctcagttcctaaactcaggggcatatcctcaaaaacctcttagaaatcagggagtggtgaggacactgtccagctctgcccaagaggacatcatccggtggtttaaagaggagcagctaccacttcgagcgggctaccagaaaacctcagacaccatagccccctggttccatggaattctcacactcaagaaagcaaatgaacttcttctgagcacaggcatgcccggcagttttctcatccgagtcagtgaaaggatcaaaggctatgccctgtcctatctgtcggaggacggctgtaaacatttcctcatcgatgcctctgcagacgcctacagcttcctgggcgtggaccagctacagcatgccaccttggcggatttggtggaatatcacaaggaggaacccatcacttccctggggaaggagctccttctctatccctgtggtcagcaggaccagctgcctgactacctggagctgtttgagtgacagcctccatcagggtcatcctacagcctccaagcgggctttcccctggacaaatgccactgcaacatttatgtgtgaagccaaaatcaccctgcagcagagccaatactgatcaactgaaagtaaagtatccatggagtcctcattgacacctcttttctgcacaaatactggaattcaatgtcaagagaaaatgacctctgctcaaaagggagaagagtctcaatttcagcaagtacctgtcatgaagggtatgaccttaatgatgtacataaaataaaacaaatgaagaaatggaaaacttttagaaattaaggtgtacttgaaaacgaatatctatcatatgacccctgcactccctctgtatcatctcaggaggtttcag

SEQ ID NO: 3990 - DNA, 540 bp, Homo sapiens
  source 1..540: mol_type = genomic DNA
gaaatctccatgcatccgagctcagtggaggaatgtttattgagtccatagaaatttgagcagggcatatctctaggggtttatgacaggctgttttcttttctcagtgtggggatgaattgctccattatcatctaaattggaagaaaccaacatgtctgacaaaagtgacttaaaagctgagctagagcgcaaaaagcagcgcttagcacagataagagaagagaagaaacggaaggaagaggagaggaaaaagaaagaggctgatatgcagcagaagaaagaacccgttcaggacgactctgatctggatcgcaaacgacgagagacagaggctttgctgcaaagcattggtatctcaccggagccgcctctagtcccaacccctatgtctccctcctcgaaatcagtgagcactcccagtgaagctggaagccaagactcaggcgatctggggccattaacaaggaccctgcagtgggacacagacccctcagtgctccagctgcagtcagactcagaacttgggtatatgtctgc

SEQ ID NO: 3991 - DNA, 3409 bp, Homo sapiens
  source 1..3409: mol_type = genomic DNA
gagctgaggcccgcgtcgatcctgggttggaggaggtggcggccgctgaggctgcggcgtgaagacggcgggcatggtggggcgggagaaagagctctctatacactttgttcccgggagctgtcggctggtggaggaggaagttaacatccctaataggagggttctggttactggtgccactgggcttcttggcagagctgtacacaaagaatttcagcagaataattggcatgcagttggctgtggtttcagaagagcaagaccaaaatttgaacaggttaatctgttggattctaatgcagttcatcacatcattcatgattttcagccccatgttatagtacattgtgcagcagagagaagaccagatgttgtagaaaatcagccagatgctgcctctcaacttaatgtggatgcttctgggaatttagcaaaggaagcagctgctgttggagcatttctcatctacattagctcagattatgtatttgatggaacaaatccaccttacagagaggaagacataccagctcccctaaatttgtatggcaaaacaaaattagatggagaaaaggctgtcctggagaacaatctaggagctgctgttttgaggattcctattctgtatggggaagttgaaaagctcgaagaaagtgctgtgactgttatgtttgataaagtgcagttcagcaacaagtcagcaaacatggatcactggcagcagaggttccccacacatgtcaaagatgtggccactgtgtgccggcagctagcagagaagagaatgctggtaagaaggattcctgagtcctgtcttagcgaaggtccgctttgtcttttccatgcttgaactttcacagctgtacttggagtgttactgagtgaaagccaaaagtgcttttttaaaactaggagaccaaacaaaagtagtttacatatacactgtattcatgaagaataaaaatattatgctcttctgtttgaatttatttcttatgtactatagatcccatcatttcttttattgcaaagtgttaggaaacttcaaaataatcatctaaggtcttttaagaagatactctttgggggctgggcgtgatggctcacacctgtaatcccagcacatttgaaaaagttggtattaaatataatatccatacaaagaaagatgagactgatttagtttagaatattaataggatgaccacagttttttaatatatgagaattatattttgtaatatataacatgacaatatttaagaaagtttagctcaacttgaaaaatggttctattaagtttttgttgtagcttgggataattaaaaatactcattaaattgtactgttttcataaaaatttgtaatgcttttttatattcccactaattaagtaaaattggagcctttttttgattttaaaaattcttaaggtttaaattctagaaattgctcttttaagtgttttgctaagagtattagtaggaatttgattttagatatcttgtggagacctttccagaaaaagagggttgccttttagttcctggaccttattttaagtaagctttttggtcaaacctattctactcagctcaaaaagttgaaactattgaatttattgtgtcatcgttcttaggatccatcaattaagggaacctttcactggtctggcaatgaacagatgactaagtatgaaatggcatgtgcaattgcagatgccttcaacctccccagcagtcacttaagacctgtaagtacatggctgtaaaaacctttagatccattgctatggtatatattattgctgtgttgggtaacttcatttctcagtactaatcaaagtgaactttgcttgtatgctggctgttcatagtgctacttttctctaaattatcatctgtagagaagatcatgagtattgaagtttgtagaaaatgtattattgtcttgatcatgacaggcatttggtttatttttccagggatgatcaaatcagatttcttacactaagagcaaaaataagtagcaaatataaaacctcaaaatggccaggcacaatggctcatgcctgtaatcccaacactttgggaggctgacgcaggaggatcccttgagcccaggaatttgagactagcctgggcaatggagggagatctcatctctgtttaaaaatatatacatatttaaaaaaaggtcagggggaacaaagccctcaaaatatagcctttcacttacttttgatttttttgtgtttatctttctttaaagattactgacagccctgtcctaggagcacaacgtccgagaaatgctcagcttgactgctccaaattggagaccttgggcattggccaacgaacaccatttcgaattggaatcaaagaatcactttggcctttcctcattgacaagagatggagacaaacggtctttcattagtttatttgtgttgggttcttttttttttttaaatgaaaagtatagtatgtggcactttttaaagaacaaaggaaatagttttgtatgagtactttaattgtgactcttaggatctttcaggtaaatgatgctcttgcactagtgaaattgtctaaagaaactaaagggcagtcatgccctgtttgcagtaatttttctttttatcattttgtttgtcctggctaaacttggagtttgagtatagtaaattatgatccttaaatatttgagagtcaggatgaagcagatctgctgtagacttttcagatgaaattgttcattctcgtaacctccatattttcaggatttttgaagctgttgaccttttcatgttgattattttaaattgtgtgaaatagtataaaaatcattggtgttcattatttgctttgcctgagctcagatcaaaatgtttgaagaaaggaactttatttttgcaagttacgtacagtttttatgcttgagatatttcaacatgttatgtatattggaacttctacagcttgatgcctcctgcttttatagcagtttatggggagcacttgaaagagcgtgtgtacatgtattttttttctaggcaaacattgaatgcaaacgtgtatttttttaatataaatatataactgtccttttcatcccatgttgccgctaagtgatatttcatatgtgtggttatactcataataatgggccttgtaagtcttttcaccattcatgaataataataaatatgtactgctggcatgtaatgcttagttttcttgtatttacttctttttttaaatgtaaggaccaaacttctaaactaattgttcttttgttgctttaatttttaaaaattacattcttctgatgtaacatgtgatacatacaaaagaatatagtttaatatgtattgaaataaaacacaataaaattaacactt

SEQ ID NO: 3992 - DNA, 674 bp, Homo sapiens
  source 1..674: mol_type = genomic DNA
tcctatgacagtacattttcctatgtaactcatgaagacatctgtaattgctttaatggtgatacacttttggccattcaggcaccttctggtacacaactggaggtacccattccagaaatgggtcagaatggacaaaagaaataccagatcaatctaaagagtcattcaggacctatccatgtgctgcttataaataaagagtcgagttcatctaagcccgtggtttttcctgttcccccacctgatgacctcacacagccttcctcccagtccttgactccagtgactccacagaaatccagcatggcaactcaaaatctgcctgagcaacatgtctctgaaagaagccaggctctgcagcagacatcagctacagatatatcttcagcaggatctattagtggagatatcattgatgagttaatgtcttctgacgtgtttcctctcttaaggctttctcctaccccggcagatgactacaactttaatttagatgataacgaaggagtttgtgatctgtttgatgtccagatactaaattattagattccatggaaacttgggactgttatctacctctaactgttgaccaaaatctttctaggctacagtgctgtcatcccgcatctatacaagaaacctggatcaaatacttttagtcccttctaaca

SEQ ID NO: 3993 - DNA, 812 bp, Homo sapiens
  source 1..812: mol_type = genomic DNA
aagcttgcgccctgaggcggtttccgttcccggacgtttggactctgtcctggagaaggggaaggaaaaagtaagacgtagaagtacactgagacttcgtcacacataaaacaagcacgacaaagaaagagggcgcgaagggactcctggaagaaattgagtctacatttaagatcaccctaaaagtagtgacggcctcttcattactccaaaccccagatttaagtcggtaggacgtcttcgcgttgacttgtggggaatgtagtttcgatgctgccggcgcgttttgtttgcgacagaaactacaacccccaggggccaccgcgacgttgcctgtgggtgcccgcgaaccaacggttagcggtggcaggggctgactgagagcgtctgcttgacagagtctttctctgtcacccaggctggagtacagtggcacgatctcggctccctgcaacgtccgcctcccgagttcaagtgattctcctgcctcagccacccgagtagctgggtctacaggtgtgcgccaccatgcctggctaatttttgtatttttaagagagacggggtttcaccatgctggccaggctggtctcgaactcctgacctcgtgatccgcctgcctcagcccctcaaagtgctaggattagagataatggattctgaattaatgcatagtatagtaggaagctatcataaacctccagaaagagtatttgttccctcattcacccagaatgaaccatctcagaattgccatcctgcaaacttagaagttacctctcctaagatacttcatagcccaaatagccaag

SEQ ID NO: 3994 - DNA, 3116 bp, Homo sapiens
  source 1..3116: mol_type = genomic DNA
atccccgtggcgggggcgtggccatggcgggggcgctccggcgggggcgggccctgggctcccgcccttcgggtcccacagtttccagccgccgctctcctcagtgcccggtggcccaggagggcctgggagcccgaagccgtccccgagtcgctcctaggtcactggcgcgatgcgggccgtcctctcggctgatgggttggaagcccagcgaggctagaggccagtcccaaagtttccaggcatcagggctgcagcccaggagcctcaaggcggcccggcgggcgactggacggccggacaggtcccgagcagcccggcccaccatggacccctctgcccacaggtcccgagcagccccgcccaacatggacccagacccccaggcgggcgtgcaggtgggcatgcgggtggtgcgcggcgtggactggaagtggggccagcaggacggcggcgagggcggcgtgggcacggtggtggagcttggccgccacggcagcccctcgacacccgaccgcacagtggtcgtgcagtgggaccagggcacgcgcaccaactaccgcgccggctaccagggcgcgcacgacctgctgctgtacgacaacgcccagatcggcgtccggcaccccaacatcatctgtgactgctgcaagaagcacgggctgcgggggatgcgctggaagtgccgtgtgtgcctggactacgacctctgcacgcagtgctacatgcacaacaagcatgagctcgcccacgccttcgaccgctacgagaccgctcactcgcgccctgtcacactgagtccccgccagggcctcccgaggatcccactaaggggcatcttccagggagcgaaggtggtgcgaggccccgactgggagtggggctcacaggatggcaagccggcggagctgcagcgcagggtgagtgctgacagccagcccttccagcacggggacaaggtcaagtgtctgctggacactgatgtcctgcgggagatgcaggaaggccacggcggctggaaccccaggatggcggagtttatcggacagacgggcaccgtgcatcgtatcacggaccgcggggacgtgcgcgtgcagttcaaccacgagacgcgctggaccttccaccccggggcgctcaccaagcaccactccttctgggtgggcgacgtggtccgggtcatcggcgaccttgacacagtgaagcggctgcaggctgggcatggcgagtggacggacgacatggcccctgccctgggccgcgtcgggaaggtggtgaaagtgtttggagacgggaacctgcgtgtagcagtcgctggtcagcggtggaccttcagcccctcctgcctggtggcctaccggcccgaggaggatgccaacctggacgtggccgagcgcgcccgggagaacaaaagctcactgagcgtggccctggacaagcttcgggcccagaagagtgacccagagcacccgggaaggctggtggtggaggtggcgctgggtaacgcagcccgggctctggacctgctgcggaggcgcccagagcaggtggacaccaagaaccaaggcaggaccgctctgcaagtggctgcctacctgggccaggtggagttgatacggctgctgctacaagccagggcgggcgtggacctgccggacgacgagggcaacacggcactgcactacgcggccctggggaaccagcccgaggccaccagggtgctcctgagtgctgggtgccgggcggacgccatcaacagcacccagagcacagcactgcacgtggccgtgcagaggggcttcctggaggtggtgcgggccctgtgtgagcgcggctgtgacgtcaacctgcccgacgcccactcggacacgcccctgcactccgccatctcggcgggcactggagccagcggcattgtcgaggtcctcacggaggtgccaaacatcgatgttaccgccaccaacagccagggtttcaccctgctgcaccatgcctccctcaagggtcacgcgctagctgtgagaaagattctggctcgggcgcggcagctggtggacgccaagaaggaggacggcttcacggcgctgcatctggctgccctcaacaaccaccgcgaggtggcccagatcctcatccgggagggccgctgtgacgtgaacgtgcgcaaccggaagctgcagtccccgctgcatctcgccgtgcaacaggcccacgtggggctggtgccgctactggtggacgctgggtgcagtgtcaacgccgaggacgaggagggggacacagccctgcacgtggcgctgcagcgtcatcagctgctgcccctggtggctgatggggccgggggggacccagggcccttgcagctgctgtccaggctacaggcctcgggcctccccggcagcgcggagctgacggtgggcgcggcggtcgcctgcttcctggcgctggagggcgccgacgtgagctacaccaaccaccgcggtcggagcccgctggacctggccgccgagggtcgcgtgctcaaggcccttcagggctgcgcccagcgcttccgggagcggcaggcgggcgggggcgcggccccgggccccaggcaaacgctcgggacccccaacaccgtgacgaacctgcacgtgggcgccgcgccggggcccgaggccgctgagtgcctggtgtgctccgagctggcgctgctggtgctgttctcgccgtgccagcaccgcaccgtgtgtgaggagtgcgcgcgcaggatgaagaagtgcatcaggtgccaggtggtcgtcagcaagaaactgcgcccagacggctctgaggtggcgagcgccgcccccgcccccggcccgccgcgccagctggtggaggagctgcagagccgctaccggcagatggaggaacgcatcacctgccccatctgcatcgacagccacatccgcctcgtgttccagtgcggccacggcgcatgcgccccctgcggctccgcgctcagcgcctgccccatctgccgccagcccatccgcgaccgcatccagatcttcgtgtgagccgcgccgtccgccgcgcccgagctgccttcgcgtgcccccgccctgtgttttataaaaagaaagattctcgga

SEQ ID NO: 3995 - DNA, 294 bp, Homo sapiens
  source 1..294: mol_type = genomic DNA
atggcatcttctgcagagctggacttcaacctgcaggctcttctggagcagctcagccaggatgagttgagcaagttcaagtctctgatcagaacaatctccctgggaaaggagctacagaccgtcccccagacagaggtagacaaggctaatgggaagcaactggtagaaatcttcaccagccactcctgcagctactgggcagggatggcagccatccaggtctttgaaaagatgaatcaaacgcatctgtctgggagagctgatgaacactgtgtgatgcccccaccttaa

SEQ ID NO: 3996 - DNA, 813 bp, Homo sapiens
  source 1..813: mol_type = genomic DNA
gcgccctgaggcggtttccgttcccggacgtttggactctgtcctggagaaggggaaggaaaaaatgggactgtctagttgcaaaaacaagctcagggatcccactgattctactttacgataatggattctgaattaatgcatagtatagtaggaagctatcataaacctccagaaagagtatttgttccctcattcacccagaatgaaccatctcagaattgccatcctgcaaacttagaagttacctctcctaagatacttcatagcccaaatagccaagctcttattttagccttaaaaactcttcaggaaaaaattcatcgtttagagctggagagaacacaagctgaagataacctgaacattctttccagagaagcagcacagtataagaaggccttagagaatgaaacaaatgagagaaatctggcacaccaggagctgataaagcagaaaaaagatataagtatacagttaagctcagcccagtctcgttgtactcttctagagaagcaactagaatatacaaagagaatggttctcaacgtagagcgagaaaagaacatgatcctagaacaacaggcccagcttcagagggaaaaagaacaagatcagatgaagctgtatgcaaaacttgaaaagcttgatgtcttagaaaaagagtgtttcagacttacaacaactcagaaaactgctgaggacaagattaaacatttagaagaaaaacttaaggaagaagaacatcagcgtaagctatttcaagacaaagcttctgagcttcaaactggacttgaaatcagtaaaattata

SEQ ID NO: 3997 - DNA, 2856 bp, Homo sapiens
  source 1..2856: mol_type = genomic DNA
aggtcgaccgggtcaggtggttgggtgacgccccaggaaagcgctccaggccgagggcgggcggcgccgccgcgcccgacgcctctgggggtggggacttcgcgggagtcgccggcggaggcgaggaggagctctgcgcggcgcggcgggcgatccgagccgggacgggctgcaggcgggggtgctgcagaggacacgaggcggcgggctggagacatggaccgcggcgagcaaggtctgctgagaacagacccagtccctgaggaaggagaagatgttgctgccacgatcagtgccacagagaccctctcggaagaggagcaggaagagctaagaagagaacttgcaaaggtagaagaagaaatccagactctgtctcaagtgttagcagcaaaagagaagcatctagcagagatcaagcggaaacttggaatcaattctctacaggaactaaaacagaacattgccaaagggtggcaagacgtgacagcaacatctgcttacaagaagacatctgaaaccttatcccaggctggacagaaggcctcagctgctttttcgtctgttggctcagtcatcaccaaaaagctggaagatgtaaaattgcaagccttttcacattcctttagtatacgttccattcagcattcaattagcatgcctgctatgagaaactccccaacttttaaatcatttgaagaaaaggtcgaaaacttaaagtctaaagtagggggaaccaagcctgctggtggtgattttggagaagtcttgaattcggctgcaaatgctagtgccaccaccacggagcctcttccagaaaagacacaggagagcctgtgagattcctacctttgttctgctacccactgccagatgctgcaagcgaggtccaagcacatcttgtcaacatgcattgccatgaatttctaccagatgtgcttttatttagctttacatattcctttgaccaaatagtttgtgggttaaacaaaatgaaaatatcttcacctctattcttgggaaacaccctttagtgtacatttatgttcctttatttaggaaacaccattataaaaacacttatagtaaatggggacattcactataatgatctaagaagctacagattgtcatagttgttttcctgctttacaaaattgctccagatctggaatgccagtttgacctttgtcttctataatatttcctttttttcccctctttgaatctctgtatatttgattcttaactaaaattgttctcttaaatattctgaatcctggtaattaaaagtttgggtgtattttctttacctccaaggaaagaactactagctacaaaaaatattttggaataagcattgttttggtataaggtacatattttggttgaagacaccagactgaagtaaacagctgtgcatccaatttattatagttttgtaagtaacaatatgtaatcaaacttctaggtgacttgagagtggaacctcctatatcattatttagcaccgtttgtgacagtaaccatttcagtgtattgtttattataccacttatatcaacttatttttcaccaggttaaaattttaatttctacaaaataacattctgaatcaagcacactgtatgttcagtaggttgaactatgaacactgtcatcaatgttcagttcaaaagcctgaaagtttagatctagaagctggtaaaaatgacaatatcaatcacattaggggaaccattgttgtcttcacttaatccatttagcactatttaaaataagcacaccaagttatatgactaatataacttgaaaattttttatactgaggggttggtgataactcttgaggatgtaatgcattaataaaaatcaactcatcattttctacttgttttcaatgtgttggaaactgtaaaatgatactgtagaacctgtctcctactttgaaaactgaatgtcagggctgagtgaatcaaagtgtctagacatatttgcatagaggccaaggtattctattctaataactgcttactcaacactaccaccttttccttatactgtatatgattatggcctacaatgttgtatttgttatttattaaattgtgattgttttattattgtttatgccaaatgttaactgccaagcttggagtgacctaaagcattttttaaaagcatggctagatttacttcagtataaattatcttatgaaaaccaaattttaaaagccacaggtgttgattgttataaaataacatgctgccattcttgattgctagagtttttgttagtactttggatgcaattaaaactatgtgctatcacatgtgaaaagcttaataaattccatctatcagtagtataggtctcaatatttattatgagaccagtggtctggaaacagcttgttgtaccgaatcaactggagtctatgcttaaaaaaaaaaaatttttttttaaccatccttaaattattgcttaatggtatcatattaacatattctaaataagggctttaaggcacaggctgttgaagcattttctcagaggagtggatctgtagaagtctgtctttctatagaaatattgtgcttactcaagtgttaaattattttttctatgaactagtctacttcttaaaattcaaacatattcttttgatcacattgtttcttgagcatcctgccctgctactaacttttcaacaaggcaaaatggagtaaagtggcaatttctttagatgagtgaaataccctcaagtctcttttctgcccaaaaagggaaaagtgatagaaatgggggtggcaagtggggtgagtggatgaaggtgggtattgggggtggctgtg

SEQ ID NO: 3998 - DNA, 493 bp, Homo sapiens
  source 1..493: mol_type = genomic DNA
gtagagcctttgttgggggatgaggagtgtcttgggtcgagaacaggcccctgtaacccactgagcgccccttcattccgtctctctccgccctttgtagagggtcaccatgaagttcaatcccttcgttacctcggaccgcagtaaaaaccgcaaacgtcacttcaatgccccctcacacgtgcgcaggaagatcatgtcatccccgctctccaaggagctgcggcagaagtacaatgtccgctccatgcccatccgcaaggacgacgaggtccaggtagttcgaggacactacaaaggtcagcaaattggcaaggtagtccaggtgtacagaaagaaatatgtcatctacatcgagcgggtgcagcgtgagaaggccaacggcacaactgtccacgtgggcattcacccaagcaaggtggttatcaccaggctaaaactggacaaggatcggaaaaaaattcttgaacgcaaagccaagtctcgacaagtt

SEQ ID NO: 3999 - DNA, 1134 bp, Homo sapiens
  source 1..1134: mol_type = genomic DNA
gggctcacaaaacagctacttgatgacaccattggaattcaccccacatgtggggaggtgttcacgactttggaaatcacaaagtcgtcaggactagacatcactcagaaaggctgctgaggctaggcctgctgctgtttagttctccttgtcatattctcatttctctcaaagataagaatgctctcggataaaatgagcctgtgctcatgacagctgctctgttactcagggaccagtgcagggctgtcttacgacacttagatgagaaagtagacaaggaaagaggacagcagtgggcatctgccttgtggtcttgctgacagcgagaagcagtgggactgcttccttgacgccttagcttggagccccgttatgaggtcctctcagattgcagcgggatgtttcatgaaagcctagacccggaagaataggaggataggagactgcagcagctgacctctggaagccagagctggatgagggacctgagcgagaggagacttgggcagccggagctgaaagctgagcagcagatgccactggagcctgtgagggcacgattgagtgtggggctggcttgctgctgctcccacaccactgcagaggcgtcctctctggaacatggagacaaggtttttggacaggggtttcccagtcccctggaagagattaagagactactgaagatctccagggcactgcaagccagatctgtaccctccacccaggagaaggcaaaatgtctttctggagagcctgggcagccagaggggaaaggtcaagaaacctatcctggccctgggaaagtggagggtaaggcagagccagccatgagaaaggatgatgtttgcccaggcatgaaatgtatcagcggatgatctctcacatggaagaagccaaagcagctacacccaatggcttagcaataagaaacaccaaaccagacaaacaccactgctgctgggaaagggacctggcagaaggaaaaggctgttcagagagcagaggtatttcgtgtgagccttttagggcttcttgtctctttagaccacatgcacatattacttgtataaaataatgcaccagatacaaacaatgaaatacaagtgctgagttcgatagactcataca

SEQ ID NO: 4000 - DNA, 1984 bp, Homo sapiens
  source 1..1984: mol_type = genomic DNA
cggcgcccggggcgggctcaggtgcggggttgggcggcgagagcggccgcggcgggtgtccggtgtccggtgtccggtgtccggtgtctggagccgctggctaggttcagtgaacagcattttggacaggacatttggtgccaggtctgagtagccagtttgctgaattattgtcccagtcagccaggattgtgagctgtttgggaagtttcgtggaaacgcccaagtgccagcacaggtggagggacacctggaggccagtttcaggaacttttgccacaagtataaaagacttcagaagtgcaaagatgctgaaacagatactgtcggagatgtacatagatcctgatctactggcagagctcagcgaagaacagaaacagatcctgttcttcaagatgagagaggaacagatccgacgatggaaagaaagagaagcagctatggaaagaaaggagtccctgccagtgaaacccagaccaaagaaagagaatggcaaatcggttcattggaaacttggagctgataaggaagtctgggtatgggtgatgggcgaacaccatctagataaaccctatgatgtgctctgtaatgaaattattgctgagagggcccggctgaaagcagaacaggaggcagaagagcccagaaaaactcactctgaagaattcaccaatagcttgaaaacaaaatcacagtaccatgatctgcaggctccggataaccagcagactaaagacatctggaagaaagtggcagaaaaggaggaactggagcaaggatcgaggccagcaccaaccctggaagaagagaaaatccgatcactctccagttcttcaagaaatattcaacaaatgttggcagattcaatcaatcgtatgaaggcatatgcatttcaccagaagaaagaatctatgaagaaaaaacaagatgaagaaataaatcaaatagaagaagagagaacgaagcagatttgtaagagctggaaagaagactcggaatggcaggcatctctgcgaaaatccaaagcagctgatgagaagagacgctccttggctaaacaagcacgagaagactacaagaggttatccctcggggcccagaaaggaagaggcggtgagaggctgcaaagccccttgcgtgttccgcagaaaccagaaagacctccccttccacccaagcctcagttcctaaactcaggggcatatcctcaaaaacctcttagaaatcagggagtggtgaggacactgtccagctctgcccaagaggacatcatccggtggtttaaagaggagcagctaccacttcgagcgggctaccagaaaacctcagacaccatagccccctggttccatggaattctcacactcaagaaagcaaatgaacttcttctgagcacaggcatgcccggcagttttctcatccgagtcagtgaaaggatcaaaggctatgccctgtcctatctgtcggaggacggctgtaaacatttcctcatcgatgcctctgcagacgcctacagcttcctgggcgtggaccagctacagcatgccaccttggcggatttggtggaatatcacaaggaggaacccatcacttccctggggaaggagctccttctctatccctgtggtcagcaggaccagctgcctgactacctggagctgtttgagtgacagcctccatcagggtcatcctacagcctccaagcgggctttcccctggacaaatgccactgcaacatttatgtgtgaagccaaaatcaccctgcagcagagccaatactgatcaactgaaagtaaagtatccatggagtcctcattgacacctcttttctgcacaaatactggaattcaatgtcaagagaaaatgacctctgctcaaaagggagaagagtctcaatttcagcaagtacctgtcatgaagggtatgaccttaatgatgtacataaaataaaacaaatgaagaaatggaaaacttttagaaa

SEQ ID NO: 4001 - DNA, 679 bp, Homo sapiens
  source 1..679: mol_type = genomic DNA
agtagccgggtgagtggaggctggagttttctcggacagtgaactctaccgccccagggtcaccatgaagttcaatcccttcgttacctcggaccgcagtaaaaaccgcaaacgtcacttcaatgccccctcacacgtgcgcaggaagatcatgtcatccccgctctccaaggagctgcggcagaagtacaatgtccgctccatgcccatccgcaaggacgacgaggtccaggtagttcgaggacactacaaaggtcagcaaattggcaaggtagtccaggtgtacagaaagaaatatgtcatctacatcgagcgggtgcagcgtgagaaggccaacggcacaactgtccacgtgggcattcacccaagcaaggtggttatcaccaggctaaaactggacaaggatcggaaaaaaattcttgaacgcaaagccaagtctcgacaagttggaaaagagaaaggcaaatataaagaagaacttattgagaaaatgcaggaataaatagaacctgttgtgcaaccacggtttaaccggagattttgaggctagggtgtgtttctttcgaacttttcggaatgtctggaacatttcatttcctgttttgttacctgtgcctctgtaaatctacttttgcaattttaagtaataattttatgaataaaaatgggaaatgcttcc

SEQ ID NO: 4002 - DNA, 965 bp, Homo sapiens
  source 1..965: mol_type = genomic DNA
aagcgcccccggaggcgctaagcttgcgccctgaggcggtttccgttcccggacgtttggactctgtcctggagaaggggaaggaaaaaacagagtctttctctgtcacccaggctggagtacagtggcacgatctcggctccctgcaacgtccgcctcccgagttcaagtgattctcctgcctcagccacccgagtagctgggtctacaggtgtgcgccaccatgcctggctaatttttgtatttttaagagagacggggtttcaccatgctggccaggctggtctcgaactcctgacctcgtgatccgcctgcctcagcccctcaaagtgctaggattagagataatggattctgaattaatgcatagtatagtaggaagctatcataaacctccagaaagagtatttgttccctcattcacccagaatgaaccatctcagaattgccatcctgcaaacttagaagttacctctcctaagatacttcatagcccaaatagccaagctcttattttagccttaaaaactcttcaggaaaaaattcatcgtttagagctggagagaacacaagctgaagataacctgaacattctttccagagaagcagcacagtataagaaggccttagagaatgaaacaaatgagagaaatctggcacaccaggagctgataaagcagaaaaaagatataagtatacagttaagctcagcccagtctcgttgtactcttctagagaagcaactagaatatacaaagagaatggttctcaacgtagagcgagaaaagaacatgatcctagaacaacaggcccagcttcagagggaaaaagaacaagatcagatgaagctgtatgcaaaacttgaaaagcttgatgtcttagaaaaagagtgtttcagacttacaacaactcagaaaactgctgaggacaagattaaacatttagaagaaaaacttaaggaagaa

SEQ ID NO: 4003 - DNA, 2107 bp, Homo sapiens
  source 1..2107: mol_type = genomic DNA
cgctggcgttccgcgcacgccggctcactgcgcctgcccggcgtgtggacgccacacgctcccggaagtgggaggtggccgctggagtttgtgtggccgccgccgcgggaacgcgagcccggtaatttttcaacggagaaaggcgaggctttcgggctctgcagagtgagagttagcaagtgtccggctccagcaactctcctctggcgtgacagccggcatggaggatccacagagtaaagagcctgccggcgaggccgtggctctcgcgctgctggagtcgccgcggccggagggcggggaggagccgccgcgtcccagtcccgaggaaactcaacagtgtaaatttgatggccaggagacaaaaggatccaagttcattacctccagtgcgagtgacttcagtgacccggtttacaaagagattgccattacgaatggctgtattaatagaatgagtaaggaagaactcagagctaagctttcagaattcaagcttgaaactagaggagtaaaggatgttctaaagaagagactgaaaaactattataagaagcagaagctgatgctgaaagagagcaattttgctgacagttattatgactacatttgtattattgactttgaagccacttgtgaagaaggaaacccacctgagtttgtacatgaaataattgaatttccggttgttttactgaatacgcatactttagaaatagaagacacgtttcagcagtatgtaagaccagagattaacacacagctgtctgatttctgcatcagtctaactggaattactcaggatcaggtagacagagctgataccttccctcaggtactaaaaaaagtaattgactggatgaaattgaaggaattaggaacaaagtataaatactcacttttaacagatggttcttgggatatgagtaagttcttgaacattcagtgtcaactcagcaggctcaaataccctccttttgcgaaaaagtggatcaatattcggaagtcatatggaaatttttacaaggttcctagaagccaaaccaaactgacaataatgcttgaaaaattaggaatggattatgatgggcggcctcactgtggtcttgatgactctaagaatatcgcccgaatagcagttcgaatgcttcaggatgggtgtgaactccgaatcaacgagaaaatgcatgcaggacagctaatgagtgtgtcctcttccttaccaatagagggcactccaccaccacaaatgccacattttagaaagtaacaacagttttgtgtgtggatcattccaattgaagttgctatgaagagggagaagtttctgcctggattgaaacaaaaaaacacaggcgtcacaagcatgttacctattaagagagagagggtatctctgaagactaattaaaatggtaatttttaaaaagatgtgaccagttgacttttagtatatcatcccaagtattatccccaaaatgataatgcaaaacagaataatttggagaccaggagaaaaactggtatgattactggggaggggaagaagcacaggtggtcaagataataatgcatgtttggcctcagctgtagttgccaaagaaactacctgcctcacagatgagcacgcacgggtgcattgtcaaagtctgagaaggatgtattgtactttgaaggaagactttccatttctaagctaccatggagaagtatatgctcctcgagaccagagactgtgacttctgcatctttgattccagcgacatatgataaaatgttttgcacatagttgaatccagcgttgatacatgaaggacagcattacatcttttttctattatacttagaaatttcctctttgttctgcaccaccaacctgtatatcaagcctccttgccccacaaagcttccaaagcccgtaaatttgttaatctagagcaggggtcagcaaactaccacccatgggccaaatctggctgctgcctatttttgtatggcctacaaactatggtttttatattcccttttgttaatggctcaaaataatattttgtataatacgaaaattacgaaattttagtttctctaaataaagttttggaaagaa

SEQ ID NO: 4004 - DNA, 692 bp, Homo sapiens
  source 1..692: mol_type = genomic DNA
gctgtagtggcttcgtcttcggtttttctcttccttcgctaacgcctcccggctctcgtcagcctcccgccggccgtctccttaacaccgaacaccgtgagtagccgcccactgaactggaaagggtcgtggctaccggattgcgtgccggctggcctcaccgctgcggtttgggcctgcccgcggcgggcggtgactgggcctggccttctttcgggcccggtggatcgcgttgtcgaccctgttcttcgggagaccctaccagatgccttcaattaagttgcagagttctgatggagagatatttgaagttgatgtggaaattgccaaacaatctgtgactattaagaccatgttggaagatttgggaatggatgatgaaggagatgatgacccagttcctctaccaaatgtgaatgcagcaatattaaaaaaggtcattcagtggtgcacccaccacaaggatgaccctcctcctcctgaagatgatgagaacaaagaaaagcgaacagatgatatccctgtttgggaccaagaattcctgaaagttgaccaaggaacactttttgaactcattctggctgcaaactacttagacatcaaaggtttgcttgatgttacatgcaagactgttgccaatatgatcaaggggaaaactcctgaggagattcgcaagaccttcaatatcaaaa

SEQ ID NO: 4005 - DNA, 577 bp, Homo sapiens
  source 1..577: mol_type = genomic DNA
attacgagattggcttggattctgtcggatggacttggggctagctgcggcggggctggatggtgctgtattgaatttttggacggtactgcattggaggattttaagcttgggcagtaggacattgtattaatctgttttcacattgccaatgaagacatagcccagacctgccaatttactaaagaaaggaggccagataaccatgtcagccacagttgtagatgcagttaatgctgcacccctatcggggtccaaagaaatgagtttggaagaaccaaagaagatgaccagagaggactggagaaagaagaaggagctagaagaacagcgaaaattgggcaatgctcctgcagaagttgatgaagaaggaaaagacatcaacccccatattcctcagtatatttcttcagtgccatggtatattgatccttcaaaaagacctactttaaaacaccagagaccacaaccagaaaaacaaaagcagttcagctcatctggagaatggtacaagaggggtgtaaaagagaattccataattactaagtaccgcaaaggagcatgtgaaaattgtggg

SEQ ID NO: 4006 - DNA, 1144 bp, Homo sapiens
  source 1..1144: mol_type = genomic DNA
ggaggggagacgcgaaactttccgggcgcttcctcccgcggtcccggagccgtcgcagcgccgggaggtgtcgtcgtcgcgggcggtggcggccgacgccatgttggggtctgtgagaaacggggcgctcccggccgctcccctcgcgccggggccggcccgcgggccagttgccgccgccgtcccgccagcccgggagcgagccgcgcccgcccgtaggacgccgccgccgccgcggggggacgggggccgccgggctattagtgaaagatggtggatcgcttggcaaacagtgaagcaaatactagacgtataagtatagtggaaaactgttttggagcagctggtcaacctttaactatacctggacgagttcttattggagaaggagtattgactaagttgtgcaggaaaaagcccaaagcaaggcagtttttcttgtttaatgatattcttgtatatggcaatattgtcatccagaagaaaaaatataacaaacaacatattattcccctggaaaatgtcactattgattccatcaaagatgagggagacttaaggaatggatggctaatcaagacaccaactaaatcttttgcagtttatgctgccactgctacggagaaatcagaatggatgaatcatataaataaatgtgttactgatttactctccaaaagtgggaagacacccagtaatgaacatgctgctgtctgggttcctgactctgaggcaactgtatgtatgcgttgtcagaaagcaaaattcacacctgttaatcgtcgccaccattgccgcaaatgtggttttgttgtctgtgggccctgctctgaaaagagatttcttcttcccagccagtcctctaagcctgtgcggatttgtgacttctgctatgacctgctttctgctggggacatggccacatgccagcctgctagatcagactcttacagccagtcattgaagtctcctttaaatgatatgtctgatgatgatgacgatgatgatagcagtgactaaggacacatttgggagtatttaatcaggtgtggctatctgagaaatcaactttgggggaaatgtaagattctgagctctctctctgttttgttctagccatgaatttgcctgagaaacttgtaac

SEQ ID NO: 4007 - DNA, 233 bp, Homo sapiens
  source 1..233: mol_type = genomic DNA
accctgccctatgtgtcgcgggaacacatgtcaccccacagctctctttgagtgacctcccgaccacccattcctgcctaaccctagcattccttcctcagcctcaagagggtcaccatgaagttcaatcccttcgttacctcggaccgcagtaaaaaccgcaaacgtcacttcaatgccccctcacacgtgcgcaggaagatcatgtcatccccgctctccaaggagctgcg

SEQ ID NO: 4008 - DNA, 1734 bp, Homo sapiens
  source 1..1734: mol_type = genomic DNA
aattccgacggggacgcgctgaggagcaggggtgaagggtgaaaagcgtcattcgaggtccgggtccggcttgcggggtcagcgaactggagaggcgccatgggctggatcacagaagatcttattagacggaatgctgaacacaacgactgtgtcattttttccctggaggaactctcgttgcatcagcaagaaatagaaagactagaacacattgataaatggtgccgggatttaaaaattctctatcttcaaaataatcttattgggaaaattgaaaatgttagcaaactcaagaaacttgaatatttgaatttagctttaaacaacattgaaaaaatagaaaacttggaaggatgtgaagagctggcaaaacttgacctgactgtgaatttcattggagagctgagcagcattaaaaacttgcagcacaatatccatctgaaggagctctttctcatggggaacccatgtgcttcctttgaccactatagggagttcgtggtagcaactcttccacaattaaagtggttggatggtaaagaaatagagccttcagaaaggattaaggcattgcaggactattcagtaattgaaccacaaatcagagagcaggaaaaagatcactgtcttaaacgagccaaactcaaggaagaggctcagaggaaacaccaagaagaggataaaaatgaagacaagagaagtaacgcaggctttgatggacgttggtacacagacatcaatgctactctttcctctttagagagcaaagaccacctacaggcaccagacacagaggaacacaacacaaagaaattagacaacagtgaagatgacttggaattctggaataagccctgtttgtttactcctgaatcaagattggaaactcttagacacatggaaaaacaacggaagaaacaggaaaaattaagtgaaaaaaagaagaaagtgaaaccacccaggactttgatcactgaagatgggaaagccctaaatgtgaatgagcccaaaattgacttctctttgaaagataacgaaaagcagatcatcctggaccttgctgtctataggtatatggatacctctttaatcgatgttgatgtgcaaccaacttacgtgcgagtaatgatcaaaggaaagccatttcagcttgtccttcctgcagaagtgaaacccgatagtagttctgctaaaagatctcagacaacgggtcatttggtcatctgcatgcccaaggtaggagaagtaatcacaggtggtcagcgagcattcaaatctatgaaaactacctcggacaggagcagagaacaaacaaatacaagaagcaagcacatggagaaactagaagtagaccctagcaagcactcattccctgatgtgactaacatagttcaagagaaaaaacacacacccagaagacgacctgaacccaaaattataccaagtgaggaagacccaacctttgaagacaaccctgaagtgcctccgctgatttgaaacatctggctgcgttgccattggctgagacccaccaggtccagttttggttggtgtagagaccatatgcatattattcctgggataaacacagagttatttgtcaatatcgctgctccagtgttttaactcttactttgcatagtaatatccttaagatagcttaaaattaaaatgtatgtcttaaatgctataactcatcatttacctataataaagggttggtattgaaaa

SEQ ID NO: 4009 - DNA, 652 bp, Homo sapiens
  source 1..652: mol_type = genomic DNA
tcgtcatggccagtgtctgtctggcgcccggtgcccaggcactgtgcgagaccagtccgcaggggcgactcggagagcgccgggccgcggcgggagaagagcctgcagcgattaaagtgaagaaacaatggccagcaatcacaaatcttcagcagctcgccctgtttcaagaggtggagttgggttaacaggaaggcctccttctgggatacgacccctatcaggaaatattcgagtggcaactgcaatgccacctgggacagcaagaccaggttctcgtggttgtcccatagggactggtggagttctgtcttctcaaatcaaagttgcccatcgccctgtaacacaacaaggtttgactggaatgaaaactgggacgaaaggtccccagaggcaaattttagacaaatcttactatcttgggcttcttagaagtaaaataagtgaacttacaactgaagttaataaacttcagaagggaatagaaatgtacaatcaagagaattcagtatatttgtcatatgaaaagagggctgagactttagctgttgagataaaagagcttcaaggacaactagcagactacaacatgttggtagataaacttaataccaacactgaaatggaagaagtaatgaatgattacaatatg

SEQ ID NO: 4010 - DNA, 695 bp, Homo sapiens
  source 1..695: mol_type = genomic DNA
ggcgaacgaaacgcggagctcgggagcgacccggcggggccaggcacgggcagaagggccaagagggccacagagggtcaccatgaagttcaatcccttcgttacctcggaccgcagtaaaaaccgcaaacgtcacttcaatgccccctcacacgtgcgcaggaagatcatgtcatccccgctctccaaggagctgcggcagaagtacaatgtccgctccatgcccatccgcaaggacgacgaggtccaggtagttcgaggacactacaaaggtcagcaaattggcaaggtagtccaggtgtacagaaagaaatatgtcatctacatcgagcgggtgcagcgtgagaaggccaacggcacaactgtccacgtgggcattcacccaagcaaggtggttatcaccaggctaaaactggacaaggatcggaaaaaaattcttgaacgcaaagccaagtctcgacaagttggaaaagagaaaggcaaatataaagaagaacttattgagaaaatgcaggaataaatagaacctgttgtgcaaccacggtttaaccggagattttgaggctagggtgtgtttctttcgaacttttcggaatgtctggaacatttcatttcctgttttgttacctgtgcctctgtaaatctacttttgcaattttaagtaataattttatgaataaaaatgggaaatgctt

SEQ ID NO: 4011 - DNA, 4532 bp, Homo sapiens
  source 1..4532: mol_type = genomic DNA
ggaacctcggctcccgggaagccccgagcctgggggaaccctgggcaccctgtgaaccctgtggtctgcactggctgccctgctgctgtcgcggggctgcgggcggacgacctgagcccgagctccgagggcccggagcggggcgccagggcctagggtcgcgggggccaggggcgcgccagggtggctgagagagcgaaatgtcatcagtgcagtcacaacaggagcagttgtcccagtcagatccatctccgtcaccaaactcatgtagttcctttgagctaatagacatggatgctggcagcttgtatgaaccagtttctccccattggttttattgtaagataatagattctaaggagacatggattcctttcaactctgaggattcacagcagctggaagaggcatatagctctggaaaaggttgtaatgggagagttgttcctactgatgggggcagatatgatgttcatttgggggagaggatgcggtatgctgtatactgggatgaactggcatcggaagtgagacgatgtacgtggttttacaagggggacaaagacaataagtatgttccctactcggagagcttcagccaagttttagaggaaacttacatgcttgctgtaactttggatgaatggaaaaagaaactggaatctcccaacagagaaattattattttacacaatccaaagcttatggtgcattaccagccagttgcagggtctgatgattggggttcaacacccacggagcagggtcgaccaagaactgtgaagagaggagttgagaacatctctgttgacattcattgtggagaacctttacaaatagatcacttggtttttgtagtccatgggattggaccagcttgtgatctccgctttcgaagcattgtacagtgtgttaatgattttcgcagtgtttccttgaacttgctacagacacattttaagaaagcccaagaaaatcagcagattgggagggtagaatttcttccagtcaactggcacagtcctttgcattctactggtgtggatgtagatctgcagcgaataaccctgcccagcattaaccgcctcaggcacttcaccaatgacacaattctggatgtcttcttctacaatagtcccacctactgtcagactattgtggacacagttgcttctgaaatgaaccgaatatacacactttttctacagaggaaccctgatttcaaagggggtgtatccattgctggtcatagtttaggttcgcttatattgtttgatatcctaacaaatcagaaagattctttgggggatattgacagtgaaaaggattcgctaaatattgtaatggatcaaggagatacacctacactagaggaagatttgaagaaacttcagctctctgaattctttgatatctttgagaaggagaaagtagataaggaagctctggctttatgtacagaccgagatcttcaggaaataggaattcctttaggaccaagaaagaagatattaaactatttcagcaccagaaaaaactcaatgggtattaagagaccagccccgcagcctgcttcaggggcaaacatccccaaagaatctgagttctgcagtagcagtaatactagaaatggtgactatctggatgttggcattgggcaggtgtctgtgaaatacccccggctcatctataaaccagagatattctttgcctttggatctcccattggaatgttccttactgtccgaggactaaaaagaattgatcccaactacagatttccaacgtgcaaaggtttcttcaatatttatcacccttttgatcctgtggcctataggattgaaccaatggtggtcccaggagtggaatttgagccaatgctgatcccacatcataaaggcaggaagcggatgcacttagaactgagagagggcttgaccaggatgagtatggaccttaagaacaacttgctaggttcgctgcggatggcctggaagtcttttaccagagctccataccctgccttacaagcttcagaaacaccagaagaaactgaagcagaacctgaatcaacttcagagaagcctagtgatgttaacacagaagagacctctgtggcagttaaagaagaagtcctgcctatcaatgtggggatgctgaatggaggccaacgcattgactatgtgctacaggagaagcctattgaaagttttaatgagtatttatttgctttacaaagccatctatgctactgggagtctgaagatacagtattgctcgtcctcaaagagatctaccaaacccagggtatcttccttgatcagcctttacagtaaaaatgacccatctatggctgcttaatacggacattgagggatccttccccagaaaatccacctgtttgttgctgcaattttcctctcctcagctgcgtcatttcctgcatgttgcctgccacttactcaccactggggtctttggaagataatcttcctctttggaaatgaatggaaaagcaaaaggccctattacttttaaccactggcttcatataaacacttgccatttttttctgcatagctgggggtggtttgtgtctttaattctttgatgatagtttatagttgccacactttattgattagtacttgacagggtgtaaagcctattttgggtttgatttgttttgggtggggtagacatgtttttaaggaacttattgcttatctttagaaaatgttctagtttggaaacagattcttgagattcagaaggcattttggagtacacttatctcttgtttgtgttgaactgaaggctaagtctcagtggacatggaaaagacttttgggtgatttatttttgaacctgcatttctttcttatgtgtagtgtatgaagaaagactagaatgtagctttaaaaaagtgttgtttactctcttagaactgacagacttattgccagaaatcactgatgttcattgtttttgcaactgtttgagctgctgtaagagtctaaagttgacaagttagttcatgttaggtgcatctttataaagcaaagatgttgtatatcctaggcctcccttttatatttgatagaagttatttgctaatagcttctattcttacgttgaaaatagttgtaaaagctgatgaacctgaaattgtgtagcctctacaggctgctgaggttctaaataaaaccttttagtggtgcctttatggtgaaacagaatttgtcacctgccatttctacttgagctaaggtagtattgtgtatcctctttccttcttaggtatccataatccacaaagcatatttaaaaggctcttggcacgggcagcattggttgagcaggtaggtttggctagggggaaatgtttaacttgttctgaaagaaaaacttatgtctgtagggtccaagaaacagctattccagagtcagtgtcagctgagtctggaacatatgaagtgaggtttacttctaagaacacaagtgactgcacactaattttgtcaaggcatcttttcactactttgctgtagatttttcttcttcattggtcagtttgtcattgtctttgtagttctctttatgataatcctttatacttgctctcagattccacaggcctctgtttatagagtggcaaaggcaggcgagctgtggtttattgtttataaatttttttataaatgttatggtattcaaagccactgacatttaatatttactgaagccattccttagacagcagtggtctttatccctttctggaaagaaaaggaaaatgaagggtaattactgtcaccatggagattgtagaggtaaggttggggtataggtcaggcctggcctttctttgtcatctgcttatagtctagtgctaagtatgccactaagtttcagatatatggaatactttatttttttaaaggtatataaactctgagttattgagaattaagtattcactgtatattaaggggaagcttttgccaagttgtggtcttcaaatttatgtttactcttcctattggcagaataggtgctatttaagagtaaaccaaaggataagcagagggagtccctataaccaaagatggacagcatagccctggatagccagataaaccactctttgtattaagaaatgtttctttcctagtggtgaggggtgggtaactgtgaaagagctttatatcttgtctattcatggtattatagctgtatattcccaggatgataagcttgattgaaatcctgtatttagtcatatattatttgcgctgcttcatttgtatcatgtgcaatctctagaccaaccctatttttaaactctggtacagcatcattttgtacatattcccagctgcagaactagtatcacttatctcagcaaaagagattgtttgcatggaaagattaatagcactgattagatttctaatattttgcatttttgaaatgtttgttttctacgtgattatatttaaaactttagtaaatactaacatgaaaccata

SEQ ID NO: 4012 - DNA, 703 bp, Homo sapiens
  source 1..703: mol_type = genomic DNA
gcgaggagtcgctcgggcacttattgagcgccgactgtctacgggcggccggggacagtcttgcactgtttcctaggctggagtgcagtggcacaatcacagctcactgcagccttgacttccccaggctcaagccattctcctacctcagcctcccaagcagttgggaccacaggtgatgggcagaggcttcagtgtccccttcgcctccgcaggagaggagaggcagcagcatggcgagtgtcctgtcccgacgccttggaaagcggtccctcctgggagcccgggtgttgggacccagtgcctcggaggggccctcggctgccccaccctcggagccactgctagaaggggccgctccccagcctttcaccacctctgatgacaccccctgccaggagcagcccaaggaagtccttaaggctcccagcacctcgggccttcagcaggtggcctttcagcctgggcagaaggtttatgtgtggtacgggggtcaagagtgcacaggactggtggagcagcacagctggatggagggtcaggtgaccgtctggctgctggagcagaagctgcaggtctgctgcagggtggaggaggtgtggctggcagagctgcagggcccctgtccccaggcaccacccctggagcccggagcccaggccctggcctacaggcccgtctccaggaacatcgatgtcccaaa

SEQ ID NO: 4013 - DNA, 610 bp, Homo sapiens
  source 1..610: mol_type = genomic DNA
tgtaagattatatctttttcctaacgactcataattaatctgaattaataaatgcgttttcagagcaagtaataggttattattatggagatcttgccaagagatctcaaagttggtcacctggacagtcagtactgaaagataaaaagggctctgaaatgaagcttttaagtagatttagggaattgtactcacatctgcttatctttaaatcattttattctcttgtatatggtcttgcattgcctcagacataaatgagcatattctgatgtactctttggatctgaactcatcttcacagatgccttcaattaagttgcagagttctgatggagagatatttgaagttgatgtggaaattgccaaacaatctgtgactattaagaccatgttggaagatttgggaatggatgatgaaggagatgatgacccagttcctctaccaaatgtgaatgcagcaatattaaaaaaggtcattcagtggtgcacccaccacaaggatgaccctcctcctcctgaagatgatgagaacaaagaaaagcgaacagatgatatccctgtttgggaccaagaattcctgaaagttgaccaaggaacactttttgaa

SEQ ID NO: 4014 - DNA, 3832 bp, Homo sapiens
  source 1..3832: mol_type = genomic DNA
ggggtcgagtcagtgccgtttgcgccagttggaatcgaagcctcttaaaatggcagatgatttggacttcgagacaggagatgcaggggcctcagccaccttcccaatgcagtgctcagcattacgtaagaatggctttgtggtgctcaaaggctggccatgtaagatcgtggagatgtctgcttcgaagactggcaagcacggccacgccaaggtccatctggttggtattgacatctttactgggaagaaatatgaagatatctgcccgtcaactcataatatggatgtccccaacatcaaaaggaatgacttccagctgattggcatccaggatgggtacctatcactgctccaggacagcggggaggtaccagaggaccttcgtctccctgagggagaccttggcaaggagattgagcagaagtacgactgtggagaagagatcctgatcacggtgctgtctgccatgacagaggaggcagctgttgcaatcaaggccatggcaaaataactggctcccaaggtggcagtggtggcagcagtgatcctccgaacctgcagaggccccctcccccagcctggcctggctctggcctggtcctaggttggactcctcctacacaatttatttgacgttttattttggttttccccaccccctcaatctgtcagggagcccctgcccttcacctagctcccttggccaggagcgagcgaagccatggccttggtgaagctgccctcctcttctcccctcacactacagccctggtgggggagaagggggtgggtgctgcttgtggtttagtcttttttttttttttaaattcaatctggaatcagaaagcggtggattctggcaaatggtccttgtgccctccccactcatccttggtctggtcccctgttgcccatagccctttaccctgagcaccacccaacagactggggaccagccccctcgcctgcctgtgtctctccccaaacccctttagatggggagggaagaagaggagaggggaggggacctgccccctcctcaggcatctgggaagggcctgcccccatgggctttacccttccctgcgggctctctccccgacacatttgttaaaatcaaacctgaataaaactacaagtttaatatgaaaaaaaaaaaaaaagaaagaaagacgtgtaaaatgccaagaactctaggaaacagggacaaaaacacttcaaagagaaagttcatgcacttgtttctgaccacccagggcacccttcagcacacgctgtctggagtggcctgaagcaaggagtgtcttgtgaggtgcagaggatgcaatgggagcagggtcctgtccccaccctaaaggagttcacagtttaacgcaaatgagaagccagtgaggacatcactactcctgctgtgaacttgggaactagaaacacaaaacctgagtctggagggaagctaaggaagcattctgctctggagtagacatgagtgcgtgtgaagcttctgatctcccatgagagcaatggggacatggggcagaatctaaaacccatgactgaaagcaccaaattgctaaaatggcaataaagagacatgaggccaagatggagaagaaggaacccaggacgagggtcagcctcacatttggggctcatttccctcagtttcctcactgaatttcagaagggactaactgagatgcaaagaagcagagcagcttttgcaccatgtggaggactagatggaaaacaagtagactgagggtctgctagtgaaggtgacccctactgaagtccactggctttggttgggacccagaagagtcacacgccaggaatagaggtggacaggaaacaccctgacttttgtagggactgaacctcactgataacctcaattgcggatggtatggagggtgtctaggtgtgctaggacccctgcccattccccagaaatagactcccatcttttctacagcaagataacgtgctagtaggcctcaattcattgctaaatatttttaacgagtgtcttacatttagccaaaaagactagtcatgtggcaggaaaaatacaatgtcatatgaccaaaagctaaaagactgtgaaaatgaatccagaggtgacccaagcattgaatttaacaatgccagtacctggacctccgcttgcccctaaaacattacaatcaagaatgtaggaagggaaaggaaacacgaagattaatcaagcaggaaggacaagctcagttttgcacccactgaatttgccacaaatattgtggaaaatattctcggggacattgcagttgtctactttggttggcacatggttcatacaacagtgtttgtgtcagtgaacatcttactcttcctcggcagtctttctttgcccagagatttcgcaatgactgttgaccttcatcatcaccttttggactttggcttgcactttagcttctgtagatctccatgatgtaaagaagtattttaggtccattttaattcctgcaaaggataaaatccttctatttgtgtgcatataagtggacctgagcccttggttagggtgtagagaggagaaggggagaaacctgagggccagaagctgttctttcccttaaaagggcaaactcatttccacactatggggactctgacagatagcataccttcctgtctatggctattggacctgcaggctttcccctgtaaatccgtgttctgtcattgacattttgtgactgtaagacagacttgagataagacatctagaaaacaataattgaacaatgatgtgaatatatttcacacaactgaactgtacatttcaacaaggttaagatggtaattatcacgttatacattttttaccgcaggttaaaatgtttcacaggttgaaaggaaagcaactaccttcagttctctgagttcaagaatttgtaacatttcaccccctgctccttcctgatcttctgtggagcatcttttttccatccatgctctactcagagcccactttcccttccctgacaccagcttcactgaggctggttggaacctaacacaaaacattctcagtaatgactgaattcccacaaagaattccatatagactgcatatgagttgaatcttctaagacatgaaatatttgttctcttcttggctaatatgcaatgcaaatcctgttgcagatgtacgtcatatacctctgaaattcctgatgtattcaatgaaataacatctttaaagttctgtgtagaatgttttttttctgatttcttcacatacgatagaaaaaaaaacccaaaaaaacatgtactaggatttcaatagaagcaatgggtgatctaaaaagatgaaagagcaaccgcatgcgccctacagctaccgctagattttatggggaaagcagctggcccagtttgcagctaggagaaatgtcaaacacatgaagaaatgagaagcaaagaaaaaccatgaggcatgaacatttcatggcaatcacgatgtcctggtttgtgagataatgggatagaggagtagaaaacaaggagaaagatgagaaggtacaaagtggttcaagtcaaacagctcaactgaacttttcttaatggaatatttaaaaagtggtacattaaaaaacttcccccagttcacatcaaaaattctctcttcaggactaagttgggtagagactgttcaatgtgcctagatatcttcagaacttatatattttctgttttctacgtatgttgaagggcagtgccaaatgatgtgtaattatctaggttgtaaaaataaaacatactcccccttcccttgagg

SEQ ID NO: 4015 - DNA, 807 bp, Homo sapiens
  source 1..807: mol_type = genomic DNA
attacgagattggcttggattctgtcggatggacttggggctagctgcggcggggctgggtaagaaaatattgttagaacttgcgggcgacggggagttggggaacctgagaaaatgagtcgaaggctcctaattattggatatatcttcacgggggtgatgagccctcaggtgttgagggagcgaggacgggggaccgaaaagccactgtcctgagacccattcatggcactcgtgccctgccaggccaggcctgcgtcttcagggaaacagtcgggataactatgagagtgtcgcctttgtggcggtgcctcgaagaccttgagcaatccccggactgcgagcagggaaagctgcttccagtacccaaattgacagactgtatttcctcgccagaaaaatttacttgagcttcagtttttcctgttaagtcgagatgatccgacttcagtggggtatcatgcgggtataaatgaaaacatctataggaggccagataaccatgtcagccacagttgtagatgcagttaatgctgcacccctatcggggtccaaagaaatgagtttggaagaaccaaagaagatgaccagagaggactggagaaagaagaaggagctagaagaacagcgaaaattgggcaatgctcctgcagaagttgatgaagaaggaaaagacatcaacccccatattcctcagtatatttcttcagtgccatggtatattgatccttcaaaaagacctactttaaaacaccagagaccacaaccagaaaaacaaaagcagttcagctcatctggagaatggta

SEQ ID NO: 4016 - DNA, 3321 bp, Homo sapiens
  source 1..3321: mol_type = genomic DNA
acttccggtgcttgccctgcccatccccgtggcgggggcgtggccatggcgggggcgctccggcgggggcgggccctgggctcccgcccttcgggtcccacagtttccagccgccgctctcctcagtgcccggtggcccaggagggcctgggagcccgaagccgtccccgagtcgctcctaggtcactggcgcgatgcgggccgtcctctcggctgatgggttggaagcccagcgaggctagaggccagtcccaaagtttccaggcatcagggctgcagcccaggagcctcaaggcggcccggcgggcgactggacggccggacaggtcccgagcagcccggcccaccatggacccctctgcccacaggtcccgagcagccccgcccaacatggacccagacccccaggcgggcgtgcaggtgggcatgcgggtggtgcgcggcgtggactggaagtggggccagcaggacggcggcgagggcggcgtgggcacggtggtggagcttggccgccacggcagcccctcgacacccgaccgcacagtggtcgtgcagtgggaccagggcacgcgcaccaactaccgcgccggctaccagggcgcgcacgacctgctgctgtacgacaacgcccagatcggcgtccggcaccccaacatcatctgtgactgctgcaagaagcacgggctgcgggggatgcgctggaagtgccgtgtgtgcctggactacgacctctgcacgcagtgctacatgcacaacaagcatgagctcgcccacgccttcgaccgctacgagaccgctcactcgcgccctgtcacactgagtccccgccagggcctcccgaggatcccactaaggggcatcttccagggagcgaaggtggtgcgaggccccgactgggagtggggctcacaggatggaggggaagggaaaccgggccgtgtggtggacatccgtggctgggatgtggagacaggccggagtgtggccagcgtgacgtgggctgatggtaccaccaatgtgtaccgtgtgggccacaagggcaaggtggacctcaagtgtgtgggcgaggcagcgggcggcttctactacaaggaccacctcccaaggctcggcaagccggcggagctgcagcgcagggtgagtgctgacagccagcccttccagcacggggacaaggtcaagtgtctgctggacactgatgtcctgcgggagatgcaggaaggccacggcggctggaaccccaggatggcggagacgggcaccgtgcatcgtatcacggaccgcggggacgtgcgcgtgcagttcaaccacgagacgcgctggaccttccaccccggggcgctcaccaagcaccactccttctgggtgggcgacgtggtccgggtcatcggcgaccttgacacagtgaagcggctgcaggctgggcatggcgagtggacggacgacatggcccctgccctgggccgcgtcgggaaggtggtgaaagtgtttggagacgggaacctgcgtgtagcagtcgctggtcagcggtggaccttcagcccctcctgcctggtggcctaccggcccgaggaggatgccaacctggacgtggccgagcgcgcccgggagaacaaaagctcactgagcgtggccctggacaagcttcgggcccagaagagtgacccagagcacccgggaaggctggtggtggaggtggcgctgggtaacgcagcccgggctctggacctgctgcggaggcgcccagagcaggtggacaccaagaaccaaggcaggaccgctctgcaagtggctgcctacctgggccaggtggagttgatacggctgctgctacaagccagggcgggcgtggacctgccggacgacgagggcaacacggcactgcactacgcggccctggggaaccagcccgaggccaccagggtgctcctgagtgctgggtgccgggcggacgccatcaacagcacccagagcacagcactgcacgtggccgtgcagaggggcttcctggaggtggtgcgggccctgtgtgagcgcggctgtgacgtcaacctgcccgacgcccactcggacacgcccctgcactccgccatctcggcgggcactggagccagcggcattgtcgaggtcctcacggaggtgccaaacatcgatgttaccgccaccaacagccagggtttcaccctgctgcaccatgcctccctcaagggtcacgcgctagctgtgagaaagattctggctcgggcgcggcagctggtggacgccaagaaggaggacggcttcacggcgctgcatctggctgccctcaacaaccaccgcgaggtggcccagatcctcatccgggagggccgctgtgacgtgaacgtgcgcaaccggaagctgcagtccccgctgcatctcgccgtgcaacaggcccacgtggggctggtgccgctactggtggacgctgggtgcagtgtcaacgccgaggacgaggagggggacacagccctgcacgtggcgctgcagcgtcatcagctgctgcccctggtggctgatggggccgggggggacccagggcccttgcagctgctgtccaggctacaggcctcgggcctccccggcagcgcggagctgacggtgggcgcggcggtcgcctgcttcctggcgctggagggcgccgacgtgagctacaccaaccaccgcggtcggagcccgctggacctggccgccgagggtcgcgtgctcaaggcccttcagggctgcgcccagcgcttccgggagcggcaggcgggcgggggcgcggccccgggccccaggcaaacgctcgggacccccaacaccgtgacgaacctgcacgtgggcgccgcgccggggcccgaggccgctgagtgcctggtgtgctccgagctggcgctgctggtgctgttctcgccgtgccagcaccgcaccgtgtgtgaggagtgcgcgcgcaggatgaagaagtgcatcaggtgccaggtggtcgtcagcaagaaactgcgcccagacggctctgaggtggcgagcgccgcccccgcccccggcccgccgcgccagctggtggaggagctgcagagccgctaccggcagatggaggaacgcatcacctgccccatctgcatcgacagccacatccgcctcgtgttccagtgcggccacggcgcatgcgccccctgcggctccgcgctcagcgcctgccccatctgccgccagcccatccgcgaccgcatccagatcttcgtgtgagccgcgccgtccgccgcgcccgagctgccttcgcgtgcccccgccctgtgttttataaaaagaaagattctcgga

SEQ ID NO: 4017 - DNA, 806 bp, Homo sapiens
  source 1..806: mol_type = genomic DNA
agtcccggttccccgccatcagcacgacctgtgtgagagcacagggtatctgggcagaaggaaaactaggggagcctcatccagcgctggagatggagaagctttgggcttctcgacggcgaggcacccggggaacggggagtcacttagaacctcaaagtagcctcgggcgagaacaagcgaagcaattccaagctctaccaggtcacggagggcgcgaaacccgccccgcgctccggccggccggcagggggcgcgcgctccccgaactcccgcgcaccgcggaggaggcggccctggcgcggggaagcagtgggaaaatcgcaaggaagccggcgctgctctgaagggagagtctgtgcagtggcacctgcgcgaagctggccaaagcctgcccagacggctcacctgtgcgggatggaacaaaagtttgtttcgacgccggaccgcgtaagagacgatgatgttgggcacggaaggtggagagggattcgtggtgaaggtccggggcttgccctggtcttgctcggccgatgaagtgcagaggtttttttctgactgcaaaattcaaaatggggctcaaggtattcgtttcatctacaccagagaaggcagaccaagtggcgaggcttttgttgaacttgaatcagaagatgaagtcaaattggccctgaaaaaagacagagaaactatgggacacagatatgttgaagtattcaagtcaaacaacgttgaaatggattgggtgttgaagcatactggtccaaatagtcctgacacggccaatgatggctttgtacggctta

SEQ ID NO: 4018 - DNA, 584 bp, Homo sapiens
  source 1..584: mol_type = genomic DNA
acttattgagcgccgactgtctacgggcggccgggggcctgagccgcgccttgctgctgggtctccacttgtggggaagagagaactggaccaggacagcgcgggaaactgacaatgccactgcttgctagctttgggattttggacaaataggtgatgggcagaggcttcagtgtccccttcgcctccgcaggagaggagaggcagcagcatggcgagtgtcctgtcccgacgccttggaaagcggtccctcctgggagcccgggtgttgggacccagtgcctcggaggggccctcggctgccccaccctcggagccactgctagaaggggccgctccccagcctttcaccacctctgatgacaccccctgccaggagcagcccaaggaagtccttaaggctcccagcacctcgggccttcagcaggtggcctttcagcctgggcagaaggtttatgtgtggtacgggggtcaagagtgcacaggactggtggagcagcacagctggatggagggtcaggtgaccgtctggctgctggagcagaagctgcaggtctgctgcagggtggaggaggtgtggctgg

SEQ ID NO: 4019 - DNA, 742 bp, Homo sapiens
  source 1..742: mol_type = genomic DNA
cacgccgccggccgccgtttagtcccagagatagaaaaaagtagaggtaggagggcgcggcggctcacgcctgtaatcccagcactttggaaggccgaggcgggcggatcacgagagggtcaccatgaagttcaatcccttcgttacctcggaccgcagtaaaaaccgcaaacgtcacttcaatgccccctcacacgtgcgcaggaagatcatgtcatccccgctctccaaggagctgcggcagaagtacaatgtccgctccatgcccatccgcaaggacgacgaggtccaggtagttcgaggacactacaaaggtcagcaaattggcaaggtagtccaggtgtacagaaagaaatatgtcatctacatcgagcgggtgcagcgtgagaaggccaacggcacaactgtccacgtgggcattcacccaagcaaggtggttatcaccaggctaaaactggacaaggatcggaaaaaaattcttgaacgcaaagccaagtctcgacaagttggaaaagagaaaggcaaatataaagaagaacttattgagaaaatgcaggaataaatagaacctgttgtgcaaccacggtttaaccggagattttgaggctagggtgtgtttctttcgaacttttcggaatgtctggaacatttcatttcctgttttgttacctgtgcctctgtaaatctacttttgcaattttaagtaataattttatgaataaaaatgggaaatgcttcctaa

SEQ ID NO: 4020 - DNA, 446 bp, Homo sapiens
  source 1..446: mol_type = genomic DNA
gttgcctgtgggtgcccgcgaaccaacggttagcggtggcaggggctgactgagagcgtctgcttggttgggaaaccaattagaaaggagtgttctgctagaaacagataatggattctgaattaatgcatagtatagtaggaagctatcataaacctccagaaagagtatttgttccctcattcacccagaatgaaccatctcagaattgccatcctgcaaacttagaagttacctctcctaagatacttcatagcccaaatagccaagctcttattttagccttaaaaactcttcaggaaaaaattcatcgtttagagctggagagaacacaagctgaagataacctgaacattctttccagagaagcagcacagtataagaaggccttagagaatgaaacaaatgagagaaatctggcacaccaggagctgataaagcagaaa

SEQ ID NO: 4021 - DNA, 578 bp, Homo sapiens
  source 1..578: mol_type = genomic DNA
ttattgcgaggatggagggaggcgcaggcgttctcattcatagttctcccatcctgaaagttctgttcctcttttgtccagaaactgggccctcgtcagactgccttgccctgttcctgactcaggccaaggcctgcagccgggaagaggttggggcggcgtgagttatgtgaaaagcgctcagaatacagtatgtcatgtggactcccattattgtcccagttgtttagaaaatatgccatcggctgaagccaaactaaaaaagaatagatgtgccaattgttttgactgtcctggctgcatgcacaccctctctactcgggccacgagcatctccacacagcttccagatgacccagccaagaccaccatgaagaaagcctattacctggcatgtggattttgtcgctggacgtctagagatgtgggcatggcagacaaatctgtagctagtggcggttggcaggaacctgaaaatcctcacacacaacggatgaacaaattgattgaatattaccagcagcttgctcagaaagagaaggttgagcgagatcgcaagaaactggcacgacgtagaa

SEQ ID NO: 4022 - DNA, 770 bp, Homo sapiens
  source 1..770: mol_type = genomic DNA
gcttccgcgttccctgcacaaaatgccgggcgaagccacagaaaccgtccctgctacagagcaggagttgccgcagtcccaggctgagacagggtctggaacagcatctgatagtggtgaatcagtaccagggattgaagaacaggattccacccagaccaccacacaaaaagcctggctggtggcagcagctgaaattgatgaagaaccagtcggtaaagcaaaacagagtcggagtgaaaagagggcacggaaggctatgtccaaactgggtcttctacaggttacaggagttactagagtcactatctggaaatctaagaatatcctctttgtcatcacaaaactggacgtctacaagagccctgcttcggatgcctacatagtttttggggaagccaagatccaagatttatctcagcaagcacaactagcagctgcggagaaattcagagttcaaggtgaagctgtcggaaacattcaagaaaacacacagactccaactgtacaagaggagagtgaagaggaagaggtcgatgaaacaggtgtagaagttaaagacgtgaaattggtcatgtcacaagcaaatgtgtcgagagcaaaggcagtccgagctctgaagaacaacagtaatgatattgtaaatgcgattatggaattaacagtgtaaccatctgaaagcaactttttttggtgtctcaaaggagtaactgcagcttggtttgaaatttgtactgtttctatcataaataaagttatgacttcttgct

SEQ ID NO: 4023 - DNA, 568 bp, Homo sapiens
  source 1..568: mol_type = genomic DNA
tttcttgcaaactttgtggcacgttttctgggaagaaaaaactaggatcgtgtaatattaaaaaataaatcgagaggctttttttttttgctctccatattattaagctgcatggactgagaggaggccagataaccatgtcagccacagttgtagatgcagttaatgctgcacccctatcggggtccaaagaaatgagtttggaagaaccaaagaagatgaccagagaggactggagaaagaagaaggagctagaagaacagcgaaaattgggcaatgctcctgcagaagttgatgaagaaggaaaagacatcaacccccatattcctcagtatatttcttcagtgccatggtatattgatccttcaaaaagacctactttaaaacaccagagaccacaaccagaaaaacaaaagcagttcagctcatctggagaatggtacaagaggggtgtaaaagagaattccataattactaagtaccgcaaaggagcatgtgaaaattgtggggccatgacacacaaaaagaaagactgctttgagagacctaggcgagttggagccaaatt

SEQ ID NO: 4024 - DNA, 699 bp, Homo sapiens
  source 1..699: mol_type = genomic DNA
gtcttgcactgtttcctaggctggagtgcagtggcacaatcacagctcactgcagccttgacttccccaggctcaagccattctcctacctcagcctcccaagcagttgggaccacaggagaggagaggcagcagcatggcgagtgtcctgtcccgacgccttggaaagcggtccctcctgggagcccgggtgttgggacccagtgcctcggaggggccctcggctgccccaccctcggagccactgctagaaggggccgctccccagcctttcaccacctctgatgacaccccctgccaggagcagcccaaggaagtccttaaggctcccagcacctcgggccttcagcaggtggcctttcagcctgggcagaaggtttatgtgtggtacgggggtcaagagtgcacaggactggtggagcagcacagctggatggagggtcaggtgaccgtctggctgctggagcagaagctgcaggtctgctgcagggtggaggaggtgtggctggcagagctgcagggcccctgtccccaggcaccacccctggagcccggagcccaggccctggcctacaggcccgtctccaggaacatcgatgtcccaaagaggaagtcggacgcagtggaaatggatgagatgatggcggccatggtgctgacgtccctgtcctgcagccctgttgtacagagtcctcccgg

SEQ ID NO: 4025 - DNA, 492 bp, Homo sapiens
  source 1..492: mol_type = genomic DNA
ctttcattttcagccctgctctttaaatactagacataccgtctggcgcatgtcgaggcgtgtattattttgatccagtgcgcgtgccgtatgtgacttggcttggcttcccctgaaagcagcggctgtggggagttgattcggaagtgaagggccctgggcgacccggcgagtagaggcaacaccaacactcctccttagcgaggggtctccccgccgcggtggctgcccggccccaaggacaggagggatttgtgcactgactcctgaccccgtcctccagcgctgctctgaagggagagtctgtgcagtggcacctgcgcgaagctggccaaagcctgcccagacggctcacctgtgcgggatggaacaaaagtttgtttcgacgccggaccgcgtaagagacgatgatgttgggcacggaaggtggagagggattcgtggtgaaggtccggggcttgccctggtcttgctcggccgatgaagtgcaga

SEQ ID NO: 4026 - DNA, 575 bp, Homo sapiens
  source 1..575: mol_type = genomic DNA
cttgcgccctgaggcggtttccgttcccggacgtttggactctgtcctggagaaggggaaggaaaaagtaagacgtagaagtacactgagacttcgtcacacataaaacaagcacgacaaagaaagagggcgcgaagggactcctggaagaaattgagtctacatttaagatcaccctaaaagtagtgacggcctcttcattactccaaaccccagatttaagtcggtaggacgtcttcgcgttgacttgtggggaatgtagtttcgatgctgccggcgcgttttgtttgcgacagaaactacaacccccaggggccaccgcgacgttgcctgtgggtgcccgcgaaccaacggttagcggtggcaggggctgactgagagcgtctgcttgtgcctggtacctagtacaaacttaataaatgtgtgacgcaagaataaaggaatgaatgaatggaagaatgatataatgccacagaactttcaaagataatggattctgaattaatgcatagtatagtaggaagctatcataaacctccagaaagagtatttgttccctcattcacccagaatga

SEQ ID NO: 4027 - DNA, 1287 bp, Homo sapiens
  source 1..1287: mol_type = genomic DNA
actcggcggtggcgtccgtgttgttattgtggtggtagcggcgtctggctgctgcggaccccgccgagtcctagcgcctggcctgcgcgccgctgcccgcgccacaggattaatttatttttggaaatcaagtgcaatattggaagccatttctactaattttatttcacttttaaatttatgatttgatttgaatactatcatgggaggagctgtgagtgctggggaagataatgatgacttaattgataatttaaaagaagctcagtatattcgtactgaaagagtggagcaagccttcagagcgattgatcgtggagattactatttggaaggctacagagacaatgcttacaaagacttagcctggaagcatggaaacatccacttgtcagcaccttgcatttattctgaagttatggaagcattgaaacttcaaccaggattgtcttttcttaacctgggaagtggaaccggatatttaagtacaatggtgggcttaattttaggtccttttggaataaatcatgggattgagcttcattcagatgtggtggaatatgccaaggaaaaactggagagcttcatcaaaaatagtgatagctttgataaatttgagttctgtgaacctgcatttgttgttggtaattgcctccagatagcttctgacagtcatcagtatgatcgaatttattgtggagctggagtgcagaaagaccatgaaaactacatgaaaatattactaaaagttggaggcatattagtcatgcctatagaggatcagttaacacagattatgcgaactggacagaacacttgggaaagtaaaaatatccttgctgtttcatttgctccacttgtgcaaccaagtaagaatgataatggcaaaccagattctgtgggactccctccctgtgctgtcaggaatctacaggacttggctcgtatttacattcgacgcacacttagaaatttcataaatgatgagatgcaggccaaggggattcctcaaagggctccacccaaaaggaaaagaaagagagttaaacagagaattaacacttacgtatttgtgggtaatcagcttattcctcagcctctagacagtgaagaggatgaaaaaatggaagaggataacaaagaagaggaggaaaaagatcacaatgaagcaatgaagccagaggagccacctcaaaatttactgagagaaaaaatcatgaagctgcccctccctgaatctttaaaagcttacttgacatattttagagacaaataacttagatcaag

SEQ ID NO: 4028 - DNA, 1683 bp, Homo sapiens
  source 1..1683: mol_type = genomic DNA
cgccgcgctgcgacgctgtagtggcttcgtcttcggtttttctcttccttcgctaacgcctcccggctctcgtcagcctcccgccggccgtctccttaacaccgaacaccatgccttcaattaagttgcagagttctgatggagagatatttgaagttgatgtggaaattgccaaacaatctgtgactattaagaccatgttggaagatttgggaatggatgatgaaggagatgatgacccagttcctctaccaaatgtgaatgcagcaatattaaaaaaggtcattcagtggtgcacccaccacaaggatgaccctcctcctcctgaagatgatgagaacaaagaaaagcgaacagatgatatccctgtttgggaccaagaattcctgaaagttgaccaaggaacactttttgaactcattctggctgcaaactacttagacatcaaaggtttgcttgatgttacatgcaagactgttgccaatatgatcaaggggaaaactcctgaggagattcgcaagaccttcaatatcaaaaatgactttactgaagaggaggaagcccaggtaggtagcacacagttttgtctttgatcacatgctcttaaaaagggagtaacacctataacatgccagcaaaagaggtgactgtatcaagtagtcttgatactttagggataatatgtacttaatgtgtcttaaacatactcttactgttctgtctttatgaatctgaacacttagatgatactgcattttaagcataagaacaattagttttcaatgagaagagctcttgttaatgtattaacagttactagttttggcacctgcaactttctgtatagaccatacatatctgacatcagaaaagcaggccctagagagaagtatatactagggtactttagagcaacttaatgaggggaggaaatgaaagaatagatcagaatgattttgttgacatgactacagactgaaataatgtgaatgaattaactgaatttgctctgtcaactttagtaaattgcccattgcctttgctttgttcataatttcagcagggcagaataaaaaccatgggaggcaaagaaaggaaatccggaaatatagtcttaacctggtgttgttctaattttccatctgttcttctgactcaactcactggctatcgatgaatcagtaggtagtatttataagtcttaggaaagactactcaagttaaggtacttccctatatccatctcttttaggtacgcaaagagaaccagtggtgtgaagagaagtgaaatgttgtgcctgacactgtaacactgtaaggattgttccaaatactagttgcactgctctgtttataattgttaatattagacaaacagtagacaaatgcagcagcaagtcaattgtattagcagaatattgtcctcattgcatgtgtagtttgagcacagatcccaaaccttacggccaagtttcttctagtatgatggaaagtttcttttttctttgctctgaataaaactgaactgtgggttctctataagtggcattttgggctttccctcttttttgtaaagcaatgtctgcctagtttattgtccagttaactttagtgaccttttaaaagttggcattgtaaataaaacaacttgcaaaaaagttttctggaatagaattaacaaaa

SEQ ID NO: 4029 - DNA, 769 bp, Homo sapiens
  source 1..769: mol_type = genomic DNA
gcgacgttgcctgtgggtgcccgcgaaccaacggttagcggtggcaggggctgactgagagcgtctgcttgattcaggttatgctttctggccagaatactgcataggtgatgttgcgtccttctccaggtttcatatccagaggcacatggtggccttctacctctcacagacagagtctttctctgtcacccaggctggagtacagtggcacgatctcggctccctgcaacgtccgcctcccgagttcaagtgattctcctgcctcagccacccgagtagctgggtctacaggtgtgcgccaccatgcctggctaatttttgtatttttaagagagacggggtttcaccatgctggccaggctggtctcgaactcctgacctcgtgatccgcctgcctcagcccctcaaagtgctaggattagagataatggattctgaattaatgcatagtatagtaggaagctatcataaacctccagaaagagtatttgttccctcattcacccagaatgaaccatctcagaattgccatcctgcaaacttagaagttacctctcctaagatacttcatagcccaaatagccaagctcttattttagccttaaaaactcttcaggaaaaaattcatcgtttagagctggagagaacacaagctgaagataacctgaacattctttccagagaagcagcacagtataagaaggccttagagaatgaaacaaatgagagaaatctggcacaccaggagctgataaagcagaaaaaa

SEQ ID NO: 4030 - DNA, 501 bp, Homo sapiens
  source 1..501: mol_type = genomic DNA
ggagccgggccgcgggccgcgccgggagggcgggcagggccgcggccgctgcagcccggagctgagctagccgtccgagccgagccgtccgagccggggaagccgggcgcgtgctgccgctcgtggcgggccgaggtgatgggcagaggcttcagtgtccccttcgcctccgcaggagaggagaggcagcagcatggcgagtgtcctgtcccgacgccttggaaagcggtccctcctgggagcccgggtgttgggacccagtgcctcggaggggccctcggctgccccaccctcggagccactgctagaaggggccgctccccagcctttcaccacctctgatgacaccccctgccaggagcagcccaaggaagtccttaaggctcccagcacctcgggccttcagcaggtggcctttcagcctgggcagaaggtttatgtgtggtacgggggtcaagagtgcacaggactggtggagcagcacagctggatggagggtca

SEQ ID NO: 4031 - DNA, 802 bp, Homo sapiens
  source 1..802: mol_type = genomic DNA
gctgtagtggcttcgtcttcggtttttctcttccttcgctaacgcctcccggctctcgtcagcctcccgccggccgtctccttaacaccgaacaccacataaatgagcatattctgatgtactctttggatctgaactcatcttcacagatgccttcaattaagttgcagagttctgatggagagatatttgaagttgatgtggaaattgccaaacaatctgtgactattaagaccatgttggaagatttgggaatggatgatgaaggagatgatgacccagttcctctaccaaatgtgaatgcagcaatattaaaaaaggtcattcagtggtgcacccaccacaaggatgaccctcctcctcctgaagatgatgagaacaaagaaaagcgaacagatgatatccctgtttgggaccaagaattcctgaaagttgaccaaggaacactttttgaactcattctggctgcaaactacttagacatcaaaggtttgcttgatgttacatgcaagactgttgccaatatgatcaaggggaaaactcctgaggagattcgcaagaccttcaatatcaaaaatgactttactgaagaggaggaagcccaggtacgcaaagagaaccagtggtgtgaagagaagtgaaatgttgtgcctgacactgtaacactgtaaggattgttccaaatactagttgcactgctctgtttataattgttaatattagacaaacagtagacaaatgcagcagcaagtcaattgtattagcagaatattgtcctcattgcatgtgtagtttgagcaca

SEQ ID NO: 4032 - DNA, 729 bp, Homo sapiens
  source 1..729: mol_type = genomic DNA
ggacatgtgactctcccacctcgtttcgtggcagagccaaagagctgagcaaaaggagctgctgcagcttgaagaaaaagccacccctgaaggctcctgccagagccaggcttaccttctctccctcgagaatcttctcccgaaggaccagcccagggaagggaagcagctgctctggactcactcaagtgtgtctcacaccccttcctcttccagcagcagctacctggcaactgaacccatcatcaccacagccactcctgcagctgccacggtttctgccacctctaagatgtgccctggtaactggctttgggcttctatgacttttatggcccgcttctcccggagtagctcaaggtctcctgttcgaactcgagggaccctggaggagatgccaaccgttcaacatcctttcctcaatgtcttcgagttggagcggctcctctacacaggcaagacagcctgtaaccatgccgacgaggtctggccaggcctctatctcggagaccaggacatggctaacaaccgccgggagcttcgccgcctgggcatcacgcacgtcctcaatgcctcacacagccggtggcgaggcacgcccgaggcctatgaggggctgggcatccgctacctgggtgttgaggcccacgactcgccagcctttgacatgagcatccacttccagacggctgccgacttcatccaccgggcgctgagccagccaggagg

SEQ ID NO: 4033 - DNA, 1790 bp, Homo sapiens
  source 1..1790: mol_type = genomic DNA
gctagccgtccgagccgagccgtccgagccggggaagccgggcgcgtgctgccgctcgtggcgggccgaggagaggagaggcagcagcatggcgagtgtcctgtcccgacgccttggaaagcggtccctcctgggagcccgggtgttgggacccagtgcctcggaggggccctcggctgccccaccctcggagccactgctagaaggggccgctccccagcctttcaccacctctgatgacaccccctgccaggagcagcccaaggaagtccttaaggctcccagcacctcgggccttcagcaggtggcctttcagcctgggcagaaggtttatgtgtggtacgggggtcaagagtgcacaggactggtggagcagcacagctggatggagggtcaggtgaccgtctggctgctggagcagaagctgcaggtctgctgcagggtggaggaggtgtggctggcagagctgcagggcccctgtccccaggcaccacccctggagcccggagcccaggccctggcctacaggcccgtctccaggaacatcgatgtcccaaagaggaagtcggacgcagtggaaatggatgagatgatggcggccatggtgctgacgtccctgtcctgcagccctgttgtacagagtcctcccgggaccgaggccaacttctctgcttcccgtgcggcctgcgacccatggaaggagagtggtgacatctcggacagcggcagcagcactaccagcggtcactggagtgggagcagtggtgtctccaccccctcgcccccccacccccaggccagccccaagtatttgggggatgcttttggttctccccaaactgatcatggctttgagaccgatcctgaccctttcctgctggacgaaccagctccacgaaaaagaaagaactctgtgaaggtgatgtacaagtgcctgtggccaaactgtggcaaagttctgcgctccattgtgggcatcaaacgacacgtcaaagccctccatctgggggacacagtggactctgatcagttcaagcgggaggaggatttctactacacagaggtgcagctgaaggaggaatctgctgctgctgctgctgctgctgccgcaggcaccccagtccctgggactcccacctccgagccagctcccacccccagcatgactggcctgcctctgtctgctcttccaccacctctgcacaaagcccagtcctccggcccagaacatcctggcccggagtcctccctgccctcaggggctctcagcaagtcagctcctgggtccttctggcacattcaggcagatcatgcataccaggctctgccatccttccagatcccagtctcaccacacatctacaccagtgtcagctgggctgctgccccctccgccgcctgctctctctctccggtccggagccggtcgctaagcttcagcgagccccagcagccagcacctgcgatgaaatctcatctgatcgtcacttctccaccccgggcccagagtggtgccaggaaagcccgaggggaggctaagaagtgccgcaaggtgtatggcatcgagcaccgggaccagtggtgcacggcctgccggtggaagaaggcctgccagcgctttctggactgagctgtgctgcaggttctactctgttcctggccctgccggcagccactgacaagaggccagtgtgtcaccagccctcagcagaaaccgaaagagaaagaacggaaacacggagtttgggctctgttggctaaggtgtaacacttaaagcaattttctccca

SEQ ID NO: 4034 - DNA, 3616 bp, Homo sapiens
  source 1..3616: mol_type = genomic DNA
gacgcgcgacggttcgtgcgtgcgtgcgggcggctgcgtcgggctgcaggagaagatggcggtctccacaggagttaaagttcctcgtaattttcgcttgttggaagaacttgaagaaggacaaaaaggagtaggcgacggtacagttagctggggccttgaagatgatgaagatatgacacttacaaggtggacaggcatgattattgggccaccaaggacaaattatgaaaacagaatatatagcctgaaagtagaatgtggacctaaatacccagaagctcctccgtcagttagatttgtaacaaaaattaatatgaacggaataaataattccagtgggatggtggatgcccggagcataccagtgttagcaaaatggcaaaattcatatagcattaaagttgtacttcaagagctaagacgtctaatgatgtccaaagaaaatatgaagcttccacagccaccagaaggacaaacatacaacaattaattttagtggatctcaaacttgtcttaaatcaacaaccttctactcatgttaatgtcttgattaaatatcacaatgcaaaatacacattaagtaaaagaattccagctggtaaacatgacctggacatttgtaagaatatatttaatatatgtacacccattatgttttcaggtaacaggaggaaaaatgcagcacaattttttttctcttgaaaggcactgtcatttaaacataaacctggagtactcgaaatagaattcaggtttacaagatgaaagcgtgtggagaagtgtcagatggcagtggaagcatgtgtgtttctaaaaagtaaaaatctcaagaaaacagaaatggcatgctttacccatcttacttagtgaaagagagctgcagttgaaattgtttaaaaagtagcaggtacaatgaatattgtcacagatgtgttaatttttgaagcaatgtgggtgctgactactagtagtatcaaaaatatgttcaggattgttttgatacctgtatttataataaaaaatgttggggggagttgatgaattcctgttaaaagctgttcttgtgtgttacatgtaacagacatggtaaatatttgtttacagtctttgtttaacaaaccatgcatttaagtttaagtgaagtcaacaaaaaggaaataggtgtatggatatgtgattttgagattaaagttagtcttaaaatgtaaataaaatgtgaaacgtgtcctcagagactgtgccatttctattatgttgatgtatatgtacagtaccttgccagggaagcaaaaattggaattattgtagcttttcatgtatacacacttttatttaccctattttgtgtacttcttgtgaattataatttgcagactatttcagaaaagaaattatctagtttaatttcttctttggacaaggagtcctaggtattatattttgagtttgatttcaccagaaataataatattaaaaagatctttgcattctggcagttcttttaggattataggttgcaaattatccaaatatatatcccattttttaaagcataatatcttttttagttgtttttctgtgaagcttttggttaataaatagggtcaactaattggagacttttctcttccaattagggcttttaatactaacaaggataactttattcattcctcgtattctctactctaacaaatatgaactctgaagttgaaaagtcatttatgttccgctttcaccaaagtgacgtgaggctttaggtcactgtttcacttcaaagtactggatccaaagctttgttgaaaatgctgtttgatgaattcactgaagaatatagaaaggtggtcaggtaaagtctacttttattttgtcaagcttaataatttgtgtcatactttaccccagtatatataggcaaaccaaaaccttatcaaatattaaattagttgtttaaactttgcttataaagtattggccatgtggtggctcatgccgctaatcccagcactttgggaggctgagacgggcagatcacttgaggtcaggagcttgagaccagcctggccaacatgatgaaaccctgtctctactaaaaatacaaaaaattagccaggtgtggtggtgggtacttgtagtcccagctactcgggaggctgggcaggagaactacttgaaactggcagacagaggttgcagtgccgagagcgcaccactgctccagcctgggcaacagagcaagactccatctcaaaaaaaaaaaaaaaaagaaaaatattaataattgaccttggctgtatattaaaatagttacttttatagtagagcacatttctcaaacatgccctgaaaggcttttatcaagctcatataaagttaaagctttgagctaccttttcttggccaataaagtcactgacagtttatgtaaacattaatttcaacatggctgttgcattttaattatcaaaaatgtttaaaatgctttaagatgacacatagagaacatacacatacatacaaattagtgcatttgtaatttgttaaatttgaaatgaactattaccttgaaatatagtctttaaaaatttttaatggttaaagattaaattgaatgaaactgtagtctaatggtaactgatgatctgaatccgtctctctgataacctcctttccattttgaaaatgtgtcttattatacatggaagctagtaactacgtgaatgctgttggcaggatgagggtctgggtacctcagtctcttgtcctgtttccttcccccaaatccaccattgtgaagttgccaaccccctgccgccttcccctgccaagtacatgttgtcagagtcagccctataatgttcatttcccctcttgtttgtgggattatggatctctgcagaaatctgcatgccaattaacccatttctaaagcagaatccattttgcatgtcacaatcaagatgtacttggcaatctaagacacactgggagactgtaagaggaattaatatagaaaagctcttaattataataacatttggaagaaatttttcctttgttttgtaaagtggctaaggttgtaggagtgtgtggtatttattaccttttaaatgaactgtaaatttgccttagaaatttgtttaaaaggctagcaagtgagacccttgaggatgatcatatactaataaagattaccaaaagaaacttcttgtcctgttaggtcagtgttatgatttaatggttttaattacttaaccaattttaagaattgacaatttttaaaaatatttttttctaccattctaaagtaatgtcttttgttgtgggtttatgtgtaactacaggattttggaacataaacattttgaaggatagtcaatggtatttagtcttggatataaaaatagagaaaatttatagctttatgttattaaaataatttatcacacagagtgatttgaggttttcgcagagtagatttgtttgactcatggtttattagtctggattacttaagaacaatatgttgattttaatgttaattcccactaaatatataatattgataaatacatgtgaaattaatattgtttggaaaatgtagaggacacag

SEQ ID NO: 4035 - DNA, 2068 bp, Homo sapiens
  source 1..2068: mol_type = genomic DNA
ctgcacagggagtttgtcttgtgcaaacaatttccaaggcagcgttttcttccctgcctgggagtgcagggctcagcgccttcactttggaactgactcagagacctaaagaagcccacctggccagcgggaaggggggccgccgccgcctcccggttttgggcagccctggccagctccctgtggccttggaggacttccaccgggcaggcgttcccatgatgccaggctaccaggcgcgggggattcctgcaggccggcgctgcttttcttagaaccccctttctagaaaagtacacctgggggttttgcttcaaagagaggagaggcagcagcatggcgagtgtcctgtcccgacgccttggaaagcggtccctcctgggagcccgggtgttgggacccagtgcctcggaggggccctcggctgccccaccctcggagccactgctagaaggggccgctccccagcctttcaccacctctgatgacaccccctgccaggagcagcccaaggaagtccttaaggctcccagcacctcgggccttcagcaggtggcctttcagcctgggcagaaggtttatgtgtggtacgggggtcaagagtgcacaggactggtggagcagcacagctggatggagggtcaggtgaccgtctggctgctggagcagaagctgcaggtctgctgcagggtggaggaggtgtggctggcagagctgcagggcccctgtccccaggcaccacccctggagcccggagcccaggccctggcctacaggcccgtctccaggaacatcgatgtcccaaagaggaagtcggacgcagtggaaatggatgagatgatggcggccatggtgctgacgtccctgtcctgcagccctgttgtacagagtcctcccgggaccgaggccaacttctctgcttcccgtgcggcctgcgacccatggaaggagagtggtgacatctcggacagcggcagcagcactaccagcggtcactggagtgggagcagtggtgtctccaccccctcgcccccccacccccaggccagccccaagtatttgggggatgcttttggttctccccaaactgatcatggctttgagaccgatcctgaccctttcctgctggacgaaccagctccacgaaaaagaaagaactctgtgaaggtgatgtacaagtgcctgtggccaaactgtggcaaagttctgcgctccattgtgggcatcaaacgacacgtcaaagccctccatctgggggacacagtggactctgatcagttcaagcgggaggaggatttctactacacagaggtgcagctgaaggaggaatctgctgctgctgctgctgctgctgccgcaggcaccccagtccctgggactcccacctccgagccagctcccacccccagcatgactggcctgcctctgtctgctcttccaccacctctgcacaaagcccagtcctccggcccagaacatcctggcccggagtcctccctgccctcaggggctctcagcaagtcagctcctgggtccttctggcacattcaggcagatcatgcataccaggctctgccatccttccagatcccagtctcaccacacatctacaccagtgtcagctgggctgctgccccctccgccgcctgctctctctctccggtccggagccggtcgctaagcttcagcgagccccagcagccagcacctgcgatgaaatctcatctgatcgtcacttctccaccccgggcccagagtggtgccaggaaagcccgaggggaggctaagaagtgccgcaaggtgtatggcatcgagcaccgggaccagtggtgcacggcctgccggtggaagaaggcctgccagcgctttctggactgagctgtgctgcaggttctactctgttcctggccctgccggcagccactgacaagaggccagtgtgtcaccagccctcagcagaaaccgaaagagaaagaacggaaacacggagtttgggctctgttggctaaggtgtaacacttaaagcaattttctcccattgtgcgaacattttattttttaaaaaaaa

SEQ ID NO: 4036 - DNA, 748 bp, Homo sapiens
  source 1..748: mol_type = genomic DNA
ctgcattgttagatttgtgattctgcactgttcatttcagtactatctaatataaaaattacatgtttaaatgttttataattaaaaattgggctcaggttaaaatattttcttttggagataccttttgttgtggtcttgtcacaggaagggtcctctactctgcatccttctccattaagcagggacaactgcattattggcaagcgctaagcaacatggagaagcagacatgtttgtgaatcgcaaagtgaaatctgattctctccaactatggatgagtgagagtaggatatttcagtggctggttttaaaacatgctttacttttttgcttcctttgcctaacaacctgtttgctttggggttggcgacaattgtctcagagaagctgaatgaatattttaaccgatgtaatgggtcataagtctttgaacataaaatgggtgtgatgcatgttttaaatgccaaatgatacacttttgggaaaatatatgcgatttgtaatacaacacacctagaaaacttcagaggtgccataagttaatagtgacatcaccggattatgaatacttgagaagcatgggccttttaaaagttgtatgtgagttttaagaggccttgaattaatctgtaccagacataaatgagcatattctgatgtactctttggatctgaactcatcttcacagatgccttcaattaagttgcagagttctgatggagagatatttgaagttgatgtgga

SEQ ID NO: 4037 - DNA, 2329 bp, Homo sapiens
  source 1..2329: mol_type = genomic DNA
gtggccagcgagggcagcgttcgccgcccctcaggccccgtcccggcgccgcagccgcctgcgtttcggtttgtgagcaggcccggccgggccaggagcgagagcgagactctggagcggtcgccgccgcagtcgcccgggccgggaaaggcgggcgatgcccccaaccgccgctcgggccatgtccgaggggcgcgcgtgttgtcgccgccggggcgccgtgcccgcctgtcgtcccccgggcccagccgctcgtccgaggcccgcgaggagctgcgccgccacctcgtgggcctcatcgagcgcagccgggtggtgatcttcagcaagagctactgtccccatagtactcgggtgaaagaactcttttcttctttgggagtcgaatgtaatgtcttggaacttgatcaagttgatgatggggccagggttcaagaagtgctgtcagaaatcactaatcagaaaactgtgcccaatattttcgtgaataaagtgcatgtaggtggatgtgaccaaactttccaggcatatcagagtggtttgttacagaagctccttcaggaagatttggcatatgattatgatctcatcatcatcggtggtggttctggaggcctttcatgtgcgaaggaagctgccattttgggaaagaaagttatggtgctagactttgttgtcccgtcacctcagggcacatcctggggtcttggtggcacttgtgtaaatgtaggttgtattcctaagaaattgatgcatcaggctgcccttttggggcaggcattatgtgactcaaggaaatttggctgggaatataatcaacaagtgaggcacaactgggagacaatgacaaaagcgattcagaaccacatcagctctctaaactggggctacaggttgtctctgagggaaaaggctgtggcctatgtcaattcctatggagaatttgttgaacatcataaaataaaggcaaccaataaaaaaggacaggagacttattatactgctgcacagtttgtcatagcaacgggtgaaaggccacggtatttaggaatccaaggagataaagaatactgtattactagtgatgaccttttttctctgccttattgccctggcaaaacattagtggtgggtgcctcttatgttgccctggagtgtgcagggtttctggctggctttggcctagatgtcacagttatggtacgctcaatccttctccgtggcttcgaccaagaaatggcagaaaaagtgggttcctacatggagcagcatggtgtgaagttcctacggaaattcatacctgtgatggttcaacagttggagaaaggttcacctggaaagctgaaagtgttggctaaatccactgaaggaacagaaacaattgaaggagtctataacacagttttgttagctattggtcgtgactcctgtacaaggaaaataggcttggagaagattggtgtcaaaattaatgagaagagtggaaaaatacctgtaaatgatgtggaacagaccaatgtgccatatgtctatgctgttggtgatattttggaggataagccagagctcactcctgtcgccatacagtcaggcaagctgctagctcagagactttttggggcctctttagaaaagatatatcatactttgttctggcctcttgaatggacagtagctggcagagagaacaacacttgttatgcaaagataatctgcaataaattcgaccatgatcgggtgataggatttcatattcttggaccaaacgccggtgaggttacccaaggatttgcagctgcaatgaaatgtgggctcacaaaacagctacttgatgacaccattggaattcaccccacatgtggggaggtgttcacgactttggaaatcacaaagtcgtcaggactagacatcactcagaaaggctgctgaggctaggcctgctgctgtttagttctccttgtcatattctcatttctctcaaagataagaatgctctcggataaaatgagcctgtgctcatgacagctgctctgttactcagggaccagtgcagggctgtcttacgacacttagatgagaaagtagacaaggaaagaggacagcagtgggcatctgccttgtggtcttgctgacagcgagaagcagtgggactgcttccttgacgccttagcttggagccccgttatgaggtgagccaaggctgactctcgcaagccaggactgagcttccctcggaaagacctttgagtggcaccattcacctaagttagcttttctggtcgctattgtttttatcccctttgctttgttgtttctgtgaaaatatatt

SEQ ID NO: 4038 - DNA, 1554 bp, Homo sapiens
  source 1..1554: mol_type = genomic DNA
ctgcatcctactgctattttcattttatcgatggaatactttgaagcacgaaaaatcattatatcttgaaataatttttaaaataatccaataacaaactcagaactactgaagaataataaagaatatgccgagtttctacattgcaaaggaaagaaatttacagattttgatgaagttcgccttgagattgaagcagaaacagatcgcgtgactggaatgaataaaggcatttcctccatacccattaatttacgagtctattccccacacgtgttaaatctaacccttattgatctacctggaataactaaagtgcctgtgggagatcagccaccagatatcgagtatcagatcagagaaatgattatgcagttcatcacgagggagaactgtctgattttagctgttactccagccaacactgatcttgcaaactcagatgcgctgaagctagctaaagaagttgatcctcaaggtctgagaaccattggagttatcaccaaactggaccttatggatgaaggaacggatgccagggatgttctagagaacaaactgttgcctcttcgcaggggttacgtgggggtggtaaacagaagccagaaggacatagatgggaagaaggacataaaggcagccatgctggcagagaggaagtttttcctttcccacccggcttacagacatatcgctgaccgaatgggaaccccacacctgcagaaggtccttaatcagcaacttaccaaccacattcgggataccctaccaaacttcaggaacaaactacagggacagttgctctccatagaacatgaagtagaagcctacaaaaatttcaaaccagaagacccaacaaggaagaccaaagcattgctgcagatggttcagcaatttgctgtggactttgagaagagaattgaagggtcaggggatcaagtagataccctggaactctcaggtggtgctaaaatcaatcgtatttttcatgaacgctttccttttgagatagtaaagatggagttcaatgagaaagaattgcgaagagaaataagctatgcaatcaaaaacatacatggtatcaggacagggttgtttactccagacatggcatttgaagcgatagtcaagaaacagattgtaaagttgaaagggccttccttgaagagtgtggatctggtaatacaagaattaatcaacactgtgaagaagtgtaccaaaaaactggcaaacttccccagactctgcgaggaaacggaaaggattgttgctaaccacattcgtgagcgagaagggaagacaaaggaccaggtattgctattgattgacattcaagtctcttacatcaacaccaaccatgaagacttcattggcttcgcaaatgctcagcagaggagcagtcaggttcacaagaaaaccacagttggaaatcaggtgattcgcaaggggtggctcaccatcagcaacattggcatcatgaaaggcggctcgaagggatactggttcgtccttactgcggaaagcttgtcctggtataaagatgatgaggaaaaa

SEQ ID NO: 4039 - DNA, 3107 bp, Homo sapiens
  source 1..3107: mol_type = genomic DNA
gtgcagaaccgtttggttttcccgaggggtaggcagaatttccaaccccacgagctgctccctctttccgcaaacctcctaaccccggggtttttccataaatgtgtttacttcgtccacgccagcctgcgaagttccaaaatggagtctgggccacgccggcgttctgggcacgactacggtctcttgaaaagatttggaattgaccatgtagataatctctgagagcagttcttaaagtgtaatccagaaccggtggaacttgctagaaacgcatattcttcggaccccctccaaatctgctgaatctgagattgtggaggccattcaatgtcccttcttcaggaatttggaaaaaggatggagagatctctctgagctagactcttcagtggaggaaatgttacaactcatggacagtggcattaccatctgccttaggaacggagcagcctctgtcttcaagaaaaaagaatggagcacacaaggagaagaaaacaagcaagacagtaaactaaaaaagctgagtgaagacagtttgactaagcagcctgaagaagtttttgatgtattagagaagcttggagaagggtcttatggaagtgtatttaaagcaatacacaaggaatccggtcaagttgtcgcaattaaacaagtacctgttgaatcagatcttcaggaaataatcaaagaaatttccataatgcagcaatgtgacagcccatatgttgtaaagtactatggcagttattttaagaatacagacctctggattgttatggagtactgtggcgctggctctgtctcagacataattagattacgaaacaagacattaatagaagatgaaattgcaaccattcttaaatctacattgaaaggactagaatatttgcactttatgagaaaaatacacagagatataaaagctggaaatattctcctcaatacagaaggacatgcaaaattggcagattttggagtggctggtcagttaacagatacaatggcaaaacgcaatactgtaataggaactccattttggatggctcctgaggtgattcaagaaataggctataactgtgtggccgacatctggtcccttggcattacttctatagaaatggctgaaggaaaacctccttatgctgatatacatccaatgagggctatttttatgattcccacaaatccaccaccaacattcagaaagccagaactttggtccgatgatttcaccgattttgttaaaaagtgtttggtgaagaatcctgagcagagagctactgcaacacaacttttacagcatccttttatcaagaatgccaaacctgtatcaatattaagagacctgatcacagaagctatggagatcaaagctaaaagacatgaggaacagcaacgagaattggaagaggaagaagaaaattcggatgaagatgagctggattcccacaccatggtgaagactagtgtggagagtgtgggcaccatgcgggccacaagcacgatgagtgaaggggcccagaccatgattgaacataatagcacgatgttggaatccgacttggggaccatggtgataaacagtgaggatgaggaagaagaagatggaactatgaaaagaaatgcaacctcaccacaagtacaaagaccatctttcatggactactttgataagcaagacttcaagaataagagtcacgaaaactgtaatcagaacatgcatgaacccttccctatgtccaaaaacgtttttcctgataactggaaagttcctcaagatggagactttgactttttgaaaaatctaagtttagaagaactacagatgcggttaaaagcactggaccccatgatggaacgggagatagaagaacttcgtcagagatacactgcgaaaagacagcccattctggatgcgatggatgcaaagaaaagaaggcagcaaaacttttgagtctaatttcctctctgtttttaactattctggagaccaagaaaccactaggaattgaaggaatatttggatatttttaatcctaagattttgccctacaattaggcagaggtcaaaaagtgacaatggtacatgcccaggtaaattcccaaaaggcagaattgacagttgtatctgctgtgcattcactctaagatgaggagaacaaaagaagtgtattctcttgttctgtcagctgcataccagtaataaaactgttatgaaatggattttcaaggtctctaaaccttgaaaatccaaagctattgttgcattgtacagcactgaagggctttatgttacaatattctttattcctatctagtatactaggctatttattgtatccccttaggtaaacttatttatttatgctattttgctttgtttcattttttaaggacaagatcaggatagctttggtgaaggtagggtcatattaatatgatgataatgtgcaaccaatttatactttctgcagggagctatggggtacattccttgatttccaggatagtttttcaaataggaaagcaataatggcagtagttctcaaatgggctaggccttttttatattgaagcaataattccatttttaccctttgaaattttgtttttttgatttttgatgtttggtacaaatagaactatatatatttaggtaaaatagatctatcgtgtttaaaaccaaagaaatcaatggaacccttgcacaaaaaagtgtgataaatatttttaaataaaaacttaatacaaatgtaatttgttaatattgtttcatgttttatgtgtagatctaatagctgaactgattcaaactgtaataagctcatcaatttcatttctatgaaaatgtgctctgttgtcacaggatgtttctgttgattttattcatttcctgggaattggtaaacatcatgttcctgatgataacccagtagcaaaaacatttgtactgagtggtacaagccttggggactgaaaaaaaaaagattaaaaccattaaaaagaaactcatttttacgctgaatgaacatttatatgattgcattgggaccagtcatttcctaagctacatatggccatcttgacagtgttttttcttt

SEQ ID NO: 4040 - DNA, 2522 bp, Homo sapiens
  source 1..2522: mol_type = genomic DNA
agagcgtctgcttgaaaatggatcctcacttcttcacttggatataataatatagactgccgacattctgggaactgatcagtcttccagcttccagtgtggtgccctccctcaattgtgctgagtgtcccccaatccagagatattctgtaatttcttcctcagaaagaaacaaaacaaaattctgatcttcccagatgaagataatggattctgaattaatgcatagtatagtaggaagctatcataaacctccagaaagagtatttgttccctcattcacccagaatgaaccatctcagaattgccatcctgcaaacttagaagttacctctcctaagatacttcatagcccaaatagccaagctcttattttagccttaaaaactcttcaggaaaaaattcatcgtttagagctggagagaacacaagctgaagataacctgaacattctttccagagaagcagcacagtataagaaggccttagagaatgaaacaaatgagagaaatctggcacaccaggagctgataaagcagaaaaaagatataagtatacagttaagctcagcccagtctcgttgtactcttctagagaagcaactagaatatacaaagagaatggttctcaacgtagagcgagaaaagaacatgatcctagaacaacaggcccagcttcagagggaaaaagaacaagatcagatgaagctgtatgcaaaacttgaaaagcttgatgtcttagaaaaagagtgtttcagacttacaacaactcagaaaactgctgaggacaagattaaacatttagaagaaaaacttaaggaagaagaacatcagcgtaagctatttcaagacaaagcttctgagcttcaaactggacttgaaatcagtaaaattataatgtcttcagtttcaaatctaaagcactccaaggaaaagaagaaatcttcaaagaaaactaaatgtataaagagacgaccaccttggcaaatttgttcaaagtttggagcactgccttttgtggctgaaaagatgaggcaacatcgtgacccacatatccttcagaaaccttttaacgtgactgagactagatgtctccccaagccttctagaacaacttcctggtgtaaagctattcctcctgactcagaaaagtccatttccatttgtgacaatttatctgaacttttgatggcaatgcaagatgagctggaccaaatgagcatggagcaccaagaactactgaaacaaatgaaggaaactgaaagtcattcagtctgtgacgacatagaatgtgaactagagtgtttactcaagaaaatggaaattaaaggagaacaaatctccaaactgaagaagcatcaagacagtgtctgtaaactgcagcaaaaagttcaaaactcaaagatgagtgaagcttcaggtattcagcaagaagacagctaccctaaaggatcaaagaacataaaaaatagccccagaaaatgtttgactgacactaacctttttcagaaaaacagcagctttcatccaatacgagttcataatcttcaaatgaaattgagaagagatgatatcatgtgggaacagtaacaaaacagcaaaactgtcaccttaatgaactttgtcagtgagaccttgaattgtctaaagtggttttaatttaatataactttgtgacattttgaatcatgtttctagtttctataaaacatgaagttgcagtatttaaaaattaatgcctaatgacctggtgggttccaaataataaattaattgcttttttatttttcttattgattgaagcccgtaacctcatcttgtcttagaaacattgttggctttgcagatatcttaagctaaatttaagaaattgtactagattgacaatattcaaaattgagttaaatccaagctacaagtaccattcattccacttttcatttagtaggtttggaaccttaaaaaccaatgttcaatgaacagagttcagaaagatcatttagctttcctggtgccttctttctattttgttttagagctgtgaaatgtttttctcttttggaaaaggaaaaacttaatagttacacagttttgtgaagaagcctttaatccaagttttatgagacagtaggaacctatagctacttaatttttaggagacagtaattcagttgcagaagctttcctctgctattcccattctcttttacaaaactagttttttttaaaaaatcaatgatcaattttatcttactactttataacttttgctgacttttattctttgcattgtatgtaatgtccatcagtataaattgagactgtgaatttctaggacccacaaaagtggtattttttttttgtacaagaaagtatagaggaagaggaagctgggcattaaattacctcatccagcagaaattcacggtagtatggtatatttttattttttatattttaaaatcaataatgtcaaatgtcattgtgtatgcatgctttataataaatttacacttgatcatt

SEQ ID NO: 4041 - DNA, 5033 bp, Homo sapiens
  source 1..5033: mol_type = genomic DNA
ttgttctttcctggccttgtggagtttcacgttttttattcagttaaagattcaaggtactcctaagcagatttctgaagctctttttccatgtaattccctcctctccagaattctgccctacaaattccaaccgacttggcctaccccaatttcgtcaactccaatctctgtcttttcaacccaggagatcctaggtttccatatgatttcctttcatcgcaccacagactggaaatcgcctctgggcaaaagggcaggatgatatacggctccttttatttcttttctctcaggaaacactgacgggaacacacgtgccggtgctaccctccagtgactggactagatccttgcgcaacttcaacccgcgctagctccgcctacggccggccacgccccgtcttctcaccggcgcgcctccctcttgttcgtcctccctccccctgtggactgcggcgctggcgttccgcgcacgccggctcactgcgcctgcccggcgtgtggacgccacacgctcccggaagtgggaggtggccgctggagtttgtgtggccgccgccgcgggaacgcgagcccggtaatttttcaacggagaaaggcgaggctttcgggctctgcagagtgagagttagcaagtgtccggctccagcaactctcctctggcgtgacagccggcatggaggatccacagagtaaagagcctgccggcgaggccgtggctctcgcgctgctggagtcgccgcggccggagggcggggaggagccgccgcgtcccagtcccgaggaaactcaacagtgtaaatttgatggccaggagacaaaaggatccaagttcattacctccagtgcgagtgacttcagtgacccggtttacaaagagattgccattacgaatggctgtattaatagaatgagtaaggaagaactcagagctaagctttcagaattcaagcttgaaactagaggagtaaaggatgttctaaagaagagactgaaaaactattataagaagcagaagctgatgctgaaagagagcaattttgctgacagttattatgactacatttgtattattgactttgaagccacttgtgaagaaggaaacccacctgagtttgtacatgaaataattgaatttccggttgttttactgaatacgcatactttagaaatagaagacacgtttcagcagtatgtaagaccagagattaacacacagctgtctgatttctgcatcagtctaactggaattactcaggatcaggtagacagagctgataccttccctcaggtactaaaaaaagtaattgactggatgaaattgaaggaattaggaacaaagtataaatactcacttttaacagatggttcttgggatatgagtaagttcttgaacattcagtgtcaactcagcaggctcaaataccctccttttgcgaaaaagtggatcaatattcggaagtcatatggaaatttttacaaggttcctagaagccaaaccaaactgacaataatgcttgaaaaattaggaatggattatgatgggcggcctcactgtggtcttgatgactctaagaatatcgcccgaatagcagttcgaatgcttcaggatgggtgtgaactccgaatcaacgagaaaatgcatgcaggacagctaatgagtgtgtcctcttccttaccaatagagggcactccaccaccacaaatgccacattttagaaagtaacaacagttttgtgtgtggatcattccaattgaagttgctatgaagaggtagcagatgaatctcattgaattagtcctgtagtgcaaactttaagcaccttaaaacatttaaaatcttattacaggtgatagagatagatacatgtatgtgaacagattttgtaggaaggcatactgaattctttgtcaccagcacttttgatatgaacagtattcgttacatagtaacagttcctgcttacaactgaattttataatttaaggtgttcaagatatattctttttggttttaaaatgcaaaatcttattggctgttctgttgaatgtcatatcttactggtgtttaaatatgtaatgtgtttctttattaacatcactagatgaaaccatatcttaaaatgcagaaatgattggaaggtagatcttatctagcctttggatttcaagaatatcatagtccttttgattttcaaagtttatatgtgaagttcaccatgtatgtggtgaatttcgtaaggtacttggtatacatatctgcctatgtttcttttcaactcataattggaagaattatgatggattatagggtttggttaaaaatccagttactgaaggaattaatgaaaacgtagaagaaagtactaaaaggaatatcataagggctgtagctcaaacttcataatacataaatcactggggtctttttggatttggttgtttgattcgccttccttttttgacatatgtatgccttaattcttaaatctgagggaccatgctttgaaatagactgaaaattaagggtcaccacctaattttactttgtattcagtatcgtaagtgaggttaataaagtcaatactttctaccatatattacgtttttgttattaaaaaacttcattggccactagtgaagttagtcaataaaagacttgtttttctgattttacatagtaaatggctgctaagtattgagtaattcttaactaattctaaaaactaaaatgtgcatttcgacttgataaggtaaaactcttatctagaggctaaacccatgtattttcagaattgaatttttctccttgtagctttcagggaacaatttcattgacattgcttgcttcctgccttttaccttttaataaaaattgtgatgctactttattctaaagatttatattttataaccagatgaatttcctcaaaggtttccaaacctatatcatatagggtgaaaagcaggaaagtagacatttttcttggcgtgggaattctctacatagggcagtagatttcttaagccaatgaatttctgcttttcagcagtagtcatataatcagtatcataaagaataatgtgtaaataacagaaggcatatgagagtgtggtgttcctagatgaactgttacagattatagtaaaataaggaaatctaagtgctttaagtttatacagttaactcttaggataagagggatgtatgctgagatgtttgtgcatcccagatagcactgtacaataacctgtaaagtattactgaatactgaatagctgaaactgcaattggaaaatctgatgatgacgaggaaatattacgtttccagtttttttagctctatctgctaatttctttgcctgttttcactttcgccaagtaccaacaagctcatgttgtatttctttttaagaacttcaacattataagctctcagtaccctattttgttgttgttgttgtttgagacagagtttttgctcgtctgccaggatggagtgcagtggtgcgatcttggctcactgcaacctccgcctcctgggctcaggtgatcctcttgcctcagcctcctgagtagctcagattacaggcgcgtgccaccacacccgcctaatttttgtatttttggtagaggcggggtttcaccatgttggtcaggctggtcttgaactcctgacctcaagtgatttgcccaccttgacctcctacagacgtgagccactgcgctcagccatagattttactgtcttaacccattttaattcctctgttgagtctctgtcctcccctccaatttgatttgggattttgctgatgagatgatactaaacattgagagtactgctttttactctgacttttattgtgttgtctttgaaagacaaatagtacaactttttacaaggaaacacgtaagagatggatgtccatgaaaacaatattagtatattctattattgtttcttattaatagttacttagtatttacaaacaatttattattagctgtgttaacttttattctatgcttcatatgctctgacattgacatagtggatttctgctgatttttttcaaatccgcaatctttataaccaactgaagtatataatagagcattacattttatctttatttgtgttctgttggatcaagtatttaacatttgctctgaaaaaaatgtttttgtgatgtgtctttgttgccttgagatagatccatttatcctgcctcctagggagaagtttctgcctggattgaaacaaaaaaacacaggcgtcacaagcatgttacctattaagagagagagggtatctctgaagactaattaaaatggtaatttttaaaaagatgtgaccagttgacttttagtatatcatcccaagtattatccccaaaatgataatgcaaaacagaataatttggagaccaggagaaaaactggtatgattactggggaggggaagaagcacaggtggtcaagataataatgcatgtttggcctcagctgtagttgccaaagaaactacctgcctcacagatgagcacgcacgggtgcattgtcaaagtctgagaaggatgtattgtactttgaaggaagactttccatttctaagctaccatggagaagtatatgctcctcgagaccagagactgtgacttctgcatctttgattccagcgacatatgataaaatgttttgcacatagttgaatccagcgttgatacatgaaggacagcattacatcttttttctattatacttagaaatttcctctttgttctgcaccaccaacctgtatatcaagcctccttgccccacaaagcttccaaagcccgtaaatttgttaatctagagcaggggtcagcaaactaccacccatgggccaaatctggctgctgcctatttttgtatggcctacaaactatggtttttatattcccttttgttaatggctcaaaataatattttgtataatacgaaaattacgaaattttagtttctctaaataaagttttggaaagaa

SEQ ID NO: 4042 - DNA, 1373 bp, Homo sapiens
  source 1..1373: mol_type = genomic DNA
gctgctggggctcggcggggccgtgtctggtctgcaaggcgcgcgggctcgtggggggttggctggggagcccacgctgcctggcgactcgggccaccgaatgtgagaccgagtccctttatgtcaccagcgcacacgctgatttgaaccctgcttcgacgtgtgtgtcatggcttaaaaatagctgctaatctgtcaacctgtcttgggcagaaacagcggcggcgacagcagcaggagcgtcatggccgtggcgctgtctgcgccggcgatccgcctttcggactgaggcccagcgcagcgcttgcaaagagagccaaagagctgagcaaaaggagctgctgcagcttgaagaaaaagccacccctgaaggctcctgccagagccaggcttaccttctctccctcgagaatcttctcccgaaggaccagcccagggaagggaagcagctgctctggactcactcaagtgtgtctcacaccccttcctcttccagcagcagctacctggcaactgaacccatcatcaccacagccactcctgcagctgccacggtttctgccacctctaagatgtgccctggtaactggctttgggcttctatgacttttatggcccgcttctcccggagtagctcaaggtctcctgttcgaactcgagggaccctggaggagatgccaaccgttcaacatcctttcctcaatgtcttcgagttggagcggctcctctacacaggcaagacagcctgtaaccatgccgacgaggtctggccaggcctctatctcggagaccaggacatggctaacaaccgccgggagcttcgccgcctgggcatcacgcacgtcctcaatgcctcacacagccggtggcgaggcacgcccgaggcctatgaggggctgggcatccgctacctgggtgttgaggcccacgactcgccagcctttgacatgagcatccacttccagacggctgccgacttcatccaccgggcgctgagccagccaggagggaagatcctggtgcattgtgctgtgggcgtgagccgatccgccaccctggtactggcctacctcatgctgtaccaccaccttaccctcgtggaggccatcaagaaagtcaaagaccaccgaggcatcatccccaaccggggcttcctgaggcagctcctggccctggaccgcaggctgcggcagggtctggaagcatgaggggagggggagagaggtcaggccaggcccgtgggtaggtccctggctcccagctggagataggaggcccaggtggcaggtagcaggaggcccagatcacccatcctcccctggggtcaggagaggccgagccccaggccactgtcactctttgtgggaggggac

SEQ ID NO: 4043 - DNA, 1491 bp, Homo sapiens
  source 1..1491: mol_type = genomic DNA
ctctccccccgggctccgcccaccccacgccgggaacccacgcgggccactacaagcccgccctttcctacgtctggtccagtcggtcttcctccggcccgggccctggcccagctagccggccatggaagtgaagaaaatatttggaagctctgtgaatacatcaaaaaccatgaccagtatcctttagaagaatgttatgctgtcttcatatctaatgagaggaagatgatacctatctggaaacaacaggcgagacctggagatggacctgtgatctgggattaccatgttgttttgcttcatgtttcaagtggaggacagaacttcatttatgatctcgatactgtcttgccatttccctgcctctttgacacttatgtagaagatgcctttaagtctgatgatgacattcacccacagtttaggaggaaatttagagtgatccgtgcagattcatatttgaagaactttgcttctgaccgatctcacatgaaagactccagtgggaattggagagagcctccgccgccatatccctgcattgagactggagattccaaaatgaacctgaacgatttcatcagtatggatcccaaggtaggatggggcgccgtctacacactatccgaatttacacatcggtttggcagtaaaaactgctgaacttggtctcaagatgtggaactgtggagaaattctaggacatgaacaagctatcctttcatcgaggacagcaaacattatggtacagttggcttggaattatgtctttctcttttaatttgattgagtggaaatctgagtgaatacaaatataaatgaacaacataaaaacttttgttttgacatgtcaaattgaaacttgataaagtgcgtacttgctaagatattcctgtggctcatgcgttacaacacgaggacttaagccagtaatcgtttttgttcagatagaggtgtggaggtagagccagcccctcatgtctgttttggatgttttgtgtctctccagctacattgtaagttccttgagggcagggccatggcccattgctctgtgaatctcaaatgcccataaaaggtgcccataaaatgttttcttgaacatttgaatgtgctgttgtctggaaaggggtaatattgtgagctgaatcagcaataagtattagtctttttggactatggtattgttaaaaagactgcagccctctcagacttgagcgttaattggcttatttatttatggctttaaataaaatcgatttaacgttagttttgttttgaagatttttgtgtcacccttgatgatctgaaatacctaaatatgcctcaattgtagatgagaaccagggctttaaaaaatatttattacatgtgccttctggaagacatcttggttatttggctttaatcatatcattccaaatgaaagatatttggcattacattggcatatagtaccagctctcatgttttcatgattctacttta

SEQ ID NO: 4044 - DNA, 575 bp, Homo sapiens
  source 1..575: mol_type = genomic DNA
agtgtcaggctctgggagagaggaagtgatcgctcccggaggagcgcgagccgagcggccggcgcagcgtgagacagcacatcctgcccgcgccggccccgccaccttcgggagccgcctgcaccaacgctgccgccgcccaggagccgccgccggctcggggagcccagttccgccgctgccgagcgcgtccagtctcactctgccacccaggctagagtgcagtgcatgattataactcattgtaaccgtgaattcttggcgtcaagctgtcctcccgcctcagcctcccaaagcactggggttacaggaaaccaacatgtctgacaaaagtgacttaaaagctgagctagagcgcaaaaagcagcgcttagcacagataagagaagagaagaaacggaaggaagaggagaggaaaaagaaagaggctgatatgcagcagaagaaagaacccgttcaggacgactctgatctggatcgcaaacgacgagagacagaggctttgctgcaaagcattggtatctcaccggagccgcctctagtcccaacccctatgtctccctcctcgaaatcag

SEQ ID NO: 4045 - DNA, 819 bp, Homo sapiens
  source 1..819: mol_type = genomic DNA
ggggccaccgcgacgttgcctgtgggtgcccgcgaaccaacggttagcggtggcaggggctgactgagagcgtctgcttgtgcctggtacctagtacaaacttaataaatgtgtgacgcaagaataaaggaatgaatgaatggaagaatgatataatgccacagaactttcaaagatgggactgtctagttgcaaaaacaagctcagggatcccactgattctactttacgataatggattctgaattaatgcatagtatagtaggaagctatcataaacctccagaaagagtatttgttccctcattcacccagaatgaaccatctcagaattgccatcctgcaaacttagaagttacctctcctaagatacttcatagcccaaatagccaagctcttattttagccttaaaaactcttcaggaaaaaattcatcgtttagagctggagagaacacaagctgaagataacctgaacattctttccagagaagcagcacagtataagaaggccttagagaatgaaacaaatgagagaaatctggcacaccaggagctgataaagcagaaaaaagatataagtatacagttaagctcagcccagtctcgttgtactcttctagagaagcaactagaatatacaaagagaatggttctcaacgtagagcgagaaaagaacatgatcctagaacaacaggcccagcttcagagggaaaaagaacaagatcagatgaagctgtatgcaaaacttgaaaagcttgatgtcttagaaaaagagtgtttcagacttacaacaactcagaaaactgctgaggacaag

SEQ ID NO: 4046 - DNA, 1966 bp, Homo sapiens
  source 1..1966: mol_type = genomic DNA
ctgcctccgactccccactggactgcatggcgacggcgtgtggtggggcagtcagctaagccatttgcctaaggggctgtcgggcatctgcgtgctggggaccgacagtgtgggtgtgttaggaggatctgtatggagcacattgctgcctctggctaggacagggtggaaagggtggcgtggctacagcctgacccatgggcaccgtcctaccctttgttctgtgcttccgagtgtcagtcatgtgctggggtctgtgggcccatgactcagacggtgagctctgaccttcctgagccagggctttgctgtagttgtgcctggctcaggagctctaggacaaggggaccgctccaggtctgcatctacggtgtggcagggcccctcggcactcttgtgcactagtgtcatctttcccattgaaatgactgtgaggaccagaatgtgcacatgcagatgggcagctacttgtctgccttggccctttattacacaacttgctgggggtggagatgccaccccccggcagtcagagcccctttatgatgtcatggggctggttacatgactgccaaggggtgctgctggccacactgcactagcaagtttgccagatggaggacaagcgatcattgagtatggctcgctgtgaagaaagaaattcgagaggacaggatcatggcttggaaagggtgcctttccctccccagttgcagtcagagacctaccttcacccagcagatccttcccctgcctgggacgacccggggtccactgggagccctaacttgaggctgctgacagaagaaatcgctttccaacctctggccgaggaagcttcgttcagaaggccgcaccctgacggtgacgtcccgccccagggagaagataatctcctctccctcccctttccacagaaactgtggagactggtcagcagcaaccagttttcgtccatctggtgggatgacagtggggcttgtagagtgatcaatcaaaaactctttgaaaaggagattctcaaaagggacgtcgcacacaaagtgtttgccacaacttcgataaagagcttcttccgccagctaaacttgtatggcttccgaaaacggcgtcaatgcactttcaggaccttcacccgcattttctccgcaaaaaggctggtctccatcttgaataagttagagttctactgccatccttactttcaaagagactcccctcacctcctcgtgaggatgaagagaagagtgggtgtcaagtctgcaccaagacatcaggaggaggacaagccagaagctgctggatcctgtctggcaccagcagacactgagcaacaagatcacacgtctccgaatgagaatgaccaggtcacaccgcaacaccgggaaccggccggtcccaacacccaaatcaggagtggctctgctccaccagcaactcctgtgatggtgcctgattccgccgtggcgagtgacaacagtccagtgacccagccggccggcgagtggtcagagggcagccaggctcacgtcactccggtggccgctgtccctgggcctgcagcgctgcccttcctctatgtccctggatctcccactcagatgaattcttacgggcctgtggtggcccttcccacagcgtcccgtagtacccttgccatggacaccacaggacttcctgcacctggcatgctgcccttttgccatctctgggtaccggtgaccctagtggctgctggggctgcacagcctgctgcctccatggtcatgttcccccatctcccagctctgcaccaccattgcccccacagccaccgcacgtcacagtacatgccagctagcgatgggccccaggcgtacccagactacgcagaccagagcacatagagggcagcatttgggcagaatatgtgctggtcaataaatgtgtcagaaaatgagtaattttctgactgcacaaaaaagtc

SEQ ID NO: 4047 - DNA, 2950 bp, Homo sapiens
  source 1..2950: mol_type = genomic DNA
ggtgttggggggcggggcgagcggctgcctcgcggattcgcgcgggtggtgagagtggccagcgagggcagcgttcgccgcccctcaggccccgtcccggcgccgcagccgcctgcgtttcggtttgtgagcaggcccggccgggccaggagcgagagcgagactctggagcggtcgccgccgcagtcgcccgggccgggaaaggcgggcgatgcccccaaccgccgctcgggccatgtccgaggggcgcgcgtgttgtcgccgccggggcgccgtgcccgcctgtcgtcccccgggcccagccgctcgtccgaggcccgcgaggagctgcgccgccacctcgtgggcctcatcgagcgcagccgggtggtgatcttcagcaagagctactgtccccatagtactcgggtgaaagaactcttttcttctttgggagtcgaatgtaatgtcttggaacttgatcaagttgatgatggggccagggttcaagaagtgctgtcagaaatcactaatcagaaaactgtgcccaatattttcgtgaataaagtgcatgtaggtggatgtgaccaaactttccaggcatatcagagtggtttgttacagaagctccttcaggaagatttggcatatgattatgatctcatcatcatcggtggtggttctggaggcctttcatgtgcgaaggaagctgccattttgggaaagaaagttatggtgctagactttgttgtcccgtcacctcagggcacatcctggggtcttggtggcacttgtgtaaatgtaggttgtattcctaagaaattgatgcatcaggctgcccttttggggcaggcattatgtgactcaaggaaatttggctgggaatataatcaacaagtgaggcacaactgggagacaatgacaaaagcgattcagaaccacatcagctctctaaactggggctacaggttgtctctgagggaaaaggctgtggcctatgtcaattcctatggagaatttgttgaacatcataaaataaaggcaaccaataaaaaaggacaggagacttattatactgctgcacagtttgtcatagcaacgggtgaaaggccacggtatttaggaatccaaggagataaagaatactgtattactagtgatgaccttttttctctgccttattgccctggcaaaacattagtggtgggtgcctcttatgttgccctggagtgtgcagggtttctggctggctttggcctagatgtcacagttatggtacgctcaatccttctccgtggcttcgaccaagaaatggcagaaaaagtgggttcctacatggagcagcatggtgtgaagttcctacggaaattcatacctgtgatggttcaacagttggagaaaggttcacctggaaagctgaaagtgttggctaaatccactgaaggaacagaaacaattgaaggagtctataacacagttttgttagctattggtcgtgactcctgtacaaggaaaataggcttggagaagattggtgtcaaaattaatgagaagagtggaaaaatacctgtaaatgatgtggaacagaccaatgtgccatatgtctatgctgttggtgatattttggaggataagccagagctcactcctgtcgccatacagtcaggcaagctgctagctcagagactttttggggcctctttagaaaagtgtgattatattaatgttccgactacagtgtttactcctctggagtatggttgctgtggattatctgaagagaaagctattgaagtatataaaaaagagaatctagaaatatatcatactttgttctggcctcttgaatggacagtagctggcagagagaacaacacttgttatgcaaagataatctgcaataaattcgaccatgatcgggtgataggatttcatattcttggaccaaacgccggtgaggttacccaaggatttgcagctgcaatgaaatgtgggctcacaaaacagctacttgatgacaccattggaattcaccccacatgtggggaggtgttcacgactttggaaatcacaaagtcgtcaggactagacatcactcagaaaggctgctgaggctaggcctgctgctgtttagttctccttgtcatattctcatttctctcaaagataagaatgctctcggataaaatgagcctgtgctcatgacagctgctctgttactcagggaccagtgcagggctgtcttacgacacttagatgagaaagtagacaaggaaagaggacagcagtgggcatctgccttgtggtcttgctgacagcgagaagcagtgggactgcttccttgacgccttagcttggagccccgttatgaggtgagccaaggctgactctcgcaagccaggactgagcttccctcggaaagacctttgagtggcaccattcacctaagttagcttttctggtcgctattgtttttatcccctttgctttgttgtttctgtgaaaatatattttcagttaagaaatgctataaagtagtggttttctagtgcgtgggcctagaattcacacatgctcactggtgaacagtgtctgtgggctgctgtgggctgcatttggatagctgtctgcattagcaggaagctgtacacactgtgtagggttagtcatctcttttcttttttgaggcacatttaacctactgtcaaaacgctgactcatgcttcaccctcacactcactacttggtggtgataaccttgaagctattctcccctaattaatatctcgagactgagcaaaatatctcatgtaagataaaagtacttgaattgctttttcatgttcatcttaatagtattatttccaaaagtttttaatactgtattatgtgaaatctaactaatttatctgtgaaataattccatcacagtctgtttaatgatgataaagttccataaatgaatacaggt

SEQ ID NO: 4048 - DNA, 949 bp, Homo sapiens
  source 1..949: mol_type = genomic DNA
ggccgttgttggtcgagctggcgggtcccgcgggccaggccgtggaggctttggtgtcaggatgatgctggcttcataaaatgagttacggaggattccttctttttatattgattggaatagtttcagaaggaatggtaccagctcctctttgtacctctggtagaattcggctgtgaatccgtctggtcctggactttttttgagctcctgaaggaagcactaaacatggaaaggaacaaccggtaccagccactgcaaaaacatgccaaattgtaaagaccatcgatgttaggaagaaactgcctcaactaatgagcaaaataaccagctaacatcgtaatgacaggatcaaattcacacataacgatattaaccttaaaggtgttacctcattttgaaagtcttgggaaacaggaaaaaattcctaacaaaatgtcagcttttcgaaatcattgtccacatttggattcagttggtgaaataacaaaagaagatttgatacaaaaatcccttggtacttgtcaggattgtaaagtccaaggaccaaatctttgggcatgtctggagaatagatgttcatatgttggctgtggtgaatcacaagtagatcacagcaccatacattctcaggagacaaagcattatctaactgtgaaccttaccactcttcgagtatggtgttatgcttgcagcaaagaagtatttttggataggaaattaggaactcagccttcattgcctcatgtaagacaacctcaccaaatacaagaaaacagtgtccaggattttaaaatacccagtaatacaacattaaaaactcctctggttgccgtatttgatgatctggatatagaagcggatgaagaagatgaacttagggccagaggtcttacaggtttgaaaaatattggaaatacttgttacatgaatgcagctttgcaggctc

SEQ ID NO: 4049 - DNA, 4014 bp, Homo sapiens
  source 1..4014: mol_type = genomic DNA
caaacactaacgatggcggcgccgggaagcgaccggctgctgggcttaaggcgggagtgaccgcttaaccagtgagggaagcactgaagagcgccagtcgacgtgggtgcgacaactcgcggagtcttaggagcaaaacgtctggggcctgcgagccaggacccttctgaagccttaggtgtctatcggcgacgtgtacggtcactgcagctccggagcgcggaaccctcagccaggaggcgcggctggtcggtcccaggtcccggcctccgtaatgagagcccggaaccactctttgtgccgcagcttcgcagcatcttggactcaagtgattctcctgcctcagcctcctgagtagctgggactacagattcctataggcaatggaaactgatctcaattcccaggacagaaaggacctggacaagtttattaaattttttgccctcaagactgtccaagtgattgtccaggctcggcttggtgaaaagatttgcactcgttcatcatcttctccaacgggttcagattggttcaacttagcaatcaaagacatcccagaggttacacatgaagcaaagaaggcactggcaggacagctgcctgcagtcgggaggtccatgtgtgtggagatttcacttaagacttctgagggagattccatggagctggaaatatggtgtcttgaaatgaatgaaaagtgtgataaagaaatcaaagtttcctacacggtgtacaacagactgtcattgctgctgaagtcccttcttgctataactagggtgacaccagcctataggctctccaggaaacaagggcatgaatatgtcatattatacaggatatattttggagaagttcagctgagtggcttaggagaaggcttccagacagttcgtgttgggacagtgggcacccctgtgggcaccatcactctttcttgtgcttacagaattaacttggcattcatgtctaccaggcaatttgagaggaccccacctatcatggggattattattgatcactttgtggaccgtccctatcccagctcctctcccatgcacccctgcaattacagaactgctggtgaggacactggagtaatatacccgtctgtagaagactctcaagaagtgtgtaccacctctttttccacctccccaccatcccagctgatggttcctgggaaggaaggtggggtaccccttgctcccaaccagcctgtccatggtacccaggctgaccaggagagactggcaacctgcaccccttctgacagaacccactgtgctgccacaccctccagtagtgaggatactgaaaccgtatcaaacagcagtgagggacgggcctcccctcacgatgtcttggagaccatctttgtccgaaaagtgggggcttttgtcaacaaacccattaaccaggtgaccctgacgagtttggatataccctttgccatgtttgctcccaagaatttggagctggaggataccgatccaatggtgaatcctccagattccccagagactgaatctcctctccagggcagcctgcactcagatggctccagcgggggcagcagtggcaatacccatgatgactttgttatgatagactttaaaccagctttttctaaagatgacattcttccgatggacctggggaccttctatcgggagtttcagaacccacctcagctgagcagcctctccatagatattggagcacagtccatggctgaagacttggactcattaccagagaagctggctgtgcatgagaagaatgtccgcgagtttgatgcctttgtggaaaccctgcagtaaaagtatccttgagtcccagcagcaccccctttttgtggccccagggcataagcagcctcccatgcatcagctgctcccacccctcatcctgctctgagccaggtggaagggaggctggcttctcccatggggacccagaagtccctactcttggacctcctggagactccgtggcggcagtcaagcccagtgcccagttggagaagactcacgtgctggccttggagatgggaagaaccttcgtacgaaaaagccctcagcagggccatctgtgtgccctgcccatcaccaactgcttcccaagggtgtcatcctgttcctcctgctgccggcctcctgcctgggcctgccttgcagctggccccttccctgcctgctgtcaccatccactgtttgacattccagctggtggccaagagattggtgtggagtcgcagaaagaggaaggagacagtgccaggaggaagaaggaaggagtcccttagctctcttcattgtcccctttacttcctgctatcttcttctcctcttcttctctctcttgcctctatgcctgtatttctggcaatatgacaggcctgcctacccaagatcagaactccaaaaccactcccacccctgaaggtcgggagggtctgagcagccctggtggctgcctgtgctcaggtcctcagctccatgggaaataaaaatggcaccctgaatctctaggattttgtcacttggagtcacagcaaagttctcttcctcttgtccccccgttgctgctccttggttatagaacatggtaaatatttattactttcagagaaaccagatattttatagaggaaatatgtttgaggtgagttgtttttcacttggagaaggcggagggctcttcctgggacggagacctcctcctccggaggttattgagaatccgggctgctgctttgaggatcttcccaccatacagacagcgagatccaagaagagggctggccgggggcaaagtcacctcccagtgtggctgcactggaactgactaaaggctttaccttggatagttgcgtattcctggtgagagccttacatctcccacagtttctgcagagtgactgactccattctggcagcccaggaagtcctgggtgctaaatgtgatggccacatgtagtggttaggggatgttgtgtgtgtcccccaactgcctgggtacttgttcctgatccctggggctgtcctgtggagcttttcctcctgcttgggcctagctaccatctccctctaatcccaggttctctacactgccctggggtttaccagctggattggcttctggttgagaaatcaaagctgggcgtatgattgacttaacccttcaggtattgttacttgaataagtcaagtgcctagcctcacccacctatgatctgtcctttcccagcctcgctggtagtcctggtcaaggagatctaggtctactccattcctcctggcccacctggggcattcactggcagcagctgtgcttcagtggagcaggtggttctcagctgcttgttagtatactgcatgtgacactgttcccacatacaaggctgacttctgaggattggagcaggctctggcggggaccagagctctgcgtgctgctgctgccaccaagaagtgttagcagaagcagtagcagccaactggccctcctgactttggcccagagcacatgcgtggcttgctgaacccaggctcaggtttatccccaaggccccagctttgagaagggggaaggcccctggtaagttattgatgcccccatatttcagctactgctctctttccaaggccttgcatggaaaggcctagccattgtctgaggcagcaatctttggcatctacaggtggcagcagcctttcaccagggctccatctgtgaagagtctcagccatgactttgagctgagcttgggagaagtaaagcaactgttaaggccagcccttgcccctcagacctgccatgaaaggaatgagccctagactgactcctgcagcacccccgggacaggctgggaccagctgtttgtctccaggtgtcagagtccctcctcctcctccaacctctccaacctactttgtttggaaataccgagctacacttcaaaatgtattcaagggatttccaataaatttttttctgtactttaca

SEQ ID NO: 4050 - DNA, 915 bp, Homo sapiens
  source 1..915: mol_type = genomic DNA
acatctctgccttctcattttctcttaatttttttctttttttggcttcttggtattctttgctttcttggagctcgtcacacatttaggaggatttttgtcttttctggaatttttagttgttttttggtgggagggtctgtcagtgcatctagtcctccacactatggaagcagaagttggtttaaattcactttaaaaattgccttctgttttatcaattctgcctaaaggtttgttggagactgaaccgttgcaaggaacagacgaagatgcagtagccagtgctgacttctctagcatgctctctgaggaggaaaaggaagagttaaaagcagagttagttcagctagaagacgaaattacaacactacgacaagttttgtcagcgaaagaaaggcatctagttgagataaaacaaaaactcggcatgaacctgatgaatgaattaaaacagaacttcagcaaaagctggcatgacatgcagactaccactgcctacaagaaaacacatgaaaccctgagtcacgcagggcaaaaggcaactgcagctttcagcaacgttggaacggccatcagcaagaagttcggagacatgagacgaaagtaggcggtacgaaccctaatggaggcagttttgaggaggtcctcagctccacggcccatgccagtgcccagagcttggcaggaggctcccggcggaccaaggaggaggagctgcagtgctaagtccagccagcgtgcagctgcatccagaaaccggccactacccagcccatctctgcctgtgcttatccagataagaagaccaaaatcccgctgggaaaaacccaggccttgacattgttattcaaatggcccctccagaaagtttaatgatttccatttgtatttgtgttgatgatggaccacttg

SEQ ID NO: 4051 - DNA, 580 bp, Homo sapiens
  source 1..580: mol_type = genomic DNA
atttgtggcaggtggggcaggctggtcacctggagcaggttcctcctctcccggccccgccccggcccggccccgccgagcgtcccacccgcccgcgggagacctggcgccccggccgaggcgcgaacagacggacgcaccggcgagcgccgaggggacaggccgagcgcggggcgccggaggcaggtgtgggacaggcactggcctcagaccggggccacactgaggtctgcccttctcccgctggccgccacccaagacaccatgagccagtccggggccgtgagctgctgcccgggtgccaccaatggcagcctgggccggtccgacggtgtggccaagatgagccccaaggacctgtttgagcagaggaagaagtattccaactccaacgtcatcatgcacgagacctcgcagtaccacgtccagcacctggccacattcatcatggacaagagcgaagccatcacgtctgtggacgacgccatccggaagctggtgcagctgagctccaaggagaagatctggacccaggagatgctgctgcaggtgaacgaccagtcgctgcggctgctggaca

SEQ ID NO: 4052 - DNA, 389 bp, Homo sapiens
  source 1..389: mol_type = genomic DNA
gaagtggccagttcaggaggcggaccccccgagggcagcgctgcggggccgttttccggccctcctgacgcgacactgcccctctccgagagctgagaaggaaaagaggagcttgcggaggtgttacctcattttgaaagtcttgggaaacaggaaaaaattcctaacaaaatgtcagcttttcgaaatcattgtccacatttggattcagttggtgaaataacaaaagaagatttgatacaaaaatcccttggtacttgtcaggattgtaaagtccaaggaccaaatctttgggcatgtctggagaatagatgttcatatgttggctgtggtgaatcacaagtagatcacagcaccatacattctcaggagacaaagcattatctaac

SEQ ID NO: 4053 - DNA, 628 bp, Homo sapiens
  source 1..628: mol_type = genomic DNA
tgcaggtcgggtggcaccagctgctgtcctgaggctgcactggagccgcccgcaggggcttctgccgggctcaggccttctctccagctcgaggctcagtttggcccaggctttgcctgctgggcgtgagccctaatagcccatatggggacgtgattggcctccaggtggactactggctgggccaccccggggagcggaggagggaaggcgacaagagggacgccagctcgaagaacaccctcaagagtgtcttccgctcagtgcaggtgtcccgcctgccccatagtggggaggcccagctttctggcaccatggccatgactgtggtcaccaaagaaaagaacaagaaagttcccaccatcttcctgagcaagaaaccccgagaaaaggaggtggattctaagagccaggtcattgaaggcatcagccgcctcatctgctcagccaagcagcagcagactatgctgagagtgtccatcgatggggtcgagtggagtgacatcaagttcttccagctggcagcccagtggcccacccatgtcaagcactttccagtgggactcttcagtggcagcaaggccacctgaggccctgtctcccagccactttccctcctggcactgcc

SEQ ID NO: 4054 - DNA, 2771 bp, Homo sapiens
  source 1..2771: mol_type = genomic DNA
tttgggcgcttcgctgatggtgtcggtgagcgcgtttcccgcctgagcgcaactagcggcgggtcgtgggcacctccaggagagcttgtttcatatccatatcccactgtattcctgctaatctgctaatgcagtaaattggaggaaaactgttaccaggataacctgtaatgggcaaggagccacaaagaagaaaacatttcttttaatttttaaacttggtttgaaagaccagcatgttttggaaatttgatcttcactcatcatcccacatagacacacttctagaaagagaagatgtaacactgaaggagttaatggatgaggaagatgttttacaggaatgtaaagctcagaaccgcaaacttatagagtttctgttaaaagcagaatgtctcgaagatttagtctcattcattatagaagaaccacctcaagacatggatgaaaagatcagatacaagtatccaaatatatcttgtgagttgctcacttctgatgtctcccagatgaatgatagactgggagaagatgaatccttgctaatgaaattatatagcttcctcctaaacgattcccctttgaatccactacttgccagtttcttcagcaaggtgctaagtattcttatcagcagaaaaccagaacagattgtggatttcttaaagaagaagcatgattttgtagaccttattataaagcacataggaacttctgctatcatggatttgttgctcaggctcctgacgtgtatcgaacctccacagcccaggcaagatgtgctgaattggttaaatgaggagaaaattatccagaggcttgtggaaatagttcatccatcgcaagaagaagatcgacattcaaatgcatcacaatcactttgtgaaattgttcgcctgagcagagaccagatgttacaaattcagaacagtacagagcccgaccccctgcttgccactctagaaaagcaagaaattatagagcagcttctatcaaatattttccacaaggagaaaaatgagtcagccatagtcagtgcaatccagatattgctgactttacttgagacacgacgaccaacatttgaaggccatatagagatctgcccaccaggcatgagccattcagcttgttcagtaaacaagagtgttctagaagccatcagaggaagacttggatcttttcatgaactcctgctggagccacccaagaaaagtgtgatgaagaccacatggggtgtgctggatcctcctgtggggaatacccggttgaatgtcattaggttgatatccagcctgcttcaaaccaataccagcagtataaatggggaccttatggagctgaatagcattggagtcatattgaacatgttcttcaagtatacatggaataactttttgcatacacaagtggaaatttgtattgcactgattcttgcaagtccttttgaaaacacagaaaatgccacaattaccgatcaagactccactggtgataatttgttattaaaacatcttttccaaaaatgtcaattaatagaacgaatacttgaagcctgggaaatgaatgagaagaaacaggctgagggaggaagacggcatggttacatgggacacctaacgaggatagctaactgtatcgtgcacagcactgacaagggccccaacagtgcattagtgcagcagcttatcaaagatcttcccgacgaagtcagggaacgatgggagacgttctgcacaagctccttaggagaaactaacaagaggaacacggtagatctagccttttctgattatcagatgcaacaaatgacgtccaattttattgaccagtttggcttcaacgatgagaagtttgcagatcaagatgacattggcaatgtttcttttgatcgagtatcagacatcaactttactctcaatacaaatgaaagtggaaatattgccttgtttgaagcatgttgtaaggaaagaatacaacagtttgatgatggtggctctgatgaggaagatatatgggaggaaaagcacatcgcattcacaccagaatcccaaagacgatccagctcggggagtacagacagtgaggaaagtacagactctgaagaagaagatggagcaaagcaagacttgtttgaacccagcagtgccaacacggaggataaaatggaggtggacctgagtgaaccacccaactggtcagctaactttgatgtcccaatggaaacaacccacggtgctccattggattctgtgggatctgatgtctggagcacagaggagccgatgccaactaaagagacgggctgggcttctttttcagagttcacgtcttccctgagcacaaaagattctttaaggagtaattctccagtggaaatggaaaccagcactgaacccatggaccctctgactcccagtgcggctgccctggcagtgcagccagaagcggcaggcagtgtggccatggaagccagctctgacggagaggaggatgcagaaagtacagacaaggtaactgagacagtgatgaatggcggcatgaaggaaacgctcagcctcactgtagatgccaagacagagactgcggtcttcaaaagtgaggaagggaaactgtctacctctcaagatgctgcttgtaaagacgcagaggagtgtcccgagactgcagaggcgaagtgcgcggcgcccaggcctcccagcagcagtcccgagcagaggactggccaaccaagcgcaccaggtgacacttcagtgaatggccctgtatga

SEQ ID NO: 4055 - DNA, 4292 bp, Homo sapiens
  source 1..4292: mol_type = genomic DNA
cgcttcgctgatggtgtcggtgagcgcgtttcccgcctgagcgcaactagcggcgggtcgtgggcacctccaggagagcttgtttcatatccatatcccactgtattcctgctaatctgctaatgcagtaaattggaggaaaactgttaccaggataacctgtaatgggcaaggagccacaaagaagaaaacatttcttttaatttttaaacttggtttgaaagaccagcatgttttggaaatttgatcttcactcatcatcccacatagacacacttctagaaagagaagatgtaacactgaaggagttaatggatgaggaagatgttttacaggaatgtaaagctcagaaccgcaaacttatagagtttctgttaaaagcagaatgtctcgaagatttagtctcattcattatagaagaaccacctcaagacatggatgaaaagatcagatacaagtatccaaatatatcttgtgagttgctcacttctgatgtctcccagatgaatgatagactgggagaagatgaatccttgctaatgaaattatatagcttcctcctaaacgattcccctttgaatccactacttgccagtttcttcagcaaggtgctaagtattcttatcagcagaaaaccagaacagattgtggatttcttaaagaagaagcatgattttgtagaccttattataaagcacataggaacttctgctatcatggatttgttgctcaggctcctgacgtgtatcgaacctccacagcccaggcaagatgtgctgaattggttaaatgaggagaaaattatccagaggcttgtggaaatagttcatccatcgcaagaagaagatcgacattcaaatgcatcacaatcactttgtgaaattgttcgcctgagcagagaccagatgttacaaattcagaacagtacagagcccgaccccctgcttgccactctagaaaagcaagaaattatagagcagcttctatcaaatattttccacaaggagaaaaatgagtcagccatagtcagtgcaatccagatattgctgactttacttgagacacgacgaccaacatttgaaggccatatagagatctgcccaccaggcatgagccattcagcttgttcagtaaacaagagtgttctagaagccatcagaggaagacttggatcttttcatgaactcctgctggagccacccaagaaaagtgtgatgaagaccacatggggtgtgctggatcctcctgtggggaatacccggttgaatgtcattaggttgatatccagcctgcttcaaaccaataccagcagtataaatggggaccttatggagctgaatagcattggagtcatattgaacatgttcttcaagtatacatggaataactttttgcatacacaagtggaaatttgtattgcactgattcttgcaagtccttttgaaaacacagaaaatgccacaattaccgatcaagactccactggtgataatttgttattaaaacatcttttccaaaaatgtcaattaatagaacgaatacttgaagcctgggaaatgaatgagaagaaacaggctgagggaggaagacggcatggttacatgggacacctaacgaggatagctaactgtatcgtgcacagcactgacaagggccccaacagtgcattagtgcagcagcttatcaaagatcttcccgacgaagtcagggaacgatgggagacgttctgcacaagctccttaggagaaactaacaagaggaacacggtagatctagttacaacctgccatattcattcatccagtgatgatgaaattgactttaaagaaacgggtttctcacaggattcttctttgcagcaaatgcaacaaatgacgtccaattttattgaccagtttggcttcaacgatgagaagtttgcagatcaagatgacattggcaatgtttcttttgatcgagtatcagacatcaactttactctcaatacaaatgaaagtggaaatattgccttgtttgaagcatgttgtaaggaaagaatacaacagtttgatgatggtggctctgatgaggaagatatatgggaggaaaagcacatcgcattcacaccagaatcccaaagacgatccagctcggggagtacagacagtgaggaaagtacagactctgaagaagaagatggagcaaagcaagacttgtttgaacccagcagtgccaacacggaggataaaatggaggtggacctgagtgaaccacccaactggtcagctaactttgatgtcccaatggaaacaacccacggtgctccattggattctgtgggatctgatgtctggagcacagaggagccgatgccaactaaagagacgggctgggcttctttttcagagttcacgtcttccctgagcacaaaagattctttaaggagtaattctccagtggaaatggaaaccagcactgaacccatggaccctctgactcccagtgcggctgccctggcagtgcagccagaagcggcaggcagtgtggccatggaagccagctctgacggagaggaggatgcagaaagtacagacaaggtaactgagacagtgatgaatggcggcatgaaggaaacgctcagcctcactgtagatgccaagacagagactgcggtcttcaaaagtgaggaagggaaactgtctacctctcaagatgctgcttgtaaagacgcagaggagtgtcccgagactgcagaggcgaagtgcgcggcgcccaggcctcccagcagcagtcccgagcagaggactggccaaccaagcgcaccaggtgacacttcagtgaatggccctgtatgacgggtgacgtctgctgctgctgactgaggactgcagaccgccaccactcaggggctctggaggggtcagctggagcccaccaagctgtcactgctgcactcactctgcaagggatcaggaccagcaacctttatattctagattctaagacattgtacagagaaattcagaagtgtaaaaatattgcacattgacaaataccaagaatttttgcgtatgtttatattgtattgttctaaataatgggtagcctgtgaaataagatcttgccacccatgtaataatagtagtaatactatagttaaaatggctgtaagaatagttttataaaagtgaatacacagatctattgtatttgaaacataactttgacaattattagtgtgaccaaagtattaggcggttttcatacatttttcaccttgtacaaaattatgaattcatttttcctccaggccgacaaggagttgtagaatgaaaatgccctctaagtgttattttggttgttctaacttacaaaagtgattttgaataagaaatatttggtgttctttttataaccagtttttgattggtaattgttttctgtattgtttaaaacggatcaaaaatgtaagtctattggtagagattaagtaaagtatttattgctacatcatagttgataaattgatgttatcgtaaagccatatgttctgttcaagtcttgtttgcttgaaatgattattcctacaagtgaaacactagactatttggagtgtatatggcttgtgttttgggattttttttttttttttttggcttttgtttttgtttgtttttttgtttcatttggtagttcatctgccttttaacccattcaccaaaatttaccttgttaacaagcatcaccaatgaacatttcagagcaatctgcatatttaacagacctaaaataaatcctattaggcaagtcagttgaaaatgctcgtgctgctaatggaattagagtgcgttcattttacaggctagtattttaaaagtagaaatcaaaatctggcaccgaagcatgctaattgtttactgtaccttgtgaggttttcactcataaatttaaaccagtgtatttttttagaactggtttgtgtatatatatagtgattatggatactaattcaatgtaatttataattttctatgtcaatacaaaaatacatcacagccttctcaaacagctcaagcaatatattgtatattgccatatcgtctggtgaaagggttaaattacttcacctcttgcacttttagatgcaaatcagtttttcatttctgtaatagaaaattattcacgtatttttacatcatttgtttttcctgaccagtatttaaaaccaaaaggatattctgaaaaatggccaacaatttttttagaagtagcatcccaagcagcgtgcctaaacattacattgcatatggaaa

SEQ ID NO: 4056 - DNA, 558 bp, Homo sapiens
  source 1..558: mol_type = genomic DNA
attctgaggatcactgtcctttagtgatgaagtgggtgctgttcctggacataaaggcagacctgtgcttgacatggattgatctgtcttctggcagtgaagtgcaggcatgaaccttggtcagccccacactcttctccatccgtagcccatgtactagagtttggacttggaccgaagtctggggcagctccctaattactagggtgctgaaggcgtgattgtgccagtcgactgcgagttccttccgcagcttgtatcgttacccactcctgcaggtgctgctgctgcctccactgtactcagacccaggtagcacaggattgtccatcctccagcagctcagtgcaacggtgtgaactcagcctgtttcagagcctccacaccatgacctccaagaagctggtgaactcggtggctggctgtgctgatgacgctcttgctggcctggtggcctgcaaccccaacctgcagctcctgcagggccaccgcgtggccctccgttctgacctggacagcctcaagggccgggtggcactgctgtcgggtgggggctct

SEQ ID NO: 4057 - DNA, 3577 bp, Homo sapiens
  source 1..3577: mol_type = genomic DNA
gggccctcacagaaggcggtggcgggcgggtgcagcgagtttgtccccttgcccgcacactgcttggcctctgtacttaagtgcggtggccgcctgcctcgctggagcttctctgccgcagccatccgtgctgcttgggacgggccggggcgcgaaggcggtcgcatccatcgctctgccctcctgcttctcttgtgtaatcagctgcctatttggaaattgggcagggtttgcgactggatgctaatgtcactgactagttttcagcctaccatccagaagtaacatgttcccagctttggaaacgcacctaaagcagactattcctgatccttatgaagactttatgtaccgtcacctccaatattatggctactttaaagctcagagaggcagtttaccaaactctgctacgcatcagcatgttcggaagaataaccctcaatgcctgttgaatggctctcttggggaaaaagatgatttgataccagacaccctgcaaaaggagaagcttctatggcctatcagtttatcttcagctgtgcacagacagatagaagccatcaacagagactttcactcttgcctgggctggatgcagtggcgcggcctcagctcactgcaacctccacctcccagattcaaggattctcctgcctcagctttccgagtagctgggattacagattcacatatgctgagtttaccacatcttaggagcagacagcttctttatgatgagttggatgaagtaaacccacgtcttcgagaaccccaagagctcttttccattttgtctaccaagaggccactgcaggctccaagatggccaattgaatgtgaggtcatcaaggaaaacatccatcatattgagtgggctccacctcaaccagaatatttctatcagcctaaaggaaatgaaaaggtaccagagattgtaggagagaaaaaaggaacagttgtctatcaattagattcagtgcctatagaaggttcctattttaccagttccagagtgggaggcaaacgaggaattgtcaaggaacttgctgtcacgttgcaaggaccagaagataatactctactgtttgaatcaaggtttgagagtgggaatctgcaaaaagctgtcagagtagacacctatgagtatgaactcaccttgcgaactgacctctacactaacaaacacactcagtggttttattttcgtgttcagaacaccagaaaagatgctacctatcgcttcaccattgtcaacttgctaaaacccaagagtctttatactgtagggatgaagccactcttgtactcccaattggatgccaacacccgcaatattggctggaggagagaaggaaatgaaatcaagtactacaagaacaacacggatgatgggcagcagcccttctactgtctcacgtggaccattcagtttccatatgaccaggacacttgcttctttgcacacttctacccatatacatacactgatttgcaatgctacctcctgtcagtggcaaacaaccctatccagtctcagttctgcaagctccaaactttatgcaggagcctagcaggaaataccgtttacttgctcaccatcaccaacccatcccagacccctcaagaggcagctgcaaagaaagctgtggtcttgagtgccagagttcaccctggagaaagtaatggctcctgggttatgaaaggctttttggacttcatccttagcaactccccagatgcccagctcctcagagatatttttgtcttcaaggtgcttcccatgttaaatccagatggtgtgattgtggggaattatcggtgttccttggccggaagggatttgaacaggcattataaaaccattctgaaggagtctttcccttgtatttggtacaccaggaacatgatcaaaagacttcttgaagaaagagaggttctgttgtattgtgatttccatggccacagtcgtaagaataatatcttcctgtatggctgtaataacaacaatcgcaaatactggcttcatgaacgagtctttcctttaatgttatgcaaaaatgcaccagataagttctcttttcacagttgtaattttaaggtccaaaaatgcaaagaaggaacaggacgagttgttatgtggcggatgggaatcctaaacagctacaccatggagtctacctttggcgggtccaccctgggtaataaaagagacacccactttaccatcgaagatctgaagtccttaggttatcatgtctgtgacacccttctggacttttgtgatcctgaccaaatgaagttcactcagtgtctagcagagcttaaggagcttttacgacaggaaatccacaagaaattccatgaacttggacaagatgtagatttagaaggaagttggagtgacatctctttgtctgacattgaatccagcaccagtggctctgacagttctctctcagatggtcttcctgttcacctagcaaacatagcagatgagctgactcagaaaaagaagatgtttaagaagaaaaaaaagaagtcacttcagactaggaaacagcgaaatgagcagtatcagaaaaaaaatttgatgcagaagttaaagttaacagaagatacctcagaaaaggcaggatttgcttctactctgcaaaagcagccaacctttttcaaaaactcagagaattccagttttttaccaatgaaaaatgaaaacccaaggttaaatgagacaaatttaaatagaagagacaaagacacccccctggacccatcaatggccaccctgattctgcctaagaataaagggagaatgcagaataagaagccaggctttacagtatcatgctctccaaagagaaccataaactccagccaagagccagctccaggtatgaagccaaactggcctaggagcagatatcctgccacaaagagaggctgtgctgccatggcggcatacccatccttgcacatatacacatacccgtaggtgagcctgggctgtgccacacaagcacttcatcgggggttttgagattagacacattttataatgggggagatgtatgactgggaactgcatttacttgtggtatactgtgttgtgcactcatgcactgaccttacactttgtacttacactgtgggcatgtggtcaagatgcatacctcatgaattcaactattttttcataaaatgaaattttattatgatgtgtaaaaatgctttatcagaaactgaagtgtgttctcatggcacacttcatggcagcacagatatacctcattttaaccaatagatattctctctaaaattatgtgcaaatcaatttttaaaaatcaaaatctatgttaaacacattttggcagtgtgctataataaaaaaaagtgttgtgtcaaagctttctagtgacggtcagtcctactgctgtatgtcaggtttgctcacaatgaggtattcccacatagaaataacaatgcatgtattacccagaatttaatgttgcgtaccttatgttcaatgaggttttgtaatttttttaggctgatgattaaaattctttctctctaa

SEQ ID NO: 4058 - DNA, 1830 bp, Homo sapiens
  source 1..1830: mol_type = genomic DNA
aaagcgttacttccggcggaaaaggacgcgggagattcgattggaaggctgccggcgtgctactgagttcggccggtccgagtcactgtgcgtcgcctgggcccgttcctggtcttctcccccagggtcttgctctgtcacccaggctggagtgccatggcatcatcatagctcactatggccttgatcctcctgccttagcctcccaagcagctggtattacagatggagttttgctcttgttgcccaggctgaagtgccatggtgcaatctcggctcactgcaacctccgcatcctaggttcaagcaattctcctgccgcagcctcctgagtagctgggattacaggcaccccccaccatgctcagctactttttgtatttagtggagatggggtttcaccatgttggccaggctggtctcaaactccctacctcagaccacggtgtgaacacatgaacagaagacgaaaatttcttctagcctcagtacttgctctccagaattcaagttttatatatccatcatgtcagaagtgcttctctaggataatcctggtctccaaaaggtctaattgtccaaaatgtggctctactggtgaatctggaaatgccaattacagatacaaactttccttaaaagttgcagaatcaaacaaattgtttgttattactgtatttggaagttgcttagatacattttttggtcttactgccactggtttgcacaggtacattcaggatcctaataaaattccagaaacactggacaatgatacaactcagaatctattaactaaagcagttgaaacttgctttgttggacaaagctttatttttggagtgacgaattttgaaaaccaacctggacaaggttcagatgccagtaacttcttacagcaatgctctgaccacaaaagaaaagccaaagcactagtggcttgccagattgttctaccagacccagccacccaagatgctaaaacaaaataagaccaaggggaagaagatggctggggcccctgctgtcatgaagaagcaagaagccaagaaagtggtgaatctcccctgtttgagaaaaggcctaagaattttagcactggacaggacatccaccccaaagggatctcactcactttgtcaaatggcctcattatattaggttgcagcagcaaagaactatcctctgtaggtcactggaagtgcctcttgtgattaaccagtttacccaggccttggacctcctaacagctgctcagcttcttaagctggcccacgagtacagaccagtgacaaagcaagagaagaagcaggaattgttggcccatgctgacaggaatgctgccagcaatggagacatccccactaagagttcacctgtccttcaagcaggggttaatactgtcaccaactcaatggtgaacaagaagtctcagctggtgctgactgcacaagatatggatcccatcaagctggttgtcttcctgccagccctgtgttgtaaaatgggggtcccttactgtgttatcaaagagaaggcaaggccgggaagtttagtccacaggaggacctgcatcattgtcaccttcacacaggttaaatggaaaaaacaaggagctttagctaaactttgggagcttcaggatcaattacaatgacagatataatgagatccaccatcaatggggaggcaacatcctgggtccaaaatctgtggcttacaatgccaagccagaaaagacaaaggctaaaaaacatgccactaagcttagttaaatgcacactgttgagttttctgtacagaaagataataaaaaattctccttcagcc

SEQ ID NO: 4059 - DNA, 564 bp, Homo sapiens
  source 1..564: mol_type = genomic DNA
ctggtgctgctatgggcctgtctgcacctccgtttccctttctgtgcagggttaggcttgctgaggggcaggcacaggagtcctggctgagctcatggcctgaggctgcctagcggccacggggaatggttgcaatggcggaggcagaggcaggggtggcagtggaggtccgtggactgccccctgccgtgcccgacgagctgctcactctctactttgaaaaccgccgacgctctggagggggacctgtgttgagctggcagagactgggctgtgggggcgtcctcaccttcagagagcctgcagacgccgagagggtcttggcccaggcagatcacgaactacatggtgcccagctgagcctgcggccagctccaccacgagcccctgcacgcctgctgctccaaggactgccccctggcaccacgccccagcgcttggagcagcatgtccaggccttgctgcgggcctcggggctcccagtacagccttgctgtgccttggccagcccccggccagaccgggctctggtccagttgcccaagcccctttctgaggcaggtg

SEQ ID NO: 4060 - DNA, 616 bp, Homo sapiens
  source 1..616: mol_type = genomic DNA
gatcagattcaaggtgacacgcaccagcatacacagaaccacagggctgcccgggcccggactgccccacagaggcggcagatgcacacagaggtcagccacagcaccccacatggagggctgctcacccacagaggtgcagagggtgccacctccaccagccaccttgaaggagaaataactttatttggactgagagctggagaatgagaataggacctgagagtatattgggctaaggaggagaggtgtttgagcccagatgagtcatggctggacgacccctccgcataggagatcagctggttctggaagaagattatgatgagacctacattcctagtgagcaagaaattcttgaatttgcccgggagattggtattgatcccatcaaggaaccagaactgatgtggctggcgcgagagggcatcgtggccccactgcctggagagtggaaaccatgccaggacatcacaggtgacatttactatttcaacttcgccaacgggcagtctatgtgggaccatccatgtgacgaacactatcggagcttggtgatccaagagcgggcaaagctgtcaacttctggggccattaagaagaagaaaaaaaaaaa

SEQ ID NO: 4061 - DNA, 1704 bp, Homo sapiens
  source 1..1704: mol_type = genomic DNA
gtcggccggagcgcgagagccgggacccgggctgttggcggcgcacgccggggaggttgaggcggaggagcgcgcgttcgggcgccgcggacgctgtcctgtagcggtctcgccggcctcggcgtccggactgtggcaccgcgcggggactccccccgcgcccccgctgccaacgttaagcgagggccaaagcccgccgcccgccccccagcatgcgcacctcgtacaccgtgaccctgcccgaggacccccccgccgccccctttcccgccctcgccaaggagctgcggccgcgctcccctctctccccgtccctgctgctctccaccttcgtggggctcctgctcaacaaagccaagaattctaagagtgcccagggtctggctggtcttcgaaaccttgggaacacgtgcttcatgaactcaattctgcagtgcctgagcaacactcgggagttgagagattactgcctccagaggctctacatgcgggacctgcaccacggcagcaatgcacacacagccctcgtggaagagtttgcaaaactaattcagaccatatggacttcatcccccaatgatgtggtgagcccatctgagttcaagacccagatccagagatacgcaccgcgctttgttggctataatcagcaggatgctcaggagttccttcgctttcttctggatgggctccataacgaggtgaaccgagtgacactgagacctaagtccaaccctgagaacctcgatcatcttcctgatgacgagaaaggccgacagatgtggagaaaatatctagaacgggaagacagtaggatcggggatctctttgttgggcagctaaagagctcgctgacgtgtacagattgtggttactgttctacggtcttcgaccccttctgggacctctcactgcccattgctaagcgaggttatcctgaggtgacattaatggactgcatgaggctcttcaccaaagaggatgtgcttgatggagatgaaaagccaacatgctgtcgctgccgaggcagaaaacggtgtataaagaagttctccatccagaggttcccaaagatcttggtgctccatctgaagcggttctcagaatccaggatccgaaccagcaagctcacaacatttgtgaacttccccctaagagacctggacttaagagaatttgcctcagaaaacaccaaccatgctgtttacaacctgtacgctgtgtccaatcactccggaaccaccatgggtggccactatacagcctactgtcgcagtccagggacaggagaatggcacactttcaacgactccagcgtcactcccatgtcctccagccaagtgcgcaccagcgacgcctacctgctcttctacgaactggccagcccgccctcccgaatgtagcgccaggagccacgtcccttctcccttccccgtggtggccccgctccctaaattttttaaaaagacaaaaacaaaacaacaacaacaacacacaaacctgacaagagaaaaacaaacctgaagctgccgagcaggagtggatgcagcctgatcagggtctggagcaaggagccgggctttcctgagctgtggcccggcagggaagatcgcctggacgtggagccagcatcgccccgtgccctcggcgtttgcatttgtaaacttgtggtcttcctatgtgtcagaaacaactgtgtcttgg

SEQ ID NO: 4062 - DNA, 980 bp, Homo sapiens
  source 1..980: mol_type = genomic DNA
ctcttcccagcgttcctcctccggccccaggtcaccgccagcacgcgcctgcttcccgtctgcgcgagtccacgcagctccccagatcaagaagctgaggccccaggttacacactaaagtaaatggcagaggcagaaataacacctatgtcctcctgaccccaaggcccttcaccagcacagcagcagcaggcatggcagcaagcgtggagcagcgcgagggcaccatccaggtgcagggccaggccctcttcttccgagaggccctgcccggcagtgggcaggctcgcttctctgtactgctgctgcatggtattcgcttctcctccgagacctggcagaacctgggtacactgcacaggctggcccaggctggctaccgggctgtggccattgacctgccaggtctggggcactccaaggaagcagcagcccctgcccctattggggagctggcccctggcagcttcctggcggctgtggtggatgccttggagctgggccccccggttgtgatcagtccatcactgagtggcatgtactccctgcccttcctcacggcccctggctcccagctcccgggctttgtgccagtggcccccatctgcactgacaaaatcaatgctgccaactatgccagtgtgaagactccagctctgattgtatatggagaccaggaccccatgggtcagaccagctttgagcacctgaagcagctgcccaaccaccgggtgctgatcatgaagggggcggggcacccctgttacctggacaaaccagaggagtggcatacagggctgctggacttcctgcaggggctccagtgaagcccagcactgctgcagggggtgggctgcctgcctgctctgagctctctcttgcacgctctctcttctctcccaggctctggctcatgcacatgcaacaggtgcgtctgtctatatgtctgggttcttgtcttttgtggtctgtttgtcttt

SEQ ID NO: 4063 - DNA, 1780 bp, Homo sapiens
  source 1..1780: mol_type = genomic DNA
cttgcttccacttcaggcctgcctgaggcacttccactggtctccagttacttgcaaggtcaagtacaacctgcaaggctggttatgaagaagaaactcaaaataacaggagtggcttatggaactacatggagctctggcaggctgccctgagcacgctcaaccccaaccccacggacagctgtcccctctacctgaactacgccaccgtggctgccctgccctgcagggtgagccggcacaacagcccctcggccgcccacttcatcacgcggctggtgcggacctgcctgccgcccggagcgcatcgctgcattgtgatggtctgcgagcagccggaggtctttgcttccgcctgtgccctggcccgggccttcccgctgttcacccaccgctcaggtgcctctcggcgcttggagaagaagacggtcaccgtggagtttttcctggtgggacaagacaacgggccggtggaggtgtccacattgcagtgcttagcgaatgccacagacggcgtgcggctagcagcccgcatcgtggacacaccctgcaatgagatgaacaccgacaccttcctcgaggagattaacaaagttggaaaggagctggggatcatcccaaccatcatccgggatgaggaactgaagacgagaggatttggaggaatctatggggttggcaaagccgccctgcatcccccagccctggccgtcctcagccacaccccagatggagccacgcagaccatcgcctgggtgggcaaaggcatcgtctatgacactggaggcctcagcatcaaagggaagactaccatgccggggatgaagcgagactgcgggggtgctgcggccgtcctgggggccttcagagccgcaatcaagcagggtttcaaagacaacctccacgctgtgttctgcttggctgagaactcggtggggcccaatgcgacaaggccagatgacatccacctgctgtactcagggaagacggtggaaatcaacaacacggatgccgagggcaggctggtgctggcagatggcgtgtcctatgcttgcaaggacctgggggccgacatcatcctggacatggccaccctgaccggggctcagggcattgccacagggaagtaccacgccgcggtgctcaccaacagcgctgagtgggaggccgcctgtgtgaaggcgggcaggaagtgtggggacctggtgcacccgctggtctactgccccgagctgcacttcagcgagttcacctcagctgtggcggacatgaagaactcagtggcggaccgagacaacagccccagctcctgtgctggcctcttcatcgcctcacacatcggcttcgactggcccggagtctgggtccacctggacattgctgcaccggtgcatgctggtgagcgagccacaggcttcggtgtggccctcctgctggcgctcttcggccgtgcctctgaggaccctctgctgaacctggtgtccccactgggctgtgaggtggatgtcgaggagggggacctggggagggactccaagagacgcaggcttgtgtgagcctcctgcctcggccctgacaaacggggatcttttacctcactttgcactgattaattttaagcaattgaaagattgcccttcatatgggttttggtttgtctttctggtcgtcagcgtggtggtggaaacagctgaagttttaggagacagcttagggtttggtgcgggccacggggaggggaccgggaagcgctggggcttgtttctgtttgttacttaca

SEQ ID NO: 4064 - DNA, 939 bp, Homo sapiens
  source 1..939: mol_type = genomic DNA
gatttggggcttgggtcgtttctcacaagcaaccggaggcctgcgccgctgccggcgtctcccgggtgggagctcagcgcggaggctggggtctcggccggggacgtgtggggtgtgcccggaccctcccctccgcatcccgccccttaagcagctttaaggggccggagccggcggctatttctatcccaggaaatccccgggccatctgtgaccaacaaaggcccgagcccccccacccccgcgagcccaacaacagggcccaacggcccctggctccggggtggggggatcgggcctggatcggctgccggtgcctgccagtgggggttaggcttgctgaggggcaggcacaggagtcctggctgagctcatggcctgaggctgcctagcggccacggggaatggttgcaatggcggaggcagaggcaggggtggcagtggaggtccgtggactgccccctgccgtgcccgacgagctgctcactctctactttgaaaaccgccgacgctctggagggggacctgtgttgagctggcagagactgggctgtgggggcgtcctcaccttcagagagcctgcagacgccgagagggtcttggcccaggcagatcacgaactacatggtgcccagctgagcctgcggccagctccaccacgagcccctgcacgcctgctgctccaaggactgccccctggcaccacgccccagcgcttggagcagcatgtccaggccttgctgcgggcctcggggctcccagtacagccttgctgtgccttggccagcccccggccagaccgggctctggtccagttgcccaagcccctttctgaggcagatgtccgtgtcctggaggagcaggcccagaatctgggcctggaggggaccttggtgtccctggcccgggttccccaggcccgagcggtgcgtgtggtgg

SEQ ID NO: 4065 - DNA, 4322 bp, Homo sapiens
  source 1..4322: mol_type = genomic DNA
cccgctgcctctggaagagaatcgatcttttgcgccagccctcactgagggtagagggaaaggcctcatgagaaatcaaaagagagagagtaaaacggacatgaaagaggaagatgatgagagtgaagagagtaatgaggctgaggaccagacaaaagagcagaaggcagaggaaagaaaaaatgagcaggagaaagagcaagaggaaaatgaagagaaagaggaggagaagacagagagccaggggtcaaagccagcctatgagactcagcttccatcccttccctaccttagtgttctttcaggtgctgacccagagctgggttctcagctccaggaggcagctgcttgtggcactaactatattgaagcgtcttgtgggaaccctcctatcagccacagggaagctggtcagagccagacctcgtgcctggggaatggggatcatgggtgctggcattgtgggtagggtgcctttgcctccctctcacaggcctgcctgtgttactgaccaatgtggagctgggtctagggtgcgaagaactgcaatggctgctgcaacgggagcagctgagtccaccccaggtgcagcctggcttctgtctgtatctcagcaccaccctctccctctgtgccatggaaaaagtgctaggttgtgaactgctaaaggggctgaatgtgttggatctgggcctgaacatggaaatactggaagaacagatgctgcatgaaatcttgtgcagagagtatcctgaactcgagacccgctggcaggacctaaagatcagagccctagatacctgcaaggctgtggaggctgctgaggagcggctgctgacgatgctgctgttccagaatccgaagcgtcagaagccagccaagtttctgcggaacatagtgagggcccaaggaaagctatgccagctgcgtgctcattgtgaagagttagaagggcagaaactacaggagatggtattgtgggcaccctatcgacctgtggtttggcatggaatggccatggtaaaggccctaagccaactgcagaacctgctgccacttttctgtatgagcccagagaactggctggcagtcactaagcaggctctggacagcatgaagccacgtgagattaatcacggggaggacctggccagccatctactgcaattgagagcacacctgacccgccagctgctgggcagcaccgtgactgcactgggccttacccaagtacccttggtgggtgcattgggcgctttggctctgctgcaagcaacagggaaagcatcagagctggaaagactggcactctggcctggactagcagcctctcccagcacagtccacagcaagccagtctcagatgtggctcgaccggcctggcttgggccaaaagcctggcatgaatgtgagatgttagagctgctgcccccatttgttggcctgtgtgcctccctggcaggccactccagtgcttggcaggcttacctgtcactgtcatccacagtgctgggtcctgcacctgggccagggcctgagccactcagcctcctccagaagctgatcctgtggcgcgttctgcgacctgagtgcctggcaggtgccctggcagacttcaccactagcctcctgggtcggcccctggatgaaaacacgtatgctcccaccatgccctttaaacatagtcaggctactcagcccatgctgatcttgttgccaccgcctggccacccctcagccactctgcatcctctgactgtcatccagaaactggctgccaagtatcagcaggggcagaagcaactgcaggtgatagccctgggctctgaagcctgggacccagtctcagttgtggtcagcactctatcccaggctatgtatgaggggcactggctggtgctggacaactgtcatctgatgccccattggccgaaagagctgctacagctcttgctggaactgttaggcagagccaaggtggttgcagacctggaatcagaacagcttttagaccaacctgaaagcaggaatgtaagcactgttcacagagattttcgtctttggcttattgtgcctgcagagtctagtgcttctttgccagctgtgctgactcagcactccatgcctgttttctggaaccagtccctggagctgggccatgttttgattgacagtgtggagctagcccagcaagtactctacatgcaaccccccacccaggcactacctctgctcctcctccatggcctcctgctacaccggcagctctatggaacaaggctgcaggcacacagggggcgctggagtcaagtgactctaacccaggttcttcagacccaagaccagctgtgggcaagtcttagcaatccccgtgctgccatgcaagagctggctggtgagacccttcctctcccccttggagtcatcagcccccaggagagcctggaagagggtgggggtgggatacaattcacagctttggttttggcggtggtggaaactgaaggtactggaactgagagactctaacctcatcttcagcttcagttttctacgggggtcctctgggggacactgaggacagggaggccctgattagcctcacacaagcctgcctgagccccagtagtgggagctgggtccagccacacacacctcagtctttgctggccacgctcatgcccctcccaggtaagcctcactcaggtatctgttttggggtagggaatagtgcaatgcaatgccaccccccacagaaatgtggacagcagtctcaataaaggtatatgagggggtaatattcatactgttatgggggtgatggcagtaaaggctcagaggaaggcctactctctcgagtctagggtggggagagtccatcttgtccctcacccctcacctctatccccaagagctaagggagctggatgcaatggcagagtgcaaggcccagatgcacctactgccctcaccacctgaaccccggctctgcggactgagtgagggcccccaagcctggctgttgcgacgccagagtcgcgctctcttgagtgcgctgcagcggagttcacccgtgtgggttcctgagtctcgaagaggcgcccagcttgcggaaaggcgactgcggcaacgcctagtgcaagtcaaccggaggctggagtcactgcaggatctgctgacccacgtgattcgccaagacgagtccgacgccccgtggtcagtgctggggccaaatgcacggcggcctctggagggcgtcttagagaccgaggctctagaactgagccagttggtgggcacgctacaacgcgaccttgattgcctgttgcagcagctgaagggcgcacccccgtgcccctcccgccgctgtgctgcggtggcccacgctctctggactggccgcctacccttgccttggcgacctcatgcgccggccggtccgcagccgccctggcactggctgcgacagttgtcgcgccgtgggcaactgttggttcgttacttgggcgtgggcgcggacgcgagcagtgatgtaccagagcgcgtcttccacctgtcagcctttcgccacccgcgccgcctgctgctggcattgcgtggggaagctgccctggaccagaatgtgcccagctcgaatttccctggtagccgaggctcggtctccagtcagctccagtataaacgtctggagatgaacagcaaccctctgcacttcagggtatcttcgcgccgcccctcgttcgcggttccagtcccctcgaagtctctaattacacctcgcagttaccccttcttggtgatcttgcccccggtaaccctgctagcttctccgatctcgcttcaccacgacctcctacccgctaacccccacttcccacctgccacctcccagcttcctagccttgcctgaccagcttctgacgcccccaggtggagaatggtccaaatcccacggttccagagagagggctgctgctgatcgggctacaggtcctacatgcggagtgggacccaatagctggagccttgcaggacagtccttccagccaacccagccctctgcctcccgtcagcatcagcacacaggccccgggcaccagtgacctgccagccccagccgacctgactgtgtactcgtgtcctgtgtacatgggagggccccttggcaccgctaagctgcagagcaggaacatcgtgatgcatctgcctttacccaccaagctcacccccaacacctgtgtccaaaggagggtccatgtgtgcagcccacccctgtcttgagcccgtctaccaaaataaagttgtagtgattccatgaaaga

SEQ ID NO: 4066 - DNA, 1917 bp, Homo sapiens
  source 1..1917: mol_type = genomic DNA
cttccttgcttccacttcaggcctgcctgaggcacttccactggtctccagttacttgcaaggtcaagtacaacctgcaaggctggttatgaagaagaaactcaaaataacaggagtggcttatggaactacatggaggtaacagaggagggtaccaaccaaaggcccttgagcaatcaggatgttggctctggcaggctgccctgagcacgctcaaccccaaccccacggacagctgtcccctctacctgaactacgccaccgtggctgccctgccctgcagggtgagccggcacaacagcccctcggccgcccacttcatcacgcggctggtgcggacctgcctgccgcccggagcgcatcgctgcattgtgatggtctgcgagcagccggaggtctttgcttccgcctgtgccctggcccgggccttcccgctgttcacccaccgctcaggtgcctctcggcgcttggagaagaagacggtcaccgtggagtttttcctggtgggacaagacaacgggccggtggaggtgtccacattgcagtgcttagcgaatgccacagacggcgtgcggctagcagcccgcatcgtggacacaccctgcaatgagatgaacaccgacaccttcctcgaggagattaacaaagttggaaaggagctggggatcatcccaaccatcatccgggatgaggaactgaagacgagaggatttggaggaatctatggggttggcaaagccgccctgcatcccccagccctggccgtcctcagccacaccccagatggagccacgcagaccatcgcctgggtgggcaaaggcatcgtctatgacactggaggcctcagcatcaaagggaagactaccatgccggggatgaagcgagactgcgggggtgctgcggccgtcctgggggccttcagagccgcaatcaagcagggtttcaaagacaacctccacgctgtgttctgcttggctgagaactcggtggggcccaatgcgacaaggccagatgacatccacctgctgtactcagggaagacggtggaaatcaacaacacggatgccgagggcaggctggtgctggcagatggcgtgtcctatgcttgcaaggacctgggggccgacatcatcctggacatggccaccctgaccggggctcagggcattgccacagggaagtaccacgccgcggtgctcaccaacagcgctgagtgggaggccgcctgtgtgaaggcgggcaggaagtgtggggacctggtgcacccgctggtctactgccccgagctgcacttcagcgagttcacctcagctgtggcggacatgaagaactcagtggcggaccgagacaacagccccagctcctgtgctggcctcttcatcgcctcacacatcggcttcgactggcccggagtctgggtccacctggacattgctgcaccggtgcatgctggtgagcgagccacaggcttcggtgtggccctcctgctggcgctcttcggccgtgcctctgaggaccctctgctgaacctggtgtccccactgggctgtgaggtggatgtcgaggagggggacctggggagggactccaagagacgcaggcttgtgtgagcctcctgcctcggccctgacaaacggggatcttttacctcactttgcactgattaattttaagcaattgaaagattgcccttcatatgggttttggtttgtctttctggtcgtcagcgtggtggtggaaacagctgaagttttaggagacagcttagggtttggtgcgggccacggggaggggaccgggaagcgctggggcttgtttctgtttgttacttacaggactgagacatcttctgtaaactgctacccctggggccttctgcaccccggggtgaggcctcctgcctgcctggtgccctgt

SEQ ID NO: 4067 - DNA, 862 bp, Homo sapiens
  source 1..862: mol_type = genomic DNA
ctgattggttagtttccaggcccaaaaccagaggtctctcagacatttgtttcaaacggctgattgagggagttcaggggttgggggttggcggttcttgcccagtttagcttgggatcaacagctccaacaacgtgtccaatcaacaacagcttgattgtaaaaagtcctgaatctgctggatgatgaaataattttgaatggataattaaagctcaaagtttcagaatcagattcctataggcaatggaaactgatctcaattcccaggacagaaaggacctggacaagtttattaaattttttgccctcaagactgtccaagtgattgtccaggctcggcttggtgaaaagatttgcactcgttcatcatcttctccaacgggttcagattggttcaacttagcaatcaaagacatcccagaggttacacatgaagcaaagaaggcactggcaggacagctgcctgcagtcgggaggtccatgtgtgtggagatttcacttaagacttctgagggagattccatggagctggaaatatggtgtcttgaaatgaatgaaaagtgtgataaagaaatcaaagtttcctacacggtgtacaacagactgtcattgctgctgaagtcccttcttgctataactagggtgacaccagcctataggctctccaggaaacaagggcatgaatatgtcatattatacaggatatattttggagaagttcagctgagtggcttaggagaaggcttccagacagttcgtgttgggacagtgggcacccctgtgggcaccatcactctttcttgtgcttacagaattaacttggcattcatgtctaccaggcaatttgagaggaccccac

SEQ ID NO: 4068 - DNA, 556 bp, Homo sapiens
  source 1..556: mol_type = genomic DNA
atctcttctgcaccttgtgcattgtaggttttggatgcttatttgtttagggtctaggacctggtgcttagcctctcctggatcctgtatatttactgactttccaaattcttttgagtgtggcattatatctgcttcatcttctctttcttggctattcttagtgcccttctcattttactgtcctaatgttttcccatttatactatgaatcattgtgcaccctatgtagagcctgtcattggagattaaaatcagtggcagctctttgattttacagctcagcctcagctgaacataacttctttttttcaaagttccctgtgttgtgaactgagcttgggtgaagtgaaatctttgaggaagctaaagctgtgtgtatttgtggatcagacaagtgcagcaagttaatatcattggcttctgaaggggagagtgaggtgatggctgcgtttaagttggatttccttccagaaatgatggtggatcattgctctttgaattccagtcccgtctcaaagaaaatgaacggcaccctggaccacccagaccaacc

SEQ ID NO: 4069 - DNA, 4199 bp, Homo sapiens
  source 1..4199: mol_type = genomic DNA
gaagcggatgaaaacaaacactaacgatggcggcgccgggaagcgaccggctgctgggcttaaggcgggagtgaccgcttaaccagtgagggaagcactgaagagcgccagtcgacgtgggtgcgacaactcgcggagtcttaggagcaaaacgtctggggcctgcgagccaggacccttctgaagccttaggtgtctatcggcgacgtgtacggtcactgcagctccggagcgcggaaccctcagccaggaggcgcggctggtcggtcccaggtcccggcctccgtaatgagagcccggaaccactctttgtgccgcagcttcgcaggtgagggtgactgttgactagtgaaaaaagggacccatggttcacgactgtcttcttactggcagtggaacgacctgtggaaacctgtgatccattctcattaaataaatctctggattcctataggcaatggaaactgatctcaattcccaggacagaaaggacctggacaagtttattaaattttttgccctcaagactgtccaagtgattgtccaggctcggcttggtgaaaagatttgcactcgttcatcatcttctccaacgggttcagattggttcaacttagcaatcaaagacatcccagaggttacacatgaagcaaagaaggcactggcaggacagctgcctgcagtcgggaggtccatgtgtgtggagatttcacttaagacttctgagggagattccatggagctggaaatatggtgtcttgaaatgaatgaaaagtgtgataaagaaatcaaagtttcctacacggtgtacaacagactgtcattgctgctgaagtcccttcttgctataactagggtgacaccagcctataggctctccaggaaacaagggcatgaatatgtcatattatacaggatatattttggagaagttcagctgagtggcttaggagaaggcttccagacagttcgtgttgggacagtgggcacccctgtgggcaccatcactctttcttgtgcttacagaattaacttggcattcatgtctaccaggcaatttgagaggaccccacctatcatggggattattattgatcactttgtggaccgtccctatcccagctcctctcccatgcacccctgcaattacagaactgctggtgaggacactggagtaatatacccgtctgtagaagactctcaagaagtgtgtaccacctctttttccacctccccaccatcccagctctcaagctctcgcctttcctatcagcctgctgccctgggcgttggatcagctgacctggcttatccagtagtgtttgctgctggcttaaatgctacacaccctcaccagctgatggttcctgggaaggaaggtggggtaccccttgctcccaaccagcctgtccatggtacccaggctgaccaggagagactggcaacctgcaccccttctgacagaacccactgtgctgccacaccctccagtagtgaggatactgaaaccgtatcaaacagcagtgagggacgggcctcccctcacgatgtcttggagaccatctttgtccgaaaagtgggggcttttgtcaacaaacccattaaccaggtgaccctgacgagtttggatataccctttgccatgtttgctcccaagaatttggagctggaggataccgatccaatggtgaatcctccagattccccagagactgaatctcctctccagggcagcctgcactcagatggctccagcgggggcagcagtggcaatacccatgatgactttgttatgatagactttaaaccagctttttctaaagatgacattcttccgatggacctggggaccttctatcgggagtttcagaacccacctcagctgagcagcctctccatagatattggagcacagtccatggctgaagacttggactcattaccagagaagctggctgtgcatgagaagaatgtccgcgagtttgatgcctttgtggaaaccctgcagtaaaagtatccttgagtcccagcagcaccccctttttgtggccccagggcataagcagcctcccatgcatcagctgctcccacccctcatcctgctctgagccaggtggaagggaggctggcttctcccatggggacccagaagtccctactcttggacctcctggagactccgtggcggcagtcaagcccagtgcccagttggagaagactcacgtgctggccttggagatgggaagaaccttcgtacgaaaaagccctcagcagggccatctgtgtgccctgcccatcaccaactgcttcccaagggtgtcatcctgttcctcctgctgccggcctcctgcctgggcctgccttgcagctggccccttccctgcctgctgtcaccatccactgtttgacattccagctggtggccaagagattggtgtggagtcgcagaaagaggaaggagacagtgccaggaggaagaaggaaggagtcccttagctctcttcattgtcccctttacttcctgctatcttcttctcctcttcttctctctcttgcctctatgcctgtatttctggcaatatgacaggcctgcctacccaagatcagaactccaaaaccactcccacccctgaaggtcgggagggtctgagcagccctggtggctgcctgtgctcaggtcctcagctccatgggaaataaaaatggcaccctgaatctctaggattttgtcacttggagtcacagcaaagttctcttcctcttgtccccccgttgctgctccttggttatagaacatggtaaatatttattactttcagagaaaccagatattttatagaggaaatatgtttgaggtgagttgtttttcacttggagaaggcggagggctcttcctgggacggagacctcctcctccggaggttattgagaatccgggctgctgctttgaggatcttcccaccatacagacagcgagatccaagaagagggctggccgggggcaaagtcacctcccagtgtggctgcactggaactgactaaaggctttaccttggatagttgcgtattcctggtgagagccttacatctcccacagtttctgcagagtgactgactccattctggcagcccaggaagtcctgggtgctaaatgtgatggccacatgtagtggttaggggatgttgtgtgtgtcccccaactgcctgggtacttgttcctgatccctggggctgtcctgtggagcttttcctcctgcttgggcctagctaccatctccctctaatcccaggttctctacactgccctggggtttaccagctggattggcttctggttgagaaatcaaagctgggcgtatgattgacttaacccttcaggtattgttacttgaataagtcaagtgcctagcctcacccacctatgatctgtcctttcccagcctcgctggtagtcctggtcaaggagatctaggtctactccattcctcctggcccacctggggcattcactggcagcagctgtgcttcagtggagcaggtggttctcagctgcttgttagtatactgcatgtgacactgttcccacatacaaggctgacttctgaggattggagcaggctctggcggggaccagagctctgcgtgctgctgctgccaccaagaagtgttagcagaagcagtagcagccaactggccctcctgactttggcccagagcacatgcgtggcttgctgaacccaggctcaggtttatccccaaggccccagctttgagaagggggaaggcccctggtaagttattgatgcccccatatttcagctactgctctctttccaaggccttgcatggaaaggcctagccattgtctgaggcagcaatctttggcatctacaggtggcagcagcctttcaccagggctccatctgtgaagagtctcagccatgactttgagctgagcttgggagaagtaaagcaactgttaaggccagcccttgcccctcagacctgccatgaaaggaatgagccctagactgactcctgcagcacccccgggacaggctgggaccagctgtttgtctccaggtgtcagagtccctcctcctcctccaacctctccaacctactttgtttggaaataccgagctacacttcaaaatgtattcaagggatttccaataaatttttttctgtactttaca

SEQ ID NO: 4070 - DNA, 1410 bp, Homo sapiens
  source 1..1410: mol_type = genomic DNA
ctttcaaagccaatttgaataaacaactcttccctctcaaatgggcaagagtaactcttcagcaccatggagaggtccgggcagcgtgttacaacgtgggactgtgaccagggcaagcactctgacagtgcacagaaaaatgagagagagtctatcagacagaagttggcacttggaagcttctttgatgatggcccaggaatttataccagctgtagcaaaagtgggaagccaagcctttcctcccgactgcagagtgggatgaacttgcagatatgctttgtcaacgacagtggcagtgataaggacagtgatgctgatgacagtaagactgaaaccagcttggacacccccttgtctcccatgagcaaacagagttcttcctattctgatagagacactactgaagaggagtctgaatccttggatgacatggacttccttacaaggcaaaagaaattgcaagctgaagccaaaatggcccttgccatggccaaaccaatggccaaaatgcaagtagaagtggagaaacagaacaggaaaaagtctcccgtcgctgatcttctgccacacatgcctcatataagtgaatgcttgatgaaaagaagtttaaaacccaccgacctgagagacatgactattgggcagctacaagtgatagtcaatgatctccattcccagatagaaagcttgaatgaagagttggtccagctgcttctcatccgagatgagctgcacacagagcaggatgccatgctggtggacattgaagacttgaccagacatgctgaaagtcagcagaagcacatggcagagaaaatgcctgcaaagtgaaaagaagccattcaaccagagaacaagctagaatttattttgcttctgtggttgtaaaaatgctgttgctaaaggtggcgcagaaacaaatatcagtgttagtcattgataatgtctgaagcttaatgtccagtgattggcctttgcttcttaatttattttaattttttacttgtgccacttaatatcaggcattttaataaaatattgttacaaaaaatgtacagtactgacaccaccacaaatcatggttaataaaagagagtagttttaactttatttttatttgtttagagattttaagttggaacagtattttcccattgactacttttcattcttcactgtagttttaaagaagaactgtaaatgacggtgctatacaagtcaaaaaatacatgcctgcctcgtagtgaagttgtagctctccgtaatatgtatattttactcagttttcaacattttgtgaatgttgactacctgaagttcctttttagatgtgctattaacattctgttggattcagagggttccttgaaagttttatgtataaatatgtaaaataaaaattaaaac

SEQ ID NO: 4071 - DNA, 540 bp, Homo sapiens
  source 1..540: mol_type = genomic DNA
attcccacccctacccaggaccggcagccggagccttgggtccctgcatgggcctggggcgccctgtgccccttcacctcgtcctcgtccagttgactgctgtggcagccggtgctacccgctgtgtccactgcaccctggccctgttctgagcggtcacagcagctggggagaagggccatcctggaagccgggcagatgaggacggaaccagacagtcccactgtggtgggcagaggttcctcctctcccggccccgccccggcccggccccgccgagcgtcccacccgcccgcgggagacctggcgccccggccgaggcgcgaacagacggacgcaccggcgagcgccgaggggacaggccgagcgcggggcgccggaggcaggtgtgggacaggcactggcctcagaccggggccacactgaggtctgcccttctcccgctggccgccacccaagacaccatgagccagtccggggccgtgagctgctgcccgggtgccaccaatggcagcctgggccggtccgacggtgtggcca

SEQ ID NO: 4072 - DNA, 525 bp, Homo sapiens
  source 1..525: mol_type = genomic DNA
gtgctgcagcccgagctcgaggggggagcgccgcctccgcaggcctcctgagacccgggcggctggggacgcagacagacacctgagggagggaagagcgcgcacccaggaggagtctattggcctacccgcagggggaggccgagatggggagactgaggcagatgaatggtgctggaaggaaaccctgaagtggggtccccccgaacctcagacctccagcaccgggggaacaagggctcttgcgttctctcctctcccggtgaagatgcgcagccaggcgaggagcccatcaagtatggtgaactcatcgtcctgggatgctgtgaggaaggaggtgaggaaaccgaggctcagagaggggaagtgactggcccaagggcacacagctgctacaatggttgtctggcaagtggggacaagggccgccggcgaagccgcctggcactgagccgccggtcgcacgccaacggggtgaagccagacgtcatgcaccacatctccacgccgctcgtctccaaggca

SEQ ID NO: 4073 - DNA, 585 bp, Homo sapiens
  source 1..585: mol_type = genomic DNA
gcgctcgagtgtgggcggggactgagggaagaagtgaaaatcggactgccaggcgacagttcctccgtttgaaatctcgccggctcctgagcgggccaccgggcccgggctgggggtctggcgggagaaataactttatttggactgagagctggagaatgagaataggacctgagagtatattgggctaaggaggagaggtgtttgagcccagatgagtcatggctggacgacccctccgcataggagatcagctggttctggaagaagattatgatgagacctacattcctagtgagcaagaaattcttgaatttgcccgggagattggtattgatcccatcaaggaaccagaactgatgtggctggcgcgagagggcatcgtggccccactgcctggagagtggaaaccatgccaggacatcacaggtgacatttactatttcaacttcgccaacgggcagtctatgtgggaccatccatgtgacgaacactatcggagcttggtgatccaagagcgggcaaagctgtcaacttctggggccattaagaagaagaaaaaaaaaaaggaaaagaaagacaaga

SEQ ID NO: 4074 - DNA, 568 bp, Homo sapiens
  source 1..568: mol_type = genomic DNA
ttcttgctgctgccatgtgaagaaggacgtatttgcttccccttctgccacgatgggaagttttccgaggcctccgccactatgctgaactagagcgaaatgtcatcagtgcagtcacaacaggagcagttgtcccagtcagatccatctccgtcaccaaactcatgtagttcctttgagctaatagacatggatgctggcagcttgtatgaaccagtttctccccattggttttattgtaagataatagattctaaggagacatggattcctttcaactctgaggattcacagcagctggaagaggcatatagctctggaaaaggttgtaatgggagagttgttcctactgatgggggcagatatgatgttcatttgggggagaggatgcggtatgctgtatactgggatgaactggcatcggaagtgagacgatgtacgtggttttacaagggggacaaagacaataagtatgttccctactcggagagcttcagccaagttttagaggaaacttacatgcttgctgtaactttggatgaatggaaaaagaaactggaatctccca

SEQ ID NO: 4075 - DNA, 14298 bp, Homo sapiens
  source 1..14298: mol_type = genomic DNA
atggtcccggaggagaggagggtaggtttgtcttctgatgagacatcatctgattcccttaagtcttggcactccatatgtgtcttggacagcaaagaacagcccttggcctgccagcagaaacagaggcagttcgtgaagccagtgactgagtcagagcagcccacagtgctggaactcctgctagctgagctccgaactctgttctcagctgtgttgcaggacagtagccctgcagcttggcgctatcttcatgcagtactgggtctactgcctccatatcgtgagttgctagttggccaccttgatttgctgcccttcctggagcagctgtactgctgggcaccctgggtccaaacccacctccatctggacctgctaggtgccattgtccaggcctttcctccagacagctctttgttagacagtgcttcccatgctgactgctgtccccagaagcggaggctccatcacaggcccccatgcccagcttgcccttttgtgcaggcccagtggagcaggcagcaagtaaaggaggagctggccacctggctgcgaccattgacactgcctgagctacagcgctgcctgggcattgttggtgctcaggtggccctagaagaggctgtgtggctggatggacttagtctccttcccttggcactggcagcggacatccctgtacggtatgaaagcagtgacactgacaatgcagaggtggagcctgttggaagaaaagagaccaggtctcagcttgactatgaagttcccagggaaaaggccttccaaaagagcagcaccggcttttcacctgagacttccttcctggatagccaggtgatgactgctctgaagatggagagatacctgaagaagatccacttcctctatctcaatgtggctcccagccggtactttaggccttacagcctgatggtggtgccacccgacaaggtgaatcccgagcactacatcttctctccctttgggatcttgcatgtacatcctgtggaaggtagcgagacgatgacactgggtacctggcaccatcactgtgttctctggcagcagctccagttcattccattctttaagtattgcctcttacgcaagtcctttacctgttggaagaagaatgtgagattacaggggctgcatcgactccagaaattcctagagaatcatctgctcttggctgtgccccactttggagctgggctactccatattagcaggcttctgcaggagctacactctgtgtcctggctaccccaggaactggatcggtgctatgagctgctggacctgcagacggctctagccgaggagaagcataaggctctacggctgctccatcgttgcctaaacctctgcacatccattcttcgactggttcacgaggacacataccacatgcaacagtgcctacaggagcgagtacaaaactgtgacaggatcaggacaggccaaggctccatataccttcagagggtacagcacaagcaactggagcagaagctgaagcaagcagaggcctggtggctgcagctgggaaagtttgcccgcctggttgactacatgatttgtcagagcctcatttctgtcttggaagagcagataacctcttttgtggccaacatccttcaagccccaaggcagaaaccctttctctcatcacagctggtctttgatgatcatggtcaactgtctcatgtgccctgtgttgaaaatatgatccagactctaactggaggcctacagtctgtcaagacctctgccttgcaggtagtgcagtctgcagacctgaagacctcctcggattccctgtattctgaagaagaagatgaagaggaggactcaaaagacgaatttctgatgcccaagttccagggccagcccagcgatgctgtgagcatcttctgtggcccgaatgtgggattggtgtggccctggaagtctcacccaattgctggtatcttggaggtccgtggatgtcggctgcggggccaatacttcccccacaattataagcagctggaggaagacctggacaacaaccctaagatccagcaggcactgaatatacaacaggtgctgctggagggcgtgctgtgcaaggtgcaggaattctgcagggaacatcattggataacaggcatttatgaattcctgcaatcctgggggcctcagaagctggaagacatgagaggtggtcccatcaagaactacgtgacgctggtgagccgcctgaatgtttggcaggcccgtgtctccagtatgcctatcgagttgctcacaaaaggcgggttgctgctacttagctgccatgatgtacaggcagagatggaatccaagctgaacagcataaggaaggacattcttgcacacgtgcaaaatgagtgctggaacctcagtcaacaactcatgacagagctcacagatttcatgcatatcttccgaaccatcaactcagatattcatgccattgcacagtgcacccagaagttgaatgaagccaatgaacagtacgtcgagctggaggagcgaatggaatacgtacgggcactccacgaactcatccgcaaccactttagcctctttagtgctgagaatgaagcactggacatctcggtgagaaggcaattcggggagtcacccatccctccctgccctcctcccccacaaccacatctactccactgccctctgcttgccccacagcttctggatatgtgggaggcatttcagtttgagaaaagccaggcttcagagttcctgctcagcaagcgacatgccattatgcccaagctgcagcagctgatggcagcagcattggcagagctggaaggcctgcttgcgaaggccctctccggtccctttatggaccccacacaagatcagaggagtactgagcaccagctcgtctccctagagcgtcagttccagaacacagtcagcgacctcagtgaactgcaccacgcctatgccatcttcactgaggatgagactcctgtgcccttgccaatctgtgggacacgtcctattgtgcagcagcagcgcatatggcacctgtaccgagtcatctccgaaaacatcagcgagtggaagtgcatggcttttgccaagttcagcccagctatggcccaggagaagacagagggctggctgacagaggcagcacggatgagcacaaccctggagctgcacagccccgtgctgcagcactgcatgcgcatcctgggggagtttcgcagctacctgcccctgctcactaagctgggcagcctccacccacagagcctcaactgccagtgtctcctgcgtgcccttgggctgggcagtctccaaactatagaactcctaacgctgggccagctgcttacttatccactgctggagtttgcagatcgaatcaaccaggtctggcagaatgaaaatgaacgaattcatgcccaagagactatacggcggttgcagcggtactgggaagcgcgccagctgcgcctgctcaacttcatcctgcatgtaccctacgagcccccagcctcagagcgctccaagaggcaggtgctccgcagcccccaatgggaggtagtggacaaagatagtggcaccttcatcctctcagattacagcaacctgcaggattccatccaggaaagtcttcaggtgttgtccaagatcttggccatcgaaaagtcaggagatttaaacaaaatagctttggagtgggtggccatcatgcatggcctgggtgccctgctggaggtgtggctgactttccagcagaagtggatttttctgaataaagttctgcatgagatgaagatccagtttcctaatgctgacctgaactctcgtttcaaggtcatggatgaccagtatcgaaccctgatgcgcatctctgtagctgaccccatggttctgtcacttgtagtgcccagtgccgagaggagcccttacttccaaggccagcagctgcaacaactgctgcaagcaggatcggtggagctggagggcatcatcatgagtctggagagcgtgctctatggggtgtgtgctcacttcccccgcctcttcttccttagtgacagtgagctggtagccctgctggctgctcgactggaatcatgcgaagcccagctatgggtacgacgctgctttcctcatgtgcatgctgtgagcttcaggtcttgcccaactggtgagaaaaacacagatgactgggagtcaagcccaaacacacagactcaggtggaggcacttgcagtgctaggggcaggtggggaggaggtgaagctgcagggtccccttcctctgcatccagatctccctaagtggctggcctctctggagaagtgtctgcgcttggcactggtgcacatgctgcagggctgtgtggctgctcgccttgctcgaggcccatctctaggtgaggccctcaagcaactgcccaagcaaaacaagttgtacctgcaactgtatgtccagcactggatcgacttagtccaggccttcccatggcagtgtgtgctggtggcagaggaggtggtatggcgggccgagatggaggaggctctgcttgagtggggtaccctggccatggtctccatgcatatgcgcaagcttgaggtactggtgaattttatgcgggcccagagggcttcccaaggtgggcagtccctgccttctgtccgccagaccagccttctcagtgccctgctggtcatggcagtgactcaccgggatatagcacagctgctggaacagcaccaggtcagtgatctcacagactttcactgggtccgccaactcaagtatcacttgggttcacctcacataatccccaaaagccccctacagagtcttaagactattgcatcttctgaaccctctctgtcaccagcggcatgctggatagatgtgctaggcaggtccttcctgtacaattacgagtatctgggacctagactagggcctctacccagcctactgcctgaacggccagccctggtactattattggccctagaggaggtggcctgtgggaccgtactgggtcctaatggtgtgggcaagagagctatagtgaacagcctggcacaggccctgggccgccagctggtgatgctaccctgctcacctcagatagaggctcaatgcctgagcaactatctgaatggtgccctgcagggtggtgcctggctgctgttggagaaagttcatcagctgccccctggcttgctctctgccctgggccagcgcctgggtgaactgcaccacttgtatgccccactgtaccaggaggcttcccgaaacacaagcaccatagaccccacccagccccagctccttggcagtagcttctttgaaaaacatcacgtgtctgtgcgccttggctatggctgtctcctggtactgcgtgccctgagctctgctgtgcctgccaacctgcacctgctgctgcggcctgtggcattggcattgcctgatctgcggcaagtggcagagctgactctgctgggtgcagggatgagggatgccttccagatggctacccgcctatccaaattcttctctctagagcgtgagctggtgtctgggcccctgccctgccgcctgccactgctcaagcagatactggaagacacaatacggacactaaatgtgaccaaggaggaaccgaagtgccagaagcctcgcagcctagctgccattgaggaggctgccctactgcgctcaccactgtttagcattctcaatgggctccacctgcacaacctccgagggctgttgtgtgcgcttttccctagcgccagccaagtgctggcagaacctatgacttacaagctgatgaagccattggtggtggaggaactgcaacaggtaggtctggatcccagccctgacattttggggtccttggaacagttgagccaggccctgagccgggcctcaggcattctgctcctgggccctgcgggcagcggcaagaccacttgttggcacagcttatttaagatccagaatcggctggcagccatggaggacacctcaacccaaggctgccagcctgtggaaattacccacctgtaccccagtggcctcagcccccaggagttcctgggatggctagagggctcctgctggcatcatggcatctttcccaaggtacttcgtgcagccggtcagtgtaacaacatgggccaaaagaggcagacagaggaatcaatcgggatccagcactggataatatgtgatggagcctccaatggtgcttggctggactccatcacttgcctcctgagtgagcttccccagcttagtctccccagtggacagcagatagcacgacccccaggcacctttctcttgatggaggtggctgacacaacaggcatatcccccacagtggtaggctgttgtgccctagtctggtgtggtggagagcagacttggcagtgtatacttagtgccctgatggcatcccttccttatgagtaccgcctgcagcaccggacagtcgctgagctcaaccacatggctgaggttctggtgcctgcaacattgcgattcctcacctgccaaggtgtcagctctctgctgcaggtacacgggcagcaggctgtttgtgcaggtgtggcagaagttaccagcatggcacgcatcttgcatagtctgcttgacctccaccttcgcctaaaggaggagaaggcccctggcccagaggacctcagctatagtgatcctgtggcccaaagcttcaggtcttcaaaaagcagctttctaaaccggtcccaggttgacagtgacgatgtgccagataagtgcagggaacacttgctggctgtcagcagttttctttttgccttgatctggggctttggagcccaccttccctccaggttctggcccatctttgataccttcataagggattctattagtcgcctctccaactaccctgagccaccaccctcagccttggtgtttgatctacatgtaagccctgaagatggaacactggtccccttcactggccaatacctgagcagccacatcaaaggaactttgggcacctttcacccttctatccagactgaacggctcttgtatgtggtggacctgcttctgtcagggggacagccagtgttgctggctggagaggcagcaacagggaagtcagcctttgtggaggtgctggtagagccacatcacccttacatatacagccccatccaccctgccttcagttcctcccacctccgtctcctgctgagcagaggaatccagggccaaacacaagccagcccacagcctgggcatcaccaggattctaaaccctccctcctcttcttgctggaggacctgcacctagccacttctgacccagagaagagctgccagccagtgttggagactctgcgccaggccatggatggcactgtgtatgcccacagcaccttggaactgcagacgctgcagcctacagtcaacttccttgccactgtcacagtgccaggatactgtgagcgcccactgtgtccacgcctctttcgactcttcacagtcctggccctggaaagcatgacccaggccaccctgctggaaagacatgtgcctatcattcaggcttggcttgagcgtttcccttctgtggaacgggagcgtgctctggcacgaggtctggttagggcctcagtagaggcctgggaggctgtgtgcaattgcttcatgccttcacccctccacccacactaccacttctccctacactctgtgagccacctactgagcagcctgcagctgctgcccaacagaacaggctcccgaggttttgtggactatcccaaccaccaggagcacttgcgccgggtgtcaggcctgcgaggcacttgtctgaccgttatgatggccacacgcaatgtggtgcgtctttggttgcatgaggcacagagaaccttttgcgaccggctggacagccccagggaacgctcctactgtgccaagctgctcctagtagtagctcaaagtgtcttctgctgtgggccagggccccagcacctgggcaaggaccatcaggagagtgaggaggaggaggaggaggagagggtgcccgaagtagaatctgaaggggagttggcccagtgggaggacttcagcaacagcaatagtgaaacagaggaggaagaggaaccttatggccttcaggtcgccagagtctcaaactccagagatccaagtctaacaccatccataggaccagtaagcagggggatgaaggaaagcataagtcacaagataaggcaagagaaaggcacaagggcatccaactataggctccaggtaaggagatcattcaagacttggtggcagaagaaaccccagatggacctgatctcacccttgttgttaccagtgttactactacatccccaggaaaagccctcagacctggtcttcagtcaggagctgatactggggcctaactctgagacccccaacttgtacctggaacgacagtgggagaagctagaggagcagttggccacctcagctgctcaactgaagttgagcccccacctggcccggtgtcattccatggcccagcacgtggcccgcctggtccgggtgctggccaggccccggcagcatggcctgctgctctcgggggctctgggtactgggcgccacactgccatcactctggcttctagcatttgtcaggcccatttctttcatctaccatctgggtcagaggaggccattctccaatgtctacgagatgccagctggcatgctggcatgttaagccagccagtggctctgttggtacccagtggtgtggatctcactacacttcatcgcctcctggccctggcaacctcaggcagtttccctggccagtacacagaagcagatttggaccgcattggagaacacctccccagggagaaccttggtgtcaaacagaacatcaagaaggaaatggtgttgcagaggttccaccagcaagtgtgcagccaccttcacctgttcttcctgattggagataaacaggcccacaagcagctgccctccacccttttcctgaggctccttcaactggccactgccagcattgaccgctatgaaccctgggaccaagctgccctggccaaggtggcccagcatcacctggagggtgctcagagtgtgccccttgatgacggctcctggaagtacccagacctccaggcctcaattcccagtgtggccaaagccatggctcttatccacctttcggccacccactaccatgagcacctgtgccctgcattgccactcgtcacccccaagaccttcctagacttcctggacactttcctgatgctgcagcaacagacaatcctgaagattaagaacaaggcccagcgggtccagaatgccttggagaatctgagaatgctgattaaggagcacggtacccatgccaatctgatctttgacttggaacagcagctgaaagactccggcaagagtctcagcatgtttcagcagcagctagagcaaagcaagctcctatacaagcagcagctggaagagtgtcggcatcaagagaacctcattgagaacctggccaggcaacgggatgccctgcaagctcagcgagaggctttcctggagcagatgagcaaggcatttctggagcctctgagccagctgcaggtggctgactttgaggagatacggagctatcgagcaccaccagaatctgtggtccgggtaactgatgcaatgtgtgacttgttccaccatgaaacaggctgggccagtgccaaacagctgttatgcactgaggatttttatcaggagctggtgttcttccccaaggagaagataacagactcagagctgataaagttacatctaattctgaaggctccaggtatggacgatgcagccctgcgggcagtgagccgacctgcagccagcctggcagcctggctctgggctgttctgcactatgggctggcgcattgccggggactgcccacggacctgctgctgcagcaagtggaggcaacactcactcgggagcaggcccgcctgggctactaccagtttcaggcccaggagaccctggagcataatttggccctggctaagatggtggaggatgcccaagcttcccacaactgcgtggcaaagaccctcagtcaagcacagtgtgggcagtatcacaaatggcccatgaaggctgcactgctcacgcctatgcgtgcctggactacacagctccagaagctgaagggacgctgcatgactgtgtttggagataccctcctatgttcagctgccatcatctacctgggtcccttcccaccattgcggcgccaagagctactggacgagtggttagctctgtgtaggggctttcaggaggctctgggcccagatgatgtggcacaggcactgaagcggaagcaaaaatctgtcagcataccaccaaagaaccccctgctggctacacactctcccttcagtattctgtccttgctgagctctgaatcggagcagtaccagtgggatggaaacctgaagccacaggcaaagtcggcccacctggcaggcttgcttctgcgaagccccacacactacagtagttgccgttggcctctgctgcttgaccccagcaacgaggccctcatctggttggacccgctgcctctggaagagaatcgatcttttgcgccagccctcactgagggtagagggaaaggcctcatgagaaatcaaaagagagagagtaaaacggacatgaaagaggaagatgatgagagtgaagagagtaatgaggctgaggaccagacaaaagagcagaaggcagaggaaagaaaaaatgagcaggagaaagagcaagaggaaaatgaagagaaagaggaggagaagacagagagccaggggtcaaagccagcctatgagactcagcttccatcccttccctaccttagtgttctttcaggtgctgacccagagctgggttctcagctccaggaggcagctgcttgtggcctgcctgtgttactgaccaatgtggagctgggtctagggtgcgaagaactgcaatggctgctgcaacgggagcagctgagtccaccccaggtgcagcctggcttctgtctgtatctcagcaccaccctctccctctgtgccatggaaaaagtgctaggttgtgaactgctaaaggggctgaatgtgttggatctgggcctgaacatggaaatactggaagaacagatgctgcatgaaatcttgtgcagagagtatcctgaactcgagacccgctggcaggacctaaagatcagagccctagatacctgcaaggctgtggaggctgctgaggagcggctgctgacgatgctgctgttccagaatccgaagcgtcagaagccagccaagtttctgcggaacatagtgagggcccaaggaaagctatgccagctgcgtgctcattgtgaagagttagaagggcagaaactacaggagatggtattgtgggcaccctatcgacctgtggtttggcatggaatggccatggtaaaggccctaagccaactgcagaacctgctgccacttttctgtatgagcccagagaactggctggcagtcactaagcaggctctggacagcatgaagccacgtgagattaatcacggggaggacctggccagccatctactgcaattgagagcacacctgacccgccagctgctgggcagcaccgtgactgcactgggccttacccaagtacccttggtgggtgcattgggcgctttggctctgctgcaagcaacagggaaagcatcagagctggaaagactggcactctggcctggactagcagcctctcccagcacagtccacagcaagccagtctcagatgtggctcgaccggcctggcttgggccaaaagcctggcatgaatgtgagatgttagagctgctgcccccatttgttggcctgtgtgcctccctggcaggccactccagtgcttggcaggcttacctgtcactgtcatccacagtgctgggtcctgcacctgggccagggcctgagccactcagcctcctccagaagctgatcctgtggcgcgttctgcgacctgagtgcctggcaggtgccctggcagacttcaccactagcctcctgggtcggcccctggatgaaaacacgtatgctcccaccatgccctttaaacatagtcaggctactcagcccatgctgatcttgttgccaccgcctggccacccctcagccactctgcatcctctgactgtcatccagaaactggctgccaagtatcagcaggggcagaagcaactgcaggtgatagccctgggctctgaagcctgggacccagtctcagttgtggtcagcactctatcccaggctatgtatgaggggcactggctggtgctggacaactgtcatctgatgccccattggccgaaagagctgctacagctcttgctggaactgttaggcagagccaaggtggttgcagacctggaatcagaacagcttttagaccaacctgaaagcaggaatgtaagcactgttcacagagattttcgtctttggcttattgtgcctgcagagtctagtgcttctttgccagctgtgctgactcagcactccatgcctgttttctggaaccagtccctggagctgggccatgttttgattgacagtgtggagctagcccagcaagtactctacatgcaaccccccacccaggcactacctctgctcctcctccatggcctcctgctacaccggcagctctatggaacaaggctgcaggcacacagggggcgctggagtcaagtgactctaacccaggttcttcagacccaagaccagctgtgggcaagtcttagcaatccccgtgctgccatgcaagagctggctgcttcagttttctacgggggtcctctgggggacactgaggacagggaggccctgattagcctcacacaagcctgcctgagccccagtagtgggagctgggtccagccacacacacctcagtctttgctggccacgctcatgcccctcccagagctaagggagctggatgcaatggcagagtgcaaggcccagatgcacctactgccctcaccacctgaaccccggctctgcggactgagtgagggcccccaagcctggctgttgcgacgccagagtcgcgctctcttgagtgcgctgcagcggagttcacccgtgtgggttcctgagtctcgaagaggcgcccagcttgcggaaaggcgactgcggcaacgcctagtgcaagtcaaccggaggctggagtcactgcaggatctgctgacccacgtgattcgccaagacgagtccgacgccccgtggtcagtgctggggccaaatgcacggcggcctctggagggcgtcttagagaccgaggctctagaactgagccagttggtgggcacgctacaacgcgaccttgattgcctgttgcagcagctgaagggcgcacccccgtgcccctcccgccgctgtgctgcggtggcccacgctctctggactggccgcctacccttgccttggcgacctcatgcgccggccggtccgcagccgccctggcactggctgcgacagttgtcgcgccgtgggcaactgttggttcgttacttgggcgtgggcgcggacgcgagcagtgatgtaccagagcgcgtcttccacctgtcagcctttcgccacccgcgccgcctgctgctggcattgcgtggggaagctgccctggaccagaatgtgcccagctcgaatttccctggtagccgaggctcggtctccagtcagctccagtataaacgtctggagatgaacagcaaccctctgcacttcagggtggagaatggtccaaatcccacggttccagagagagggctgctgctgatcgggctacaggtcctacatgcggagtgggacccaatagctggagccttgcaggacagtccttccagccaacccagccctctgcctcccgtcagcatcagcacacaggccccgggcaccagtgacctgccagccccagccgacctgactgtgtactcgtgtcctgtgtacatgggagggccccttggcaccgctaagctgcagagcaggaacatcgtgatgcatctgcctttacccaccaagctcacccccaacacctgtgtccaaaggagggtccatgtgtgcagcccacccctgtcttgagcccgtctaccaaaataaagttgtagtgattccatg

SEQ ID NO: 4076 - DNA, 899 bp, Homo sapiens
  source 1..899: mol_type = genomic DNA
gaagcgcgtgaggaccggacgggcggcgccgtggggccttcccagggctctaggccgcctttagggtgggggaggggccgggcgaggggacgaccgccagcctcgggatttggggcttgggtcgtttctcacaagcaaccggaggcctgcgccgctgccggcgtctcccgggtgggagctcagcgcggaggctggggtctcggccggggacgtgtggggtgtgcccggaccctcccctccgcatcccgccccttaagcagctttaaggggccggagccggcggctatttctatcccaggaaatccccgggccatctgtgaccaacaaaggcccgagcccccccacccccgcgagcccaacaacagggcccaacggcccctggctccggggtggggggatcgggcctggatcggctgccggtgcctgccagtgggcagggttaggcttgctgaggggcaggcacaggagtcctggctgagctcatggcctgaggctgcctagcggccacggggaatggttgcaatggcggaggcagaggcaggggtggcagtggaggtccgtggactgccccctgccgtgcccgacgagctgctcactctctactttgaaaaccgccgacgctctggagggggacctgtgttgagctggcagagactgggctgtgggggcgtcctcaccttcagagagcctgcagacgccgagagggtcttggcccaggcagatcacgaactacatggtgcccagctgagcctgcggccagctccaccacgagcccctgcacgcctgctgctccaaggactgccccctggcaccacgccccagcgcttggagcagcatgtccaggccttgctgcgggcctcggggctcccagtacagccttgctgtgccttggccagccc

SEQ ID NO: 4077 - DNA, 1264 bp, Homo sapiens
  source 1..1264: mol_type = genomic DNA
ccggcggagcgtcctcgcatggagcgcgagcccagcgcctcggaggccgcccccgcggcggccgcgctcttcgcctggggtgcaaatagctatgggcaacttggcctcggccataaggaagatgtgctgttgccccagcaactgaatgacttctgtaaacccaggagtgtcaggaggatcacaggaggagggggccactctgcagttgtcacagatggaggagacctctttgtttgtggcctgaacaaagatgggcaactggggcttggtcacacagaggatatcccatattttaccccctgcaaatccctctttggctgtcccatccaacaggtggcctgtggctgggattttacgattatgctcacagaaaatggtcaagttctatcatgtggatccaactcctttggccagttaggagttcctcatggacctcgaagatgtgtggttccccaggccattgagctccataaagagaaggttgtttgtattgctgctggactgaggcatgcagtagctgctacagcgagtggcatcgtgttccagtgggggactggtttggcatcatgtggacgacggttgtgccctgggcagactcttccattgtttttcacagcaaaggaaccaagcagagtgacaggtctagagaattctaaagcaatgtgtgttcttgctggctcagaccactcagcttcattaacagatgcaggagaggtgtatgtttggggaagcaacaagcatgggcaactggctaatgaggctgctttccttcctgtgccccagaaaatagaagcacattgtttccagaatgaaaaggtcactgccatctggagtggatggacacacctggttgctcagacaggtctcttgtggctcagagcataatttggcaataattggtggagtgtgttactcttggggctggaatgagcatggcatgtgcggagatggcactgaagccaacgtctgggccccaaagccggtgcaggctctgctgtcatcgtcaggactccttgtgggctgtggggctggccactccttggccctctgccagctgccagctcaccctgcattggtccaggaccccaaggtcacctacctttccccagatgccatcgaggacactgaatctcagaaagccatggacaaagagagaaactggaaggaaagacaatcagaaacttcaacccaaagccaatctgactggtccagaaatgggggactgtgatagagaatctttaataaagtggcttttcccaccaaa

SEQ ID NO: 4078 - DNA, 560 bp, Homo sapiens
  source 1..560: mol_type = genomic DNA
aaactgtcatggcgctggtggcagtgtagcagtgaggacaaccagaggtcactctcatcaccatcttagttttgggtcttgctctgtcacccaggctggagtgccatggcatcatcatagctcactatggccttgatcctcctgccttagcctcccaagcagctggtattacagaccacggtgtgaacacatgaacagaagacgaaaatttcttctagcctcagtacttgctctccagaattcaagttttatatatccatcatgtcagaagtgcttctctaggataatcctggtctccaaaaggtctaattgtccaaaatgtggctctactggtgaatctggaaatgccaattacagatacaaactttccttaaaagttgcagaatcaaacaaattgtttgttattactgtatttggaagttgcttagatacattttttggtcttactgccactggtttgcacaggtacattcaggatcctaataaaattccagaaacactggacaatgatacaactcagaatctattaactaaagcagttgaaacttgctttgttggac

SEQ ID NO: 4079 - DNA, 818 bp, Homo sapiens
  source 1..818: mol_type = genomic DNA
ctggctgagtgagatggcagctggcttggcaaggggacagcacctttgtcaccacattatgtccctgtaccctacatgctgcgcctatacccaggaccgatggtaactgaggcggaggggaaaggagggcctgagatggcaagtctgtcctcctcggtggttcctgtgtccttcatttccactctgcgagagtctgtgctggaccctggagttggtggagaaggagccagtgacaagcagaggagcaaactgtctttatcacactccatgatcccagctgctaaaatccacactgagctctgcttaccagccttcttctctcctgctggaacccagaggaggttccagcagcctcagcaccacctgacactgtctatcatccacactgcagcaaggtgattctgccaaaacatatctccttaaaagccaactggagcttctcatcagcatcaatgtgaagccaaaaatccttaggaggacagagggagtccctcacaacctagactggtccccttccctccagctgcctcaactgtccacaggactctcttcccacctgcggccacactgtgcaacctggaatttccccacctgggcggactcatcacgtcatcaccaattggatgcatcttctgctctgtgcagctggtgaaatctttctcaacccttgagatgcagcccaatcttctcctaacatctggattcctctctgtcactgcattccctcctgtcatcctgcctttgttttcttgccctcctttctctcccgggtgataggcattaactaaaattaaataaaaattcagatcatccttgca

SEQ ID NO: 4080 - DNA, 2351 bp, Homo sapiens
  source 1..2351: mol_type = genomic DNA
gggaagcgaccggctgctgggcttaaggcgggagtgaccgcttaaccagtgagggaagcactgaagagcgccagtcgacgtgggtgcgacaactcgcggagtcttaggagcaaaacgtctggggcctgcgagccaggacccttctgaagccttaggtgtctatcggcgacgtgtacggtcactgcagctccggagcgcggaaccctcagccaggaggcgcggctggtcggtcccaggtcccggcctccgtaatgagagcccggaaccactctttgtgccgcagcttcgcagattcctataggcaatggaaactgatctcaattcccaggacagaaaggacctggacaagtttattaaattttttgccctcaagactgtccaagtgattgtccaggctcggcttggtgaaaagatttgcactcgttcatcatcttctccaacgggttcagattggttcaacttagcaatcaaagacatcccagaggttacacatgaagcaaagaaggcactggcaggacagctgcctgcagtcgggaggtccatgtgtgtggagatttcacttaagacttctgagggagattccatggagctggaaatatggtgtcttgaaatgaatgaaaagtgtgataaagaaatcaaagtttcctacacggtgtacaacagactgtcattgctgctgaagtcccttcttgctataactagggtgacaccagcctataggctctccaggaaacaagggcatgaatatgtcatattatacaggatatattttggagaagttcagctgagtggcttaggagaaggcttccagacagttcgtgttgggacagtgggcacccctgtgggcaccatcactctttcttgtgcttacagaattaacttggcattcatgtctaccaggcaatttgagaggaccccacctatcatggggattattattgatcactttgtggaccgtccctatcccagctcctctcccatgcacccctgcaattacagaactgctggtgaggacactggagtaatatacccgtctgtagaagactctcaagaagtgtgtaccacctctttttccacctccccaccatcccagtgtgtgtttactgtcacaaaggcacattttcagacccctactcctgtggtgacggacaccctgagggtccccatggcaggactggccttttcccatcaactctcaagctctcgcctttcctatcagcctgctgccctgggcgttggatcagctgacctggcttatccagtagtgtttgctgctggcttaaatgctacacaccctcaccagctgatggttcctgggaaggaaggtggggtaccccttgctcccaaccagcctgtccatggtacccaggctgaccaggagagactggcaacctgcaccccttctgacagaacccactgtgctgccacaccctccagtagtgaggatactgaaaccgtatcaaacagcagtgagggacgggcctcccctcacgatgtcttggagaccatctttgtccgaaaagtgggggcttttgtcaacaaacccattaaccaggtgaccctgacgagtttggatataccctttgccatgtttgctcccaagaatttggagctggaggataccgatccaatggtgaatcctccagattccccagagactgaatctcctctccagggcagcctgcactcagatggctccagcgggggcagcagtggcaatacccatgatgactttgttatgatagactttaaaccagctttttctaaagatgacattcttccgatggacctggggaccttctatcgggagtttcagaacccacctcagctgagcagcctctccatagatattggagcacagtccatggctgaagacttggactcattaccagagaagctggctgtgcatgagaagaatgtccgcgagtttgatgcctttgtggaaaccctgcagtaaaagtatccttgagtcccagcagcaccccctttttgtggccccagggcataagcagcctcccatgcatcagctgctcccacccctcatcctgctctgagccaggtggaagggaggctggcttctcccatggggacccagaagtccctactcttggacctcctggagactccgtggcggcagtcaagcccagtgcccagttggagaagactcacgtgctggccttggagatgggaagaaccttcgtacgaaaaagccctcagcagggccatctgtgtgccctgcccatcaccaactgcttcccaagggtgtcatcctgttcctcctgctgccggcctcctgcctgggcctgccttgcagctggccccttccctgcctgctgtcaccatccactgtt

SEQ ID NO: 4081 - DNA, 4404 bp, Homo sapiens
  source 1..4404: mol_type = genomic DNA
acacacacacacacacacacacacacacacacctgagatggggtagatcattgtatttttgtgtctaccagcaagaaaaggaaggaaaaactaagggctctgtgtatgaatgacaaggataccttcagccagctcattctggatgaatgaatgattacactaagtgtcctccacattcctctgtgggctcacttcatggactcactttgcgtgcttgttaaatgtgctgtgttgctcccaagaccatgtaaagcctactgaccactaacctccctcacagcagaaactagacgtcaggttaaaatgggcaactccgacagtcagtacacccttcaaggatctaaaaatcatagcaatactattactggtgctaagcaaattccttgctccctgaaaatacgtggcattcatgcaaaagaggaaaagtcattgcatggatggggtcacggaagcaacggagcaggttacaagtccaggtccctggcccgaagctgcctttctcactttaagagtaaccagccttacgcatcgagactcggtggccccacatgcaaggtctccagaggtgttgcctactccacgcacaggacaaatgccccagggaaggatttccagggcatcagtgctgctttctcaactgagaatggcttccactctgttggccacgagctggcagataaccacatcacctccagagactgcaacggacaccttctcaactgctacgggaggaatgagagcattgcctccaccccaccgggcgaagaccgcaagagcccccgagtgctcatcaaaacgctggggaagctggatgggtgtttaagggtcgagttccacaatggtggcaaccccagcaaagtgcctgcagaggactgcagtgagccggtgcagctgctgaggtactcacctaccttagcatcggaaacctcccctgtgcctgaagccaggagggggtccagcgccgattccctgcccagccatcgcccctctcccacggactctcgcctgcggtccagcaaaggcagctccctgagttctgagtcatcctggtacgactccccttggggcaatgctggagagctgagcgaggctgagggctccttcctggcccccggcatgcctgaccccagtctccatgccagcttcccacctggcgatgccaaaaagcctttcaaccaaagctcttccctctcctccctccgggaactgtacaaagatgccaacctggggagcctctccccctcaggtatccgcctttctgatgaatacatgggcacgcatgccagcctgagcaaccgtgtctcttttgcttccgacattgatgtgccctccagagtggcacacggggaccccatccagtacagttccttcactctcccctgtcggaagcccaaagcctttgttgaggatactgcgaagaaggactccctcaaagccaggatgcgacggatcagtgactggacgggaagcctctcaaggaagaaaaggaaactccaggagccgaggtccaaggagggcagtgactactttgacagtcgctctgatggactgaatacagatgtgcagggatcctcccaggcatctgcttttctgtggtcagggggctctactcagatcctgtctcagagaagtgaatccacacatgcgattggcagcgatcccctccggcagaacatttatgagaatttcatgcgagagttggaaatgagcaggaccaacactgagaacatagaaacatctacagaaaccgccgagtccagcagcgagtcactcagctctctggaacagctggatctgctctttgagaaggaacagggggtggtccggaaggccgggtggctcttcttcaagcccctggtcactgtgcagaaggaaaggaagcttgagctggtggcacgaaggaaatggaaacagtactgggtaacgctgaaaggatgcacgctgctgttttatgagacctatgggaagaattccatggatcagagcagtgcccctcggtgtgctctgtttgcagaagacagcatagtgcagtctgttccagagcatcccaagaaagaaaatgtgttctgcctcagcaactcctttggagatgtctaccttttccaggccaccagccagacagatctagaaaactgggtcactgctgtacactctgcttgtgcatccctttttgcaaagaagcatgggaaagaggacacgctgcggctgctgaagaaccagaccaaaaacctgcttcagaagatagacatggacagcaagatgaagaagatggcagagctgcagctgtccgtggtgagcgacccaaagaacaggaaagccatagagaaccagatccagcaatgggagcagaatcttgagaaatttcacatggatctgttcaggatgcgctgctatctggccagcctacaaggtggggagttaccgaacccaaagagtctccttgcagccgccagccgcccctccaagctggccctcggcaggctgggcatcttgtctgtttcctctttccatgctctggtatgttctagagatgactctgctctccggaaaaggacactgtcactgacccagcgagggagaaacaagaagggaatattttcttcgttaaaagggctggacacactggccagaaaaggcaaggagaagagaccttctataactcaggtcgatgaacttctgcatatatatggttcaacagtagacggtgttccccgagacaatgcatgggaaatccagacttatgtccactttcaggacaatcacggagttactgtagggatcaagccagagcacagagtagaagatattttgactttggcatgcaagatgaggcagttggaacccagccattatggcctacagcttcgaaaattagtagatgacaatgttgagtattgcatccctgcaccatatgaatatatgcaacaacaggtttatgatgaaatagaagtctttccactaaatgtttatgacgtgcagctcacgaagactgggagtgtgtgtgactttgggtttgcagttacagcgcaggtggatgagcgtcagcatctcagccggatatttataagcgacgttcttcccgatggcctggcgtatggggaagggctgagaaagggcaatgagatcatgaccttaaatggggaagctgtgtctgatcttgaccttaagcagatggaggccctgttttctgagaagagcgtcggactcactctgattgcccggcctccggacacaaaagcaaccctgtgtacatcctggtcagacagtgacctgttctccagggaccagaagagtctgctgccccctcctaaccagtcccaactgctggaggaattcctggataactttaaaaagaatacagccaatgatttcagcaacgtccctgatatcacaacaggtctgaaaaggagtcagacagatggcactctggatcaggtttcccacagggagaaaatggagcagacattcaggagtgctgagcagatcactgcactgtgcaggagttttaacgacagtcaggccaacggcatggaaggaccgcgggagaatcaggatcctcctccgaggtctctggcccgccacctgtctgatgcagaccgcctccgcaaagtcatccaggagcttgtggacacagagaagtcctacgtgaaggatttgagctgcctctttgaattatacttggagccacttcagaatgagacctttcttacccaagatgagatggagtcactttttggaagtttgccagagatgcttgagtttcagaaggtgtttctggagaccctggaggatgggatttcagcatcatctgactttaacaccctagaaaccccctcacagtttagaaaattactgttttcccttggaggctctttcctttattacgcggaccactttaaactgtacagtggattctgtgctaaccatatcaaagtacagaaggttctggagcgagctaaaactgacaaagccttcaaggcttttctggacgcccggaaccccaccaagcagcattcctccacgctggagtcctacctcatcaagccggttcagagagtgctcaagtacccgctgctgctcaaggagctggtgtccctgacggaccaggagagcgaggagcactaccacctgacggaagcactaaaggcaatggagaaagtagcgagccacatcaatgagatgcagaagatctatgaggattatgggaccgtgtttgaccagctagtagctgagcagagcggaacagagaaggaggtaacagaactttcgatgggagagcttctgatgcactctacggtttcctggttgaatccatttctgtctctaggaaaagctagaaaggaccttgagctcacagtatttgtttttaagagagccgtcatactggtttataaagaaaactgc

SEQ ID NO: 4082 - DNA, 581 bp, Homo sapiens
  source 1..581: mol_type = genomic DNA
actagctaggccgtgtggccaccctttggcacccgcaccggctcagacctgctcaggactcagccagggcacacagtttgtgttcttacgtgcatccatctgtctgtctgtgtgcgtctctgtggaggactgaggttttcaagtgaaagagagtgaagacatagtccagagagggaagtgtaaagctacaggctgaacataacttctttttttcaaagttccctgtgttgtgaactgagcttgggtgaagtgaaatctttgaggaagctaaagctgtgtgtatttgtggatcagacaagtgcagcaagttaatatcattggcttctgaaggggagagtgaggtgatggctgcgtttaagttggatttccttccagaaatgatggtggatcattgctctttgaattccagtcccgttatgtttcagcagaaatcaaggtagacgaagtaacctcttgtcctgaattttcatagttgctcattcttaataatggcagcagaagcaacaatgagagtaactacctcctcagctcaaagaaaatgaacggcaccctggaccacccagaccaaccagatcttgatg

SEQ ID NO: 4083 - DNA, 685 bp, Homo sapiens
  source 1..685: mol_type = genomic DNA
gggggcgggggcggcaggccgcgcggcgcagcgggtcagaggcgctcctgggctcgggccggggactcaccggtggccgggcgccgcaggccgggttaggcttgctgaggggcaggcacaggagtcctggctgagctcatggcctgaggctgcctagcggccacggggaatggttgcaatggcggaggcagaggcaggggtggcagtggaggtccgtggactgccccctgccgtgcccgacgagctgctcactctctactttgaaaaccgccgacgctctggagggggacctgtgttgagctggcagagactgggctgtgggggcgtcctcaccttcagagagcctgcagacgccgagagggtcttggcccaggcagatcacgaactacatggtgcccagctgagcctgcggccagctccaccacgagcccctgcacgcctgctgctccaaggactgccccctggcaccacgccccagcgcttggagcagcatgtccaggccttgctgcgggcctcggggctcccagtacagccttgctgtgccttggccagcccccggccagaccgggctctggtccagttgcccaagcccctttctgaggcagatgtccgtgtcctggaggagcaggcccagaatctgggcctggaggggaccttggtgtccctggcccgggttccccaggcc

SEQ ID NO: 4084 - DNA, 538 bp, Homo sapiens
  source 1..538: mol_type = genomic DNA
acgtccgccattttgggcgcttcgctgatggtgtcggtgagcgcgtttcccgcctgagcgcaactagcggcgggtcgtgggcacctccagataagaaaacaagctcagagagatgtggtgacttgctcaaatagtgacagaacttcctcggccatatggaggggtcatataatacccttgtgtcttcagtttgaggtacctcccataattttaaggggctcagaaggaaagaaaacatctcccaggaccagatgtggagtagatgggagttggagagaagctgaagcccaggcccagcaacaggctgggggcccaggtgcttcgggggtcccagccattaacagagcttcgtgcaggagagcttgtttcatatccatatcccactgtattcctgctaatctgctaatgcagtaaattggaggaaaactgttaccaggataacctgtaatgggcaaggagccacaaagaagaaaacatttcttttaatttttaaacttggtttgaaagaccagcatgttttggaaatttgatcttcact

SEQ ID NO: 4085 - DNA, 589 bp, Homo sapiens
  source 1..589: mol_type = genomic DNA
gcgcaactccacctgcttctgggaacccagggggaagcaagggaagaccgtgacctttgccccgggctgtggggagccccggagcctgggcccggagaagcgccagggttaggcttgctgaggggcaggcacaggagtcctggctgagctcatggcctgaggctgcctagcggccacggggaatggttgcaatggcggaggcagaggcaggggtggcagtggaggtccgtggactgccccctgccgtgcccgacgagctgctcactctctactttgaaaaccgccgacgctctggagggggacctgtgttgagctggcagagactgggctgtgggggcgtcctcaccttcagagagcctgcagacgccgagagggtcttggcccaggcagatcacgaactacatggtgcccagctgagcctgcggccagctccaccacgagcccctgcacgcctgctgctccaaggactgccccctggcaccacgccccagcgcttggagcagcatgtccaggccttgctgcgggcctcggggctcccagtacagccttgctgtgccttggccagcccccggccagaccgggctctggt

SEQ ID NO: 4086 - DNA, 5844 bp, Homo sapiens
  source 1..5844: mol_type = genomic DNA
gggcggcctatagatccaagagaaggtcctggacggcctccactagatggtagggatcattttggaagacctcctgtagatataagagagaatcttgtgaggccaggtatagatcatcttggtcgaagagaccactttggctttaatccagagaagccctgggggcatagaggagattttgatgagagagagcatcgggttctaccggtctatggtggtccaaaaggcttacatgaagaaagaggtagatttcggtctggaaactatcgatttgatcctagaagtggtccttggaaccgaggatttggacaagaagttcacagagattttgatgaccgcagaagaccctgggagaggcaaagggatagggatgacagagattttgatttctgcagagaaatgaatggaaatcgtcttggacgagacagaattcaaaacacttgggttccccctcctcatgctcgggtttttgattattttgaaggggccacttctcaacgaaaaggtgataatgtgcctcaggttaatggtgaaaatacagagagacatgctcagccaccacctataccagtacagaatgatcctgaactttatgaaaaactgacatcttcaaatgaaataaacaaggagaagagtgacacagttgctgatatagaaagtgaaccagtggtagaaagcacagaaactgaggggacaccactaacctccctcacagcagaaactagacgtcaggttaaaatgggcaactccgacagtcagtacacccttcaaggatctaaaaatcatagcaatactattactggtgctaagcaaattccttgctccctgaaaatacgtggcattcatgcaaaagaggaaaagtcattgcatggatggggtcacggaagcaacggagcaggttacaagtccaggtccctggcccgaagctgcctttctcactttaagagtaaccagccttacgcatcgagactcggtggccccacatgcaaggtctccagaggtgttgcctactccacgcacaggacaaatgccccagggaaggatttccagggcatcagtgctgctttctcaactgagaatggcttccactctgttggccacgagctggcagataaccacatcacctccagagactgcaacggacaccttctcaactgctacgggaggaatgagagcattgcctccaccccaccgggcgaagaccgcaagagcccccgagtgctcatcaaaacgctggggaagctggatgggtgtttaagggtcgagttccacaatggtggcaaccccagcaaagtgcctgcagaggactgcagtgagccggtgcagctgctgaggtactcacctaccttagcatcggaaacctcccctgtgcctgaagccaggagggggtccagcgccgattccctgcccagccatcgcccctctcccacggactctcgcctgcggtccagcaaaggcagctccctgagttctgagtcatcctggtacgactccccttggggcaatgctggagagctgagcgaggctgagggctccttcctggcccccggcatgcctgaccccagtctccatgccagcttcccacctggcgatgccaaaaagcctttcaaccaaagctcttccctctcctccctccgggaactgtacaaagatgccaacctggggagcctctccccctcaggtatccgcctttctgatgaatacatgggcacgcatgccagcctgagcaaccgtgtctcttttgcttccgacattgatgtgccctccagagtggcacacggggaccccatccagtacagttccttcactctcccctgtcggaagcccaaagcctttgttgaggatactgcgaagaaggactccctcaaagccaggatgcgacggatcagtgactggacgggaagcctctcaaggaagaaaaggaaactccaggagccgaggtccaaggagggcagtgactactttgacagtcgctctgatggactgaatacagatgtgcagggatcctcccaggcatctgcttttctgtggtcagggggctctactcagatcctgtctcagagaagtgaatccacacatgcgattggcagcgatcccctccggcagaacatttatgagaatttcatgcgagagttggaaatgagcaggaccaacactgagaacatagaaacatctacagaaaccgccgagtccagcagcgagtcactcagctctctggaacagctggatctgctctttgagaaggaacagggggtggtccggaaggccgggtggctcttcttcaagcccctggtcactgtgcagaaggaaaggaagcttgagctggtggcacgaaggaaatggaaacagtactgggtaacgctgaaaggatgcacgctgctgttttatgagacctatgggaagaattccatggatcagagcagtgcccctcggtgtgctctgtttgcagaagacagcatagtgcagtctgttccagagcatcccaagaaagaaaatgtgttctgcctcagcaactcctttggagatgtctaccttttccaggccaccagccagacagatctagaaaactgggtcactgctgtacactctgcttgtgcatccctttttgcaaagaagcatgggaaagaggacacgctgcggctgctgaagaaccagaccaaaaacctgcttcagaagatagacatggacagcaagatgaagaagatggcagagctgcagctgtccgtggtgagcgacccaaagaacaggaaagccatagagaaccagatccagcaatgggagcagaatcttgagaaatttcacatggatctgttcaggatgcgctgctatctggccagcctacaaggtggggagttaccgaacccaaagagtctccttgcagccgccagccgcccctccaagctggccctcggcaggctgggcatcttgtctgtttcctctttccatgctctggtatgttctagagatgactctgctctccggaaaaggacactgtcactgacccagcgagggagaaacaagaagggaatattttcttcgttaaaagggctggacacactggccagaaaaggcaaggagaagagaccttctataactcaggtcgatgaacttctgcatatatatggttcaacagtagacggtgttccccgagacaatgcatgggaaatccagacttatgtccactttcaggacaatcacggagttactgtagggatcaagccagagcacagagtagaagatattttgactttggcatgcaagatgaggcagttggaacccagccattatggcctacagcttcgaaaattagtagatgacaatgttgagtattgcatccctgcaccatatgaatatatgcaacaacaggtttatgatgaaatagaagtctttccactaaatgtttatgacgtgcagctcacgaagactgggagtgtgtgtgactttgggtttgcagttacagcgcaggtggatgagcgtcagcatctcagccggatatttataagcgacgttcttcccgatggcctggcgtatggggaagggctgagaaagggcaatgagatcatgaccttaaatggggaagctgtgtctgatcttgaccttaagcagatggaggccctgttttctgagaagagcgtcggactcactctgattgcccggcctccggacacaaaagcaaccctgtgtacatcctggtcagacagtgacctgttctccagggaccagaagagtctgctgccccctcctaaccagtcccaactgctggaggaattcctggataactttaaaaagaatacagccaatgatttcagcaacgtccctgatatcacaacaggtctgaaaaggagtcagacagatggcactctggatcaggtttcccacagggagaaaatggagcagacattcaggagtgctgagcagatcactgcactgtgcaggagttttaacgacagtcaggccaacggcatggaaggaccgcgggagaatcaggatcctcctccgaggtctctggcccgccacctgtctgatgcagaccgcctccgcaaagtcatccaggagcttgtggacacagagaagtcctacgtgaaggatttgagctgcctctttgaattatacttggagccacttcagaatgagacctttcttacccaagatgagatggagtcactttttggaagtttgccagagatgcttgagtttcagaaggtgtttctggagaccctggaggatgggatttcagcatcatctgactttaacaccctagaaaccccctcacagtttagaaaattactgttttcccttggaggctctttcctttattacgcggaccactttaaactgtacagtggattctgtgctaaccatatcaaagtacagaaggttctggagcgagctaaaactgacaaagccttcaaggcttttctggacgcccggaaccccaccaagcagcattcctccacgctggagtcctacctcatcaagccggttcagagagtgctcaagtacccgctgctgctcaaggagctggtgtccctgacggaccaggagagcgaggagcactaccacctgacggaagcactaaaggcaatggagaaagtagcgagccacatcaatgagatgcagaagatctatgaggattatgggaccgtgtttgaccagctagtagctgagcagagcggaacagagaaggaggtaacagaactttcgatgggagagcttctgatgcactctacggtttcctggttgaatccatttctgtctctaggaaaagctagaaaggaccttgagctcacagtatttgtttttaagagagccgtcatactggtttataaagaaaactgcaaactgaaaaagaaattgccctcgaattcccggcctgcacacaactctactgacttggacccatttaaattccgctggttgatccccatctccgcgcttcaagtcagactggggaatccagcagggacagaaaataattccatatgggaactgatccatacgaagtcagaaatagaaggacggccagaaaccatctttcagttgtgttgcagtgacagtgaaagcaaaaccaacattgttaaggtgattcgttctattctgagggagaacttcaggcgtcacataaagtgtgaattaccactggagaaaacgtgtaaggatcgcctggtacctcttaagaaccgagttcctgtttcggccaaattagcttcatccaggtctttaaaagtcctgaagaattcctccagcaacgagtggaccggtgagactggcaagggaaccttgctggactctgacgagggcagcttgagcagcggcacccagagcagcggctgccccacggctgagggcaggcaggactccaagagcacttctcccgggaaatacccacaccccggcttggcagattttgccgacaatctcatcaaagagagtgacatcctgagcgatgaagatgatgaccaccgtcagactgtgaagcagggcagccctactaaagacatcgaaattcagttccagagactgaggatttccgaggacccagacgttcaccccgaggctgagcagcagcctggcccggagtcgggtgagggtcagaaaggaggagagcagcccaaactggtccgggggcacttctgccccattaaacgaaaagccaacagcaccaagagggacagaggaactttgctcaaggcgcagatccgtcaccagtcccttgacagtcagtctgaaaatgccaccatcgacctaaattctgttctagagcgagaattcagtgtccagagtttaacatctgttgtcagtgaggagtgtttttatgaaacagagagccacggaaaatcatag

SEQ ID NO: 4087 - DNA, 547 bp, Homo sapiens
  source 1..547: mol_type = genomic DNA
agtgaagcctgcccacttgtgaagacggagactccccgctccccggatgagaagcaagtgcgtcagagggaagcagcccaactggttgctgagttgtggaaaataagctgggggagaaaaaacacttcttttaaaaatcaggtgtgtctctagtcctcgtggttgcctgccccactccctgccgagacgcctgccagaaaggtcacctatcctgaaccccagcaagcctgaaacagctcagccaagcaccctgcgatggaagctgcagatgcctccaggagcaacgggtcgagcccagaagccagggatgcccggagcccgtcgggccccagtggcagcctggagaatggcaccaaggctgacggcaaggatgccaagaccaccaacgggcacggcggggaggcagctgagggcaagagcctgggcagcgccctgaagccaggggaaggtaggagcgccctgttcgcgggcaatgagtggcggcgacccatcatccagtttgtcgagtccggggacgacaagaactccaactacttcagcatggact

SEQ ID NO: 4088 - DNA, 549 bp, Homo sapiens
  source 1..549: mol_type = genomic DNA
gaaattcagaacaggaggacacaagggcaggggaatgctgaggccaaggccttctcccaccacctgcctcctgcgggagtgattccacagtgcagagggagagccatttggaggtccggcacccgctctgcccatgcctatgcttcaggctctgtgagaaggctggactccttctggaacttcaggaccttggatgctcccctcctctgctcctgcctcccttcccccagccctggggtgtgtcagatgtgtgttttctcctggactcagctgaagcaaggtcagcccagctttcaaggggaggagcttccacactctaggtgtgtctctagtcctcgtggttgcctgccccactccctgccgagacgcctgccagaaaggtcacctatcctgaaccccagcaagcctgaaacagctcagccaagcaccctgcgatggaagctgcagatgcctccaggagcaacgggtcgagcccagaagccagggatgcccggagcccgtcgggccccagtggcagcctggagaatggcaccaaggctgacggcaagg

SEQ ID NO: 4089 - DNA, 2603 bp, Homo sapiens
  source 1..2603: mol_type = genomic DNA
agattactatggaatcggtagggtcctgaccgctggggaagcaggaaagcgtatcctgggaagaaaggcttggcttggactccggagaagaatactacatcgagacctgctggggaattttattttattttattatttttttggtcttggttgtactgagggaggaagaagaggttgtgtggcccggtcgaacttgtggcagcctgaaggccccctcaggcggcgccgcgggcagccccgcagccggggcctggtgcagcctccgcggccgctgtcagggaagcgcaggcggccaatggaacccgggagcggtcgctgctgctgaggcggcagtgtcggcagtccaaccgcgactgcccgcaccccctccgcgggggtcccccagagcctgttcgactggctcctgagagagaattcatcaagtccctgatggcgatcggcaagcggctggccacgctccccaccaaagagcagaaaacacagaggctgatctcagagctctccctgctcaaccataagctccctgcccgagtctggctgcccactgctggctttgaccaccacgtggtccgtgtaccccacacacaggctgttgtcctcaactccaaggacaaggctccctacctgatttatgtggaagtccttgaatgtgaaaactttgacaccaccagtgtccctgcccggatccccgagaaccgaattcggagtacgaggtccgtagaaaacttgcccgaatgtggtattacccatgagcagcgagctggcagcttcagcactgtgcccaactatgacaacgatgatgaggcctggtcggtggatgacataggcgagctgcaagtggagctccccgaagtgcataccaacagctgtgacaacatctcccagttctctgtggacagcatcaccagccaggagagcaaggagcctgtgttcattgcagcaggggacatccgccggcgcctttcggaacagctggctcataccccgacagccttcaaacgagacccagaagatccttctgcagttgctctcaaagagccctggcaggagaaagtacggcggatcagagagggctccccctacggccatctccccaattggcggctcctgtcagtcattgtcaagtgtggggatgaccttcggcaagagcttctggcctttcaggtgttgaagcaactgcagtccatttgggaacaggagcgagtgcccctttggatcaagccatacaagattcttgtgatttcggctgatagtggcatgattgaaccagtggtcaatgctgtgtccatccatcaggtgaagaaacagtcacagctctccttgctcgattacttcctacaggagcacggcagttacaccactgaggcattcctcagtgcacagcgcaattttgtgcaaagttgtgctgggtactgcttggtctgctacctgctgcaagtcaaggacagacacaatgggaatatccttttggacgcagaaggccacatcatccacatcgactttggcttcatcctctccagctcaccccgaaatctgggctttgagacgtcagcctttaagctgaccacagagtttgtggatgtgatgggcggcctggatggcgacatgttcaactactataagatgctgatgctgcaagggctgattgccgctcggaaacacatggacaaggtggtgcagatcgtggagatcatgcagcaaggttctcagcttccttgcttccatggctccagcaccattcgaaacctcaaagagaggttccacatgagcatgactgaggagcagctgcagctgctggtggagcagatggtggatggcagtatgcggtctatcaccaccaaactctatgacggcttccagtacctcaccaacggcatcatgtgacacgctcctcagcccaggagtggtggggggtccagggcaccctccctagagggcccttgtctgagaaaccccaaaccaggaaaccccacctacccaaccatccacccaagggaaatggaaggcaagaaacacgaaggatcatgtggtaactgcgagagcttgctgaggggtgggagagccagctgtggggtccagacttgttggggcttccctgcccctcctggtctgtgtcagtattaccaccagactgactccaggactcactgccctccagaaaacagaggtgacaaatgtgagggacactggggcctttcttctccttgtaggggtctctcagaggttctttccacaggccatcctcttattccgttctggggcccaggaagtggggaagagtaggttctcggtacttaggacttgatcctgtggttggccactggccatgctgctgcccagctctacccctcccagggacctacccctcccagggaccgacccctggcccaagctccccttgctggcgggcgctgcgtgggccctgcacttgctgaggttccccatcatgggcaaggaagggaattcccacagccctccagtgtactgagggtactggcctagccatgtggaattccctaccctgactccttccccaaacccagggaaaagagctctcaattttttatttttaatttttgtttgaaataaagtccttagttagc

SEQ ID NO: 4090 - DNA, 717 bp, Homo sapiens
  source 1..717: mol_type = genomic DNA
ttttttttttttttttttgccccttcttttcttgttagactggtttgaacaccccagcatctgtcctgtatttgtcaggtgaaaccagaagtctttggataatgaaacccgtgaccaattcttacccaaggtggttatgacatatgtcagctgcttcttggcctatatagttagaagccgacctcttttaccttgtgaataattatgtcatcacctccattattcttttggtgttctcaattgaaatgccaagcattaaatgagccacaaagattgaattcccattatccttgaatcagagcaagcctgtcgtgcagccatgagttagtggagaaaaatccggagttagagaagattataaatggcagagccatttaactgtggttagctgttggattctgatactttcttaaaaatacgttcttgcaccaacatcttcattgggaacagttcagaaaaagcaaagaggagagccaacattcacatttaccatggctataccaataacagtgcttgactgtgacctcttgctatatggccgtggtcaccggacattggaccgttttaagctggatgatgtgactgatgaatacttgatgtccatgtatgggtttccacggcagttcatttattacttggtggagctcttgggggcgaatctttctaggcctactcagcgatccagggctattagcccagagacacaggtccttgcag

SEQ ID NO: 4091 - DNA, 2909 bp, Homo sapiens
  source 1..2909: mol_type = genomic DNA
ctctccccggccgtggcccccgcggcttagacgcctcctccgccgccgccgctcggagcaacccgggggccggatggacggggccgcggggcccggtgacggccctgctcgggaggccctccagtctctgagccagcggcttcgggtgcaggagcaggagatggaactggtaaaggcagccctggcagaagcccttcgcctgctgcggctgcaggtgcccccttcctccctgcagggctctggcacaccagctcctccgggggacagtcttgcagcccccccaggactgccacccacgtgcaccccttccttggtgagccgaggcacccagacggagacagaggtggagctcaagtcatcccctggaccccctggcctgagcaatggacccccagcccctcagggggccagcgaagagcctagcgggacccaatctgaaggagggggcagcagcagcagtggtgctggctcccctggccccccggggatcctcaggcccttgcagcccccacagcgtgctgacacgccgcgaagaaattcttcctcctcctcatccccctcagagcggcctcggcagaagctctccaggaaggcaatctcctccgccaacctgttagtgcggtccgggagcacagagagccgtgggggaaaagaccccctctccagccctgggggccctggatctcggaggagcaattacaatttggaaggcatctcagtgaagatgttccttcgagggcgccccattaccatgtacatcccgtctggcatccgcagccttgaggagctgccgagtggcccaccgccagagaccctcagccttgactgggtttatgggtacaggggtcgtgactcccgctctaatctgtttgtgttgcgctctggggaggtggtctactttatcgcctgtgtggtggtgctgtaccggcctggaggaggcccagggggtcctggaggtggcggccagagacattaccgggggcacacagactgcgttcgatgccttgctgttcaccctgatggtgttcgggtagcctcgggacagacagctggagtggataaggatggaaagcccctgcagcctgtggttcacatctgggactcagagacgctgttgaaactgcaggagattggactgggggccttcgagcggggtgttggggccctggccttttcagctgcggatcagggtgcctttctttgtgtggtggatgattccaatgagcacatgctgtcggtgtgggactgcagccggggaatgaagctggctgagatcaagagtacaaatgactcagtcctggccgttggcttcaaccctcgtgacagcagctgcatcgtcaccagtgggaaatctcacgtccacttctggaattggagtggtggagtaggggttcctgggaatgggacccttacccggaaacagggtgtctttgggaaatacaagaaacccaagtttatcccttgctttgtgttccttccggatggagacattctcactggagactcagaggggaacattctcacctgggggcggagcccttcagattccaagaccccaggcaggggtggcgccaaagagacctatgggattgtggcccaggctcacgctcatgaaggttctatcttcgccttgtgtctccggagggacgggacagtgctgagtggtggcgggcgggaccgccggctggtacagtgggggcccgggttggtggccctccaggaggctgagattcccgagcacttcggggccgtgcgagccattgctgaagggcttggctctgagctgctggtgggaaccacgaagaatgcattgctgaggggagacctggcccagggcttctcccctgtaatccagggccacactgatgagctctgggggctctgcacacacccctcccagaaccgcttcctcacctgcggccacgaccggcagctctgcctgtgggatggggagagccatgcactggcctggagcatcgacctcaaggagactggtctctgtgctgacttccacccgagtggggcagttgtggccgtaggactgaacacggggaggtggttggttttggacacagagaccagagagatcgtgtctgatgtcattgatggcaatgagcagctctcagtggtccggtacagcccagatgggttgtacctggccattggttcccatgacaacgtgatctacatctatagtgtttccagtgatggtgccaaatccagccgctttggccgctgtatgggtcactccagcttcatcactcatcttgactggtccaaggatgggaatttcatcatgtccaattctggggactatgagattctttactgggacgtggctggaggctgcaagcagctgaagaatcgctatgagagccgagaccgggaatgggctacctacacctgtgtgctgggctttcacgtctacgtacccgtgcgctcgtgccaaggcgccgagccgcatgtacgggggccacggcagccacgtgaccagcgtccgattcacgcacgacgactcgcacctcgtctcgctgggcggcaaggacgccagcatcttccagtggcgagtgctgggcgctgggggcgcggggccggcgcccgccacgccctctcgaaccccctccctgtcccccgcctcctccctcgacgtttgatcgctgcctggcgggaccgactggcccggcggcgtggccccgccccgccctgcccttccctggcccaatcccccacgactaggggccgactctttcctggactgacttcgagacattcccgatcgcgcattttcctggagggcgcgaacggcgcccctgcacacactgtttagacccgctggctgagccgggcagccccagcctaggccttgactcccgctgcctgctgaggggcaataaaccagaaccaaagtc

SEQ ID NO: 4092 - DNA, 529 bp, Homo sapiens
  source 1..529: mol_type = genomic DNA
agtctgcttgtggtgtgagtggtgcctgtggcaggccctctgcagccagggtcggcgtaatggataacctgtgatgagttccattagagaaaacgtggaaaaagcagggatggatttacccttgtagaagcagggttaggcttgctgaggggcaggcacaggagtcctggctgagctcatggcctgaggctgcctagcggccacggggaatggttgcaatggcggaggcagaggcaggggtggcagtggaggtccgtggactgccccctgccgtgcccgacgagctgctcactctctactttgaaaaccgccgacgctctggagggggacctgtgttgagctggcagagactgggctgtgggggcgtcctcaccttcagagagcctgcagacgccgagagggtcttggcccaggcagatcacgaactacatggtgcccagctgagcctgcggccagctccaccacgagcccctgcacgcctgctgctccaaggactgccccctggcaccacgccccagcgcttggagca

SEQ ID NO: 4093 - DNA, 603 bp, Homo sapiens
  source 1..603: mol_type = genomic DNA
ttttgggcgcttcgctgatggtgtcggtgagcgcgtttcccgcctgagcgcaactagcggcgggtcgtgggcacctccaggctcagaaggaaagaaaacatctcccaggaccagatgtggagtagatgggagttggagagaagctgaagcccaggcccagcaacaggctgggggcccaggtgcttcgggggtcccagccattaacagagcttcgtgcaggagagcttgtttcatatccatatcccactgtattcctgctaatctgctaatgcagtaaattggaggaaaactgttaccaggataacctgtaatgggcaaggagccacaaagaagaaaacatttcttttaatttttaaacttggtttgaaagaccagcatgttttggaaatttgatcttcactcatcatcccacatagacacacttctagaaagagaagatgtaacactgaaggagttaatggatgaggaagatgttttacaggaatgtaaagctcagaaccgcaaacttatagagtttctgttaaaagcagaatgtctcgaagatttagtctcattcattatagaagaaccacctcaagacatggatgaaaagatcagatacaa

SEQ ID NO: 4094 - DNA, 1375 bp, Homo sapiens
  source 1..1375: mol_type = genomic DNA
gtcacgtgttgttgttgggccgggaaagctgcttccgggtcaatgcaggacactgggctccggcggccagagtgggggactagcattttaagaaagaaagatggatcaacctagtggaagaagtttcatgcaagtattatgtgaaaaatatagtcctgaaaattttccttatcgccgtggcccggggatgggagtccatgtcccagccacacctcagggctctcctatgaaagatcgcctcaacctcccaagtgtactagtgttgaacagctgtggaataacctgtgcaggagatgaaaaagaaattgctgctttctgcgctcatgtgtcggaactagatctttctgacaacaaactcgaagactggcatgaggtcagtaaaattgtgtcaaatgttcctcagttggagtttctaaacctgagttccaaccctctgaatttgtcggttttagaaagaacatgtgctgggtccttctctggggttcgcaaacttgtcctcaacaacagcaaagcttcttgggagacggtccacatgatactacaggagttaccagatttggaggagctcttcctgtgccttaatgactatgaaacagtgtcttgtccttctatttgctgtcattctcttaagctactacatataacagacaataacctccaagactggactgaaatacgaaagttaggagttatgtttccttcactggataccctcgtcctggccaacaatcatttgaatgctattgaggagcctgatgattcattggccaggttgtttcctaatcttcgatccatcagcctccacaagtcaggtttgcagtcctgggaagacattgataaactaaattcatttcccaaactggaagaagtgagattgttaggaattcctcttctgcagccatataccaccgaggagcgaaggaaattggtaatagccagattgccatcagtttccaaacttaatggcagcgttgttactgatggtgaacgagaagattctgagagattttttattcgttactatgtggatgttccacaggaagaagtgccattcaggtatcatgaactgatcactaaatatgggaagttggagcctttggcagaagtggacctaagaccccagagcagtgcaaaagtagaagtccactttaacgatcaggtggaagaaatgagcattcgtctggaccaaacagtggcagaactaaagaaacagttaaaaactctagtacaattacccacaagcaacatgcttctctactattttgaccatgaagcaccctttggcccagaggaaatgaagtacagctctcgggcattgcattcctttggcattagggatggagataaaatttacgtggaatccaaaacaaaataa

SEQ ID NO: 4095 - DNA, 551 bp, Homo sapiens
  source 1..551: mol_type = genomic DNA
gagaaattgggcctggcattttgagtgacttctgagattatctgaatctcacactttgctgacctctttttggagggcattgcctgtggcctggcccagagaggatgggcaggtgttttctgagtcacacagcagaccaagtgtggagacaggtgtgtctctagtcctcgtggttgcctgccccactccctgccgagacgcctgccagaaaggtcacctatcctgaaccccagcaagcctgaaacagctcagccaagcaccctgcgatggaagctgcagatgcctccaggagcaacgggtcgagcccagaagccagggatgcccggagcccgtcgggccccagtggcagcctggagaatggcaccaaggctgacggcaaggatgccaagaccaccaacgggcacggcggggaggcagctgagggcaagagcctgggcagcgccctgaagccaggggaaggtaggagcgccctgttcgcgggcaatgagtggcggcgacccatcatccagtttgtcgagtccggggacgacaagaactccaactacttcagc

SEQ ID NO: 4096 - DNA, 3228 bp, Homo sapiens
  source 1..3228: mol_type = genomic DNA
gtctggctcgggaggcgttcctggggccaaggccatggccccgcggctgcagctggagaaggcggcctggcgctgggcggagacggtgcggcccgaggaggtgtcgcaggagcacatcgagaccgcttaccgcatctggctggagccctgcattcgcggcgtgtgcagacgaaactgcaaaggaaatccgaattgcttggttggtattggtgagcatatttggttaggagaaatagatgaaaatagttttcataacatcgatgatcccaactgtgagaggagaaaaaagaactcatttgtgggcctgactaaccttggagccacttgttatgtcaacacatttcttcaagtgtggtttctcaacttggagcttcggcaggcactctacttatgtccaagcacttgtagtgactacatgctgggagacggcatccaagaagaaaaagattatgagcctcaaacaatttgtgagcatctccagtacttgtttgccttgttgcaaaacagtaataggcgatacattgatccatcaggatttgttaaagccttgggcctggacactggacaacagcaggatgctcaagaattttcaaagctctttatgtctctattggaagatactttgtctaaacaaaagaatccagatgtgcgcaatattgttcaacagcagttctgtggagaatatgcctatgtaactgtttgcaaccagtgtggcagagagtctaagcttttgtcaaaattttatgagctggagttaaatatccaaggccacaaacagttaacagattgtatctcggaatttttgaaggaagaaaaattagaaggagacaatcgctatttttgcgagaactgtcaaagcaaacagaatgcaacaagaaagattcgacttcttagccttccttgcactctgaacttgcagctaatgcgttttgtctttgacaggcaaactggacataagaaaaagctgaatacctacattggcttctcagaaattttggatatggagccttatgtggaacataaaggtgggtcctacgtgtatgaactcagcgcagtcctcatacacagaggagtgagtgcttattctggccactacatcgcccacgtgaaagatccacagtctggtgaatggtataagtttaatgatgaagacatagaaaagatggaggggaagaaattacaactagggattgaggaagatctagaaccttctaagtctcagacacgtaaacccaagtgtggcaaaggaactcattgctctcgaaatgcatatatgttggtttatagactgcaaactcaagaaaagcccaacactactgttcaagttccagcctttcttcaagagctggtagatcgggataattccaaatttgaggagtggtgtattgaaatggctgagatgcgtaagcaaagtgtggataaaggaaaagcaaaacacgaagaggttaaggagctgtaccaaaggttacctgctggagctgagccctatgagtttgtctctctggaatggctgcaaaagtggttggatgaatcaacacctaccaaacctattgataatcacgcttgcctgtgttcccatgacaagcttcacccggataaaatatcaattatgaagaggatatctgaatatgcagctgacattttctatagtagatatggaggaggtccaagactaactgtgaaagccctgtgtaaggaatgtgtagtagaacgttgtcgcatattgcgtctgaagaaccaactaaatgaagattataaaactgttaataatctgctgaaagcagcagtaaagggcagcgatggattttgggtggggaagtcctccttgcggagttggcgccagctagctcttgaacagctggatgagcaagatggtgatgcagaacaaagcaacggaaagatgaacggtagcaccttaaataaagatgaatcaaaggaagaaagaaaagaagaggaggaattaaattttaatgaagatattctgtgtccacatgctgttttttttttttccaaatatatttttttaaactcaggtgagttatgcatatctgaaaatgaaagaaggcttgtttctaaagaggcttggagcaaactgcagcagtactttccaaaggctcctgagtttccaagttacaaagagtgctgttcacagtgcaagattttagaaagagaaggggaagaaaatgaagccttacataagatgattgcaaacgagcaaaagacttctctcccaaatttgttccaggataaaaacagaccgtgtctcagtaactggccagaggatacggatgtcctctacatcgtgtctcagttctttgtagaagagtggcggaaatttgttagaaagcctacaagatgcagccctgtgtcatcagttgggaacagtgctcttttgtgtccccacgggggcctcatgtttacatttgcttccatgaccaaagaagattctaaacttatagctctcatatggcccagtgagtggcaaatgatacaaaagctctttgttgtggatcatgtaattaaaatcacgagaattgaagtgggagatgtaaacccttcagaaacacagtatatttctgagcccaaactctgtccagaatgcagagaaggcttattgtgtcagcagcagagggacctgcgtgaatacactcaagccaccatctatgtccataaagttgtggataataaaaaggtgatgaaggattcggctccggaactgaatgtgagtagttctgaaacagaggaggacaaggaagaagctaaaccagatggagaaaaagatccagattttaatcaaagcaatggtggaacaaagcggcaaaagatatcccatcaaaattatatagcctatcaaaagcaagttattcgccgaagtatgcgacatagaaaagttcgtggtgagaaagcacttctcgtttctgctaatcagacgttaaaagaattgaaaattcagatcatgcatgcattttcagttgctccttttgaccagaatttgtcaattgatggaaagattttaagtgatgactgtgccaccctaggcacccttggcgtcattcctgaatctgtcattttattgaaggctgatgaaccaattgcagattatgctgcaatggatgatgtcatgcaagtttgtatgccagaagaagggtttaaaggtactggtcttcttggacattaatctttgaatacttgctgactgctaagaaatgaccagaggggaagaggagt

SEQ ID NO: 4097 - DNA, 2566 bp, Homo sapiens
  source 1..2566: mol_type = genomic DNA
ccccccccccccggccattaccgaagcggatgaaaacaaacactaacgatggcggcgccgggaagcgaccggctgctgggcttaaggcgggagtgaccgcttaaccagtgagggaagcactgaagagcgccagtcgacgtgggtgcgacaactcgcggagtcttaggagcaaaacgtctggggcctgcgagccaggacccttctgaagccttaggtgtctatcggcgacgtgtacggtcactgcagctccggagcgcggaaccctcagccaggaggcgcggctggtcggtcccaggtcccggcctccgtaatgagagcccggaaccactctttgtgccgcagcttcgcagtggaacgacctgtggaaacctgtgatccattctcattaaataaatctctggattcctataggcaatggaaactgatctcaattcccaggacagaaaggacctggacaagtttattaaattttttgccctcaagactgtccaagtgattgtccaggctcggcttggtgaaaagatttgcactcgttcatcatcttctccaacgggttcagattggttcaacttagcaatcaaagacatcccagaggttacacatgaagcaaagaaggcactggcaggacagctgcctgcagtcgggaggtccatgtgtgtggagatttcacttaagacttctgagggagattccatggagctggaaatatggtgtcttgaaatgaatgaaaagtgtgataaagaaatcaaagtttcctacacggtgtacaacagactgtcattgctgctgaagtcccttcttgctataactagggtgacaccagcctataggctctccaggaaacaagggcatgaatatgtcatattatacaggatatattttggagaagttcagctgagtggcttaggagaaggcttccagacagttcgtgttgggacagtgggcacccctgtgggcaccatcactctttcttgtgcttacagaattaacttggcattcatgtctaccaggcaatttgagaggaccccacctatcatggggattattattgatcactttgtggaccgtccctatcccagctcctctcccatgcacccctgcaattacagaactgctggtgaggacactggagtaatatacccgtctgtagaagactctcaagaagtgtgtaccacctctttttccacctccccaccatcccagctgatggttcctgggaaggaaggtggggtaccccttgctcccaaccagcctgtccatggtacccaggctgaccaggagagactggcaacctgcaccccttctgacagaacccactgtgctgccacaccctccagtagtgaggatactgaaaccgtatcaaacagcagtgagggacgggcctcccctcacgatgtcttggagaccatctttgtccgaaaagtgggggcttttgtcaacaaacccattaaccaggtgaccctgacgagtttggatataccctttgccatgtttgctcccaagaatttggagctggaggataccgatccaatggtgaatcctccagattccccagagactgaatctcctctccagggcagcctgcactcagatggctccagcgggggcagcagtggcaatacccatgatgactttgttatgatagactttaaaccagctttttctaaagatgacattcttccgatggacctggggaccttctatcgggagtttcagaacccacctcagctgagcagcctctccatagatattggagcacagtccatggctgaagacttggactcattaccagagaagctggctgtgcatgagaagaatgtccgcgagtttgatgcctttgtggaaaccctgcagtaaaagtatccttgagtcccagcagcaccccctttttgtggccccagggcataagcagcctcccatgcatcagctgctcccacccctcatcctgctctgagccaggtggaagggaggctggcttctcccatggggacccagaagtccctactcttggacctcctggagactccgtggcggcagtcaagcccagtgcccagttggagaagactcacgtgctggccttggagatgggaagaaccttcgtacgaaaaagccctcagcagggccatctgtgtgccctgcccatcaccaactgcttcccaagggtgtcatcctgttcctcctgctgccggcctcctgcctgggcctgccttgcagctggccccttccctgcctgctgtcaccatccactgtttgacattccagctggtggccaagagattggtgtggagtcgcagaaagaggaaggagacagtgccaggaggaagaaggaaggagtcccttagctctcttcattgtcccctttacttcctgctatcttcttctcctcttcttctctctcttgcctctatgcctgtatttctggcaatatgacaggcctgcctacccaagatcagaactccaaaaccactcccacccctgaaggtcgggagggtctgagcagccctggtggctgcctgtgctcaggtcctcagctccatgggaaataaaaatggcaccctgaatctct

SEQ ID NO: 4098 - DNA, 3228 bp, Homo sapiens
  source 1..3228: mol_type = genomic DNA
cgtgggcacctccagataagaaaacaagctcagagagatgtggtgacttgctcaaatagtgacagaacttcctcggccatatggaggggtcatataatacccttgtgtcttcagtttgaggagagcttgtttcatatccatatcccactgtattcctgctaatctgctaatgcagtaaattggaggaaaactgttaccaggataacctgtaatgggcaaggagccacaaagaagaaaacatttcttttaatttttaaacttggtttgaaagaccagcatgttttggaaatttgatcttcactcatcatcccacatagacacacttctagaaagagaagatgtaacactgaaggagttaatggatgaggaagatgttttacaggaatgtaaagctcagaaccgcaaacttatagagtttctgttaaaagcagaatgtctcgaagatttagtctcattcattatagaagaaccacctcaagacatggatgaaaagatcagatacaagtatccaaatatatcttgtgagttgctcacttctgatgtctcccagatgaatgatagactgggagaagatgaatccttgctaatgaaattatatagcttcctcctaaacgattcccctttgaatccactacttgccagtttcttcagcaaggtgctaagtattcttatcagcagaaaaccagaacagattgtggatttcttaaagaagaagcatgattttgtagaccttattataaagcacataggaacttctgctatcatggatttgttgctcaggctcctgacgtgtatcgaacctccacagcccaggcaagatgtgctgaattggttaaatgaggagaaaattatccagaggcttgtggaaatagttcatccatcgcaagaagaagatcgacattcaaatgcatcacaatcactttgtgaaattgttcgcctgagcagagaccagatgttacaaattcagaacagtacagagcccgaccccctgcttgccactctagaaaagcaagaaattatagagcagcttctatcaaatattttccacaaggagaaaaatgagtcagccatagtcagtgcaatccagatattgctgactttacttgagacacgacgaccaacatttgaaggccatatagagatctgcccaccaggcatgagccattcagcttgttcagtaaacaagagtgttctagaagccatcagaggaagacttggatcttttcatgaactcctgctggagccacccaagaacatgttcttcaagtatacatggaataactttttgcatacacaagtggaaatttgtattgcactgattcttgcaagtccttttgaaaacacagaaaatgccacaattaccgatcaagactccactggtgataatttgttattaaaacatcttttccaaaaatgtcaattaatagaacgaatacttgaagcctgggaaatgaatgagaagaaacaggctgagggaggaagacggcatggttacatgggacacctaacgaggatagctaactgtatcgtgcacagcactgacaagggccccaacagtgcattagtgcagcagcttatcaaagatcttcccgacgaagtcagggaacgatgggagacgttctgcacaagctccttaggagaaactaacaagaggaacacggtagatctagccttttctgattatcagatgcaacaaatgacgtccaattttattgaccagtttggcttcaacgatgagaagtttgcagatcaagatgacattggcaatgtttcttttgatcgagtatcagacatcaactttactctcaatacaaatgaaagtggaaatattgccttgtttgaagcatgttgtaaggaaagaatacaacagtttgatgatggtggctctgatgaggaagatatatgggaggaaaagcacatcgcattcacaccagaatcccaaagacgatccagctcggggagtacagacagtgaggaaagtacagactctgaagaagaagatggagcaaagcaagacttgtttgaacccagcagtgccaacacggaggataaaatggaggtggacctgagtgaaccacccaactggtcagctaactttgatgtcccaatggaaacaacccacggtgctccattggattctgtgggatctgatgtctggagcacagaggagccgatgccaactaaagagacgggctgggcttctttttcagagttcacgtcttccctgagcacaaaagattctttaaggagtaattctccagtggaaatggaaaccagcactgaacccatggaccctctgactcccagtgcggctgccctggcagtgcagccagaagcggcaggcagtgtggccatggaagccagctctgacggagaggaggatgcagaaagtacagacaaggtaactgagacagtgatgaatggcggcatgaaggaaacgctcagcctcactgtagatgccaagacagagactgcggtcttcaaaagtgaggaagggaaactgtctacctctcaagatgctgcttgtaaagacgcagaggagtgtcccgagactgcagaggcgaagtgcgcggcgcccaggcctcccagcagcagtcccgagcagagtggtgtggagattccagcactcccaggacagtggagtcagcagtaagccctgggacaggtggcaagggtgggtcccttgacctttgcacgcctcctcaggaaccccctttcccgggtgagcccctctctgaagagactgtccttgggcctcctctggaagcagcacccccagaggacagggctcctcctgcttgcctcagggctgcctgacttgaatggcgttggacctcggggattactggtagataatatgctctggtctcgcctggtggtgagttttgccagccatggccagggtttggctccactggtggcacacgtggcctccgtggtatggacctggtggcttctccatcccactgtggcctctgtggtatggacctggtggcttctccatcctacccaaggtaacagtgtcttgcttcatcccactgactgctgggagagagcctctgggacttttctttggggcatcattttgttttgtctttcgtagcagggaaaggatatgacaatggggaggacagttcttttggaggttggaggggccaagccaaggacaggagcaagtgtgccctcattttgtttctacttttaatttctgtgtgttggccatactga

SEQ ID NO: 4099 - DNA, 1688 bp, Homo sapiens
  source 1..1688: mol_type = genomic DNA
gcgattttccttcggctgaggcaggagctttaggaccacttgctttcaggaaaagaaaatgagtaactctctcttcaggatggtgatggggcctggccagtccaaggaggctcctgggtggtcactgagtgggaggtcatcttcactgtttcctctcctccatggtaggaaatcactgaccaggacatgtttggagatgccagcacgagtctggttgtgccggagaaagtcaaaactcccatgaagtccagtaaaacggatctccagggctctgcctcccccagcaaagtggagggggtgcacacaccccggcagaagaggagcacgcccctgaaggagcggcagctctccaagcccctaagtgagaggaccaacagttccgacagcgagcgctccccagatctgggccacagcacgcagattccaagaaaggtggtgtatgaccagctcaatcagatcctggtgtcagatgcagccctcccagaaaatgtcattctggtgaacaccactgactggcagggccagtatgtggctgagctgctccaggaccagcggaagcctgtggtgtgcacctgctccaccgtggaggtccaggccgtgctgtccgccctgctcacccggatccagcgctactgcaactgcaactcttccatgccgaggccagtgaaggtggctgctgtgggaggccagagctacctgagctccatcctcaggttctttgtcaagtccctggccaacaagacctccgactggcttggctacatgcgcttcctcatcatccccctcggttctcaccctgtggccaaatacttggggtcagtcgacagtaaatacagtagttccttcctggattctggttggagagatctgttcagtcgctcggagccaccagtgtcagagcaactggacgtggcagggcgggtgatgcagtacgtcaacggggcagccacgacacaccagcttcccgtggccgaagccatgctgacttgccggcataagttccctgatgaagactcctatcagaagtttattcccttcattggcgtggtgaaggtgggtctggttgaagactctccctccacagcaggcgatggggacgattctcctgtggtcagccttactgtgccctccacatcaccaccctccagctcgggcctgagccgagacgccacggccacccctccctcctccccatctatgagcagcgccctggccatcgtggggagccctaatagcccatatggggacgtgattggcctccaggtggactactggctgggccaccccggggagcggaggagggaaggcgacaagagggacgccagctcgaagaacaccctcaagagtgtcttccgctcagtgcaggtgtcccgcctgccccatagtggggaggcccagctttctggcaccatggccatgactgtggtcaccaaagaaaagaacaagaaagttcccaccatcttcctgagcaagaaaccccgagaaaaggaggtggattctaagagccaggtcattgaaggcatcagccgcctcatctgctcagccaagcagcagcagactatgctgagagtgtccatcgatggggtcgagtggagtgacatcaagttcttccagctggcagcccagtggcccacccatgtcaagcactttccagtgggactcttcagtggcagcaaggccacctgagg

SEQ ID NO: 4100 - DNA, 696 bp, Homo sapiens
  source 1..696: mol_type = genomic DNA
attaccttgtcaccttctgaggttacttgtgacgatgccaatgatggtgtgagatggggaggtgcaggcaggacagaaagctgcaggaatgggcaggcaagacctgaggcgggaggaaggctgtgctgcaatgcacattcttggagaccaagggtggggaaccgcccatgctcagcacctggcagcagggttaggcttgctgaggggcaggcacaggagtcctggctgagctcatggcctgaggctgcctagcggccacggggaatggttgcaatggcggaggcagaggcaggggtggcagtggaggtccgtggactgccccctgccgtgcccgacgagctgctcactctctactttgaaaaccgccgacgctctggagggggacctgtgttgagctggcagagactgggctgtgggggcgtcctcaccttcagagagcctgcagacgccgagagggtcttggcccaggcagatcacgaactacatggtgcccagctgagcctgcggccagctccaccacgagcccctgcacgcctgctgctccaaggactgccccctggcaccacgccccagcgcttggagcagcatgtccaggccttgctgcgggcctcggggctcccagtacagccttgctgtgccttggccagcccccggccagaccgggctctggtccagttgcccaagcccctttctgag

SEQ ID NO: 4101 - DNA, 703 bp, Homo sapiens
  source 1..703: mol_type = genomic DNA
gggaagggtcagaccaccatccgggtactctaaggtacataaaagagtcctccctcccccttctccttcacccccaagtgtctcccacgactgccctccccgacctctagctgaccatggcatcagaggcagaaaaaacattccatcggtttgctgcgtttggagaatcatcaagcagtggcactgaaatgaacaacaagaacttctccaagctgtgcaaagactgtggcatcatggatggcaagacagtcacctccacggacgtggacatcgtgttcagcaaagtcaaggccaagaacgcccgaaccatcacgtttcaacagttcaaagaggcagtgaaggaactgggccagaagcgcttcaaagggaagagtccagatgaagtcctggagaacatttatggactcatggagggcaaagacccagccaccactggcgctactaaagcaacaacagtgggtgcagtggaccgtttgacagacaccagcaagtacaccggcacccacaaggagcgctttgatgagagtggcaagggcaagggcattgcgggacgggaagagatgactgacaacacaggctatgtgagtggttacaagggttctggcacctacgataagaagaccaagtagagaggagcttcatctcagcctgctagccccctgaccctgcatgtttaacaccagggagcttggaaaacaataaa

SEQ ID NO: 4102 - DNA, 588 bp, Homo sapiens
  source 1..588: mol_type = genomic DNA
cagtccccacttccctcctcactctcttgggagcgaggcctcttaccattgttctggcgtgaggaaaggcctgctgttgcctcaccaagcccactcgtgaacccgctgatgccgagcccgcctgcctgagtcttgatcgctgacttgagctcgtgattctcccgaatgagccgcaccaacttcttcagttcctcattttcccgcaccagcctctctatctgatgccgaagcccttcataattgcagggttaggcttgctgaggggcaggcacaggagtcctggctgagctcatggcctgaggctgcctagcggccacggggaatggttgcaatggcggaggcagaggcaggggtggcagtggaggtccgtggactgccccctgccgtgcccgacgagctgctcactctctactttgaaaaccgccgacgctctggagggggacctgtgttgagctggcagagactgggctgtgggggcgtcctcaccttcagagagcctgcagacgccgagagggtcttggcccaggcagatcacgaactacatggtgcccagctgagcctgcggccagctccaccacgagcccctgc

SEQ ID NO: 4103 - DNA, 2030 bp, Homo sapiens
  source 1..2030: mol_type = genomic DNA
gaagcggatgaaaacaaacactaacgatggcggcgccgggaagcgaccggctgctgggcttaaggcgggagtgaccgcttaaccagtgagggaagcactgaagagcgccagtcgacgtgggtgcgacaactcgcggagtcttaggagcaaaacgtctggggcctgcgagccaggacccttctgaagccttaggtgtctatcggcgacgtgtacggtcactgcagctccggagcgcggaaccctcagccaggaggcgcggctggtcggtcccaggtcccggcctccgtaatgagagcccggaaccactctttgtgccgcagcttcgcagactgtccaagtgattgtccaggctcggcttggtgaaaagatttgcactcgttcatcatcttctccaacgggttcagattggttcaacttagcaatcaaagacatcccagaggttacacatgaagcaaagaaggcactggcaggacagctgcctgcagtcgggaggtccatgtgtgtggagatttcacttaagacttctgagggagattccatggagctggaaatatggtgtcttgaaatgaatgaaaagtgtgataaagaaatcaaagtttcctacacggtgtacaacagactgtcattgctgctgaagtcccttcttgctataactagggtgacaccagcctataggctctccaggaaacaagggcatgaatatgtcatattatacaggatatattttggagaagttcagctgagtggcttaggagaaggcttccagacagttcgtgttgggacagtgggcacccctgtgggcaccatcactctttcttgtgcttacagaattaacttggcattcatgtctaccaggcaatttgagaggaccccacctatcatggggattattattgatcactttgtggaccgtccctatcccagctcctctcccatgcacccctgcaattacagaactgctggtgaggacactggagtaatatacccgtctgtagaagactctcaagaagtgtgtaccacctctttttccacctccccaccatcccagctgatggttcctgggaaggaaggtggggtaccccttgctcccaaccagcctgtccatggtacccaggctgaccaggagagactggcaacctgcaccccttctgacagaacccactgtgctgccacaccctccagtagtgaggatactgaaaccgtatcaaacagcagtgagggacgggcctcccctcacgatgtcttggagaccatctttgtccgaaaagtgggggcttttgtcaacaaacccattaaccaggtgaccctgacgagtttggatataccctttgccatgtttgctcccaagaatttggagctggaggataccgatccaatggtgaatcctccagattccccagagactgaatctcctctccagggcagcctgcactcagatggctccagcgggggcagcagtggcaatacccatgatgactttgttatgatagactttaaaccagctttttctaaagatgacattcttccgatggacctggggaccttctatcgggagtttcagaacccacctcagctgagcagcctctccatagatattggagcacagtccatggctgaagacttggactcattaccagagaagctggctgtgcatgagaagaatgtccgcgagtttgatgcctttgtggaaaccctgcagtaaaagtatccttgagtcccagcagcaccccctttttgtggccccagggcataagcagcctcccatgcatcagctgctcccacccctcatcctgctctgagccaggtggaagggaggctggcttctcccatggggacccagaagtccctactcttggacctcctggagactccgtggcggcagtcaagcccagtgcccagttggagaagactcacgtgctggccttggagatgggaagaaccttcgtacgaaaaagccctcagcagggccatctgtgtgccctgcccatcaccaactgcttcccaagggtgtcatcctgttcctcctgctg

SEQ ID NO: 4104 - DNA, 2469 bp, Homo sapiens
  source 1..2469: mol_type = genomic DNA
ggagagcgctggtggtagggaggcttctcccggttctgtgagcagcaggaccctcccgagggcctgaccgtggaggtagcactgcacacccactccctgtgggccggagccaggaggcacttcctgggtgtcggagcccagaaggaaaccagtggccgggaagcaccagctgggtgtgggacaggcactggcctcagaccggggccacactgaggtctgcccttctcccgctggccgccacccaagacaccatgagccagtccggggccgtgagctgctgcccgggtgccaccaatggcagcctgggccggtccgacggtgtggccaagatgagccccaaggacctgtttgagcagaggaagaagtattccaactccaacgtcatcatgcacgagacctcgcagtaccacgtccagcacctggccacattcatcatggacaagagcgaagccatcacgtctgtggacgacgccatccggaagctggtgcagctgagctccaaggagaagatctggacccaggagatgctgctgcaggtgaacgaccagtcgctgcggctgctggacatcgagtcacaggaggagctggaagacttcccgctgcccacggtgcagcgcagccagacggtcctcaaccagctgcgctacccgtctgtgctgctgctcgtgtgccaggactcggagcagagcaagccggatgtccacttcttccactgcgatgaggtggaggcagagctggtgcacgaggacatcgagagcgcgttggccgactgccggctgggcaagaagatgcggccgcagaccctgaagggacaccaggagaagattcggcagcggcagtccatcctgcctcctccccagggcccggcgcccatccccttccagcaccgcggcggggattccccggaggccaagaatcgcgtgggcccgcaggtgccactcagcgagccaggtttccgccgtcgggagtcgcaggaggagccgcgggccgtgctggctcagaagatagagaaggagacgcaaatcctcaactgcgccctggacgacatcgagtggtttgtggcccggctgcagaaggcagccgaggctttcaagcagctgaaccagcggaaaaaggggaagaagaagggcaagaaggcgccagcagagggcgtcctcacactgcgggcacggcccccctctgagggcgagttcatcgactgcttccagaaaatcaagctggcgattaacttgctggcaaagctgcagaagcacatccagaaccccagcgccgcggagctcgtgcacttcctcttcgggcctctggacctgatcgtcaacacctgcagtggcccagacatcgcacgctccgtctcctgcccactgctctcccgagatgccgtggacttcctgcgcggccacctggtccctaaggagatgtcgctgtgggagtcactgggagagagctggatgcggccccgttccgagtggccgcgggagccacaggtgcccctctacgtgcccaagttccacagcggctgggagcctcctgtggatgtgctgcaggaggccccctgggaggtggaggggctggcgtctgcccccatcgaggaggtgagtccagtgagccgacagtccataagaaactcccagaagcacagccccacttcagagcccacccccccgggggatgccctaccaccagtcagctccccacatactcacaggggctaccagccaacaccagccatggccaagtacgtcaagatcctgtatgacttcacagcccgaaatgccaacgagctatcggtgctcaaggatgaggtcctagaggtgctggaggacggccggcagtggtggaagctgcgcagccgcagcggccaggcggggtacgtgccctgcaacatcctaggcgaggcgcgaccggaggacgccggcgccccgttcgagcaggccggtcagaagtactggggccccgccagcccgacccacaagctacccccaagcttcccggggaacaaagacgagctcatgcagcacatggacgaggtcaacgacgagctcatccggaaaatcagcaacatcagggcgcagccacagaggcacttccgcgtggagcgcagccagcccgtgagccagccgctcacctacgagtcgggtccggacgaggtccgcgcctggctggaagccaaggccttcagcccgcggatcgtggagaacctgggcatcctgaccgggccgcagctcttctccctcaacaaggaggagctgaagaaagtgtgcggcgaggagggcgtccgcgtgtacagccagctcaccatgcagaaggccttcctggagaagcagcaaagtgggtcggagctggaagaactcatgaacaagtttcattccatgaatcagaggaggggggaggacagctaggcccagctgccttgggctggggcctgcggaggggaagcccacccacaatgcatggagtattatttttata

SEQ ID NO: 4105 - DNA, 549 bp, Homo sapiens
  source 1..549: mol_type = genomic DNA
aagggtcctcaggggttcttccctggaagcgggaggtgcagtgctttacttccaactatgtggtcaattttgtttacaagagctcctgaaggaagcactaaacatggaaaggaacaaccggtaccagccactgcaaaaacatgccaaattgtaaagaccatcgatgttaggaagaaactgcctcaactaatgagcaaaataaccagctaacatcgtaatgacaggatcaaattcacacataacgatattaaccttaaaggtgttacctcattttgaaagtcttgggaaacaggaaaaaattcctaacaaaatgtcagcttttcgaaatcattgtccacatttggattcagttggtgaaataacaaaagaagatttgatacaaaaatcccttggtacttgtcaggattgtaaagtccaaggaccaaatctttgggcatgtctggagaatagatgttcatatgttggctgtggtgaatcacaagtagatcacagcaccatacattctcaggagacaaagcattatctaactgtgaaccttaccactcttcg

SEQ ID NO: 4106 - DNA, 1233 bp, Homo sapiens
  source 1..1233: mol_type = genomic DNA
ccgagaattcgtgggtgctcaagaggatgggtgtggcctggcagcgcaggcgcactagaggcctgtagggtcggggcgcctgcgcagtcgctcttcctcaggcggcggccatggcgggacaggaggatccggtgcagcgggagattcaccaggactgggctaaccgggagtacattgagataatcaccagcagcatcaagaaaatcgcagactttctcaactcgttcgatatgtcttgtcgttcaagacttgcaacactaaacgagaaattgacagcccttgaacggagaatagagtacattgaagctcgggtgacaaaaggtgagacactcacctagaacagtgccgtgctgctgctgggaagttgctttacacaacacaggccacatgggaaaggccccagcagccttcagctccttcctttctccttaaagagcaacagggcttattcttgtttttcttttttcaaaagtgtggcctttgggctctgccatctggggtgtggtgtggtatgtgggaagaagttcagaggaaccgttggaaacgacgttaggcattttaccttttcagtaacattttatacatctacttgtcaatgtatttgagacattcacagccaaaagcctgggactctttgtgaaggtcctcctcacctctatctttctttctctctctctcaaactttccttaaagttctcattgcctttgcactgcttctgtgaacagtctttgtctcctccccacctttggtgggaagtgcggggcagtcctggtcaagacactcatgccctggcaatgtggctgccagagaatgttgttgctaacccaccagtttcttgttgatttggagaggtcaaggccaggcccccacttggcttgaagggacattttcagacttttctttctgtcacttggagtgtctatgcctctcatatttccctaataaactcctcaactttttatctgactgctgtgattatggtggggagaggagctagagatgggttcacttattgcacagaaatgtaatacatggcgttattattctaacataaaactttcagatgtagctgtttgattcaaagcctaggtggcttaccagcccaagtccccatgtttggactttcagctgactagctcatcttgggaatcatttggtcattcagcacatttaccaagtatttactatgtaggcatgttaaactccaataaaacatacagcattgaatcaga

SEQ ID NO: 4107 - DNA, 637 bp, Homo sapiens
  source 1..637: mol_type = genomic DNA
ccaccgaggtcgcacgcgtgagacttctccgccgcctccgccgcagacgccgccgcgtgagtgtggtgaccgggcccggggtgccggctggggacgcggagtccgtggggatgcggggtgggcggcggggtatttttgggacggaggcctacgggccgagccacgcgcggcctcgcccggcggccccgggatgggccggcaggaggccgccggggtaactccgccgtcgcgtcctctccgcccgcctcaggatgcgctacgtcgcctcctacctgctggctgccctagggggcaactcctcccccagcgccaaggacatcaagaagatcttggacagcgtgggtatcgaggcggacgacgaccggctcaacaaggttatcagtgagctgaatggaaaaaacattgaagacgtcattgcccagggtattggcaagcttgccagtgtacctgctggtggggctgtagccgtctctgctgccccaggctctgcagcccctgctgctggttctgcccctgctgcagcagaggagaagaaagatgagaagaaggaggagtctgaagagtcagatgatgacatgggatttggcctttttgattaaattcctgctcccctgcaaataaagcctttttacacatc

SEQ ID NO: 4108 - DNA, 1362 bp, Homo sapiens
  source 1..1362: mol_type = genomic DNA
accacaaagcggttggttgcggcagggactacaccggtgtatcatgggagcggcccgggctacacgttaaaaacactaaggggagcgcgcgaagctgaacttggcgctcgatgggggccgttagccgccctagagcgcgcggagccgcagaggcgtagctggactacaacgcagtgcatctcgggaggccaactcgactggactggccccctcatgcccggctgcgagctgcccgtgggcacctgcccggacatgtgcccggccgccgagcgcgcccagcgcgaaagggagcaccgcctgcaccgcttggaggtggtgccgggttgccgccaggacccgccccgcgcggatccgcagcgcgcggtgaaggagtacagccgacccgccgccggcaagccccggcccccgcccagccagttgcgtccgccctccgtgctgctggccaccgtgcgctacctggccggtgaggtggcggagagcgccgacatcgcccgcgccgaggtggccagcttcgtggcagaccgcttgcgagctgtgctcctggacctggcgctgcagggagcgggcgacgccgaggcagctgtggtgctggaggcggcgctggccacgctgctgaccgtagtggcgcggctcgggcccgacgcggcgcggggacccgcggacccggtgctgctgcaggcccaggtgcaggagggcttcggctcgctgcggcgctgctacgcgcggggcgccgggccgcacccccgccaacccgccttccagggcctctttctgctctataacctgggctcggtggaagccctgcatgaggttctacagctgcctgctgccctgcgcgcctgcccgcccctccgcaaggccttggcggtagatgctgccttccgagagggcaatgctgcccgcctgttccgtctgctccagaccctgccctacctgccaagttgcgctgtgcagtgccatgtgggccatgcccgccgggaagccctggcccgcttcgctcgtgcctttagcacccccaagggccagaccttgcctctgggcttcatggtcaacctcttggccctggatggactcagggaagcacgggacctgtgccaggcccacgggctgcccttggacggagaggagagagttgtgttcctgaggggtcgctacgtggaggaagggctaccgcctgccagtacgtgcaaggtgttagtggagagcaaacttcgaggacgtaccctggaggaggtggtcatggcagaggaggaagatgagggcacggacagacctgggtccccagcctgaggagggagcgtgagcctcccagagccccaggactgggccagagcacttaggtttctttttccatggtttcca

SEQ ID NO: 4109 - DNA, 4415 bp, Homo sapiens
  source 1..4415: mol_type = genomic DNA
aaggtccctttaaggcgacggcgccttcctcgggtcagactaccggcggcgacgaccacaggagcatggcggacaccgacctgttcatggaatgtgaggaggaggagttggagccatggcagaaaatcagtgatgtcattgaggactctgtagttgaagattataattcagtggataaaactaccacagctggcaatcctttggtccagcaaggtggacagccactcatcctgacccagaatccagccccaggtctgggcacaatggttactcaaccagtattgaggcctgttcaggtcatgcagaatgccaatcatgtgactagttcccctgtggcctcacaaccaatatttatcactacgcagggatttcctgtaaggaatgtccggcctgtacaaaatgcaatgaatcaggttgggattgtgctgaacgtacagcaaggccaaacggttagaccaattacactagttccagccccaggtacccagtttgttaagccgacagttggagttccacaagtgttctcccagatgacccctgtgaggccaggctccacaatgcctgtgaggcccaccaccaacaccttcaccaccgtcatcccggccactcttaccattcgaagcaccgtcccacagtcccagtcccagcagaccaagtccactcccagcacttctaccactcccactgccacacagccaacctcactggggcaactagctgttcagtctccaggccagtcaaaccagaccacgaatcccaagctagtgagcattgccagctttgtcactgtgaagcgacctggtgttacaggcgaaaatagcaatgaagtggccaaattggtgaatacccttaacaccatcccttccctgggccagagtcctgggccagtggtggtgtccaacaacagctctgctcatggctctcaaagaaccagcggacctgagtcttcaatgaaagtgacctcttccatcccagtatttgacctccaggatggtggacggaaaatatgtccacgatgtaatgctcaatttcgtgttactgaagctttgagaggtcacatgtgttactgttgcccagaaatggttgaataccagaagaaaggaaagtccctggattcagaacccagtgtcccatcagcagcaaagcccccatcccctgagaaaacagctcctgttgcttccacaccctcttctacacctattcctgctctgtcaccgcctaccaaagtaccagaaccaaatgagaacgtgggcgatgccgtccagaccaaactcattatgcttgtagatgacttctactatggacgggatggtggcaaagtagcccagctcacaaatttccctaaggtcgccacatctttccgatgcccacattgtaccaaaaggctaaaaaacaatattcgattcatgaaccatatgaaacaccacgtagaactcgatcagcagaacggtgaggtagatggtcacactatctgccagcactgttaccgccagttttccactcccttccagcttcagtgccacttggaaaatgttcatagtccctatgaatctactaccaagtgcaagatctgtgaatgggcgtttgaaagtgagccactatttctccagcatatgaaggatactcataagcctggagagatgccttatgtttgccaggtgtgtcaatatcgctcctcactctactctgaggtagatgtccattttcggatgatccatgaggatacccggcatctgctctgcccttattgcctgaaggtcttcaaaaatggcaatgcattccaacagcattacatgaggcaccagaagagaaatgtttatcactgcaacaaatgccggctgcagtttctctttgccaaggacaaaattgaacacaagcttcaacaccataaaaccttccgtaaacccaagcagctggagggcttgaaaccaggcaccaaggtgacaatccgggcttcccgagggcagccacgaactgttcctgtatcctctaatgatacacctcccagcgccttgcaggaggcagcaccgctgacctcctcaatggaccctctgcctgtcttcctttatccccctgtccagcgcagcatccagaagagagctgttaggaaaatgagtgtcatgggccggcagacatgcctggagtgcagcttcgagatcccagacttccctaatcatttccctacttacgtacactgctctctgtgtcgctatagcacctgctgttctcgagcttatgccaaccacatgatcaacaatcatgttccacggaagagccccaagtatttggctttgtttaaaaattctgtgagtggaatcaagctggcctgcacttcatgtacctttgttacctctgtgggcgatgctatggccaagcatttggtattcaacccctctcacagatccagcagcatcctgccacggggactcacttggatagctcactcaaggcatggccagactcgtgaccgagtgcatgaccggaacgtgaagaatatgtaccctcctccttccttccccactaacaaagctgccactgtgaaatctgcgggggccaccccagctgagcctgaagagctactaactcccttagccccagcactcccatcaccagcctcaactgcaaccccaccaccaacccccactcacccgcaggctttagcccttccaccgctggctacagagggagccgaatgtctgaatgttgatgatcaggatgaagggagcccagtcacccaagaacctgagctagcatcaggtggtggtggtagtggtggagttggcaaaaaggagcagctgtctgtgaagaagcttcgagtagtactgtttgctctatgctgcaatacagaacaggcagctgaacacttccgaaatccccagcgacgtattcgccgttggcttcgacgtttccaggcctcccagggggagaatctagagggcaaatatctgagctttgaggcagaagagaaactggctgagtgggtgctaacccagcgcgaacaacagctacctgtaaatgaggagaccttgttccagaaggccaccaaaataggacgttctttggaaggggggtttaagatctcctatgagtgggctgtgcgtttcatgctgcggcaccacctgactccccatgcccggcgagctgtggcccacaccctacctaaggatgtagcagagaatgcaggactcttcattgattttgtacaacggcagattcacaaccaggacttacccttgtctatgattgtggctattgatgagatctctttgttcctggatacagaggtgctgagcagtgatgatcgaaaggagaatgccctgcagacagtgggcacaggggaaccttggtgtgatgtagtcctagccattctggcagatggcactgtccttcccaccctggttttctacagagggcagatggatcagcctgctaacatgccagactccatattgctagaggcaaaggagagtggctacagtgatgacgagatcatggagctgtggtcaactcgagtgtggcagaagcacacagcttgccagcgcagcaaaggcatgcttgtgatggactgtcatcgcactcacttgtcagaagaggtactggctatgcttagtgcctctagcactttgcctgcagtggtcccagcaggctgtagctccaaaattcagccattagatgtatgcatcaaaagaactgtcaagaacttcctgcataaaaaatggaaggaacaggctcgggaaatggcagatactgcatgtgattctgatgtcctgcttcagctggtgcttgtctggctgggtgaagtgctaggtgtcattggggactgtccagagctagttcagcgctccttcctggtggctagtgttctgcctggccccgatggcaacattaactcacctacaagaaatgctgacatgcaggaggagctaattgcctccctagaggagcaactgaagctgagtggggaacattctgagtcttccactccacgacccagatcatctcctgaagagacaattgagcctgaaagtcttcaccagctctttgagggtgaaagtgagaccgagtctttctatggctttgaagaagctgacctagatctgatggagatttgagtgttggggtcatgagggggtgtggagtgagggtgggaacatgtgagggagggtaaaggggcttagggaaaagggggcataccaggtggggtatttggtttctattttttaattttataccaccactcccccctgaagttgacttacacttccctgtggatttgtggattaattaggaaaaccaatagtaatcacgtctgagccaaggagctggcccattggtcattcacttctgctaaaaacaggtttttgtgactttttttttttttaaatttaaatcactgtgtttggtatttttctgac

SEQ ID NO: 4110 - DNA, 687 bp, Homo sapiens
  source 1..687: mol_type = genomic DNA
agagctttgtgctgaacatcagtcctccacatcgactcctcttgtaagatgttgtgtccaggtggatcatcacagtggctgccatccttaaatatgtcttggtcctgttgctgctaattgataccagcatgttttggaaatttgatcttcactcatcatcccacatagacacacttctagaaagagaagatgtaacactgaaggagttaatggatgaggaagatgttttacaggaatgtaaagctcagaaccgcaaacttatagagtttctgttaaaagcagaatgtctcgaagatttagtctcattcattatagaagaaccacctcaagacatggatgaaaagatcagatacaagtatccaaatatatcttgtgagttgctcacttctgatgtctcccagatgaatgatagactgggagaagatgaatccttgctaatgaaattatatagcttcctcctaaacgattcccctttgaatccactacttgccagtttcttcagcaaggtgctaagtattcttatcagcagaaaaccagaacagattgtggatttcttaaagaagaagcatgattttgtagaccttattataaagcacataggaacttctgctatcatggatttgttgctcaggctcctgacgtgtatcgaacctccacagcccaggcaagatgtgctgaattggttaa

SEQ ID NO: 4111 - DNA, 582 bp, Homo sapiens
  source 1..582: mol_type = genomic DNA
gctctggggcttggtgggggcaatccctgcgtccggagagcgctggtggtagggaggcttctcccggttctgtgagcagcaggaccctcccgagggcctgaccgtggaggtagcactgcacacccactccctgtgggccggagccaggaggcacttcctgggtgtcggagcccagaaggaaaccagtggccgggaagcaccagctgggtcagtctccaggtgtgggacaggcactggcctcagaccggggccacactgaggtctgcccttctcccgctggccgccacccaagacaccatgagccagtccggggccgtgagctgctgcccgggtgccaccaatggcagcctgggccggtccgacggtgtggccaagatgagccccaaggacctgtttgagcagaggaagaagtattccaactccaacgtcatcatgcacgagacctcgcagtaccacgtccagcacctggccacattcatcatggacaagagcgaagccatcacgtctgtggacgacgccatccggaagctggtgcagctgagctccaaggagaagatctggacccaggagatgctgctgcag

SEQ ID NO: 4112 - DNA, 2294 bp, Homo sapiens
  source 1..2294: mol_type = genomic DNA
tggcgcatatggtattctaaatattactggaagtaacagggatgctctgtagatccccaacaatacttttgagaagcagttgctgatatatttttccattcagtggaaacctatccgagcaaatttcatggttgcactgatctcttaacaatatgtattaccatgcttctccactaaaatatgtctgtaaggaagtacccagtacagtatgtctgtaaggaatattccattaaaaggaatatagtgtcgctgtcaattacatttttttttcttttgagatggagtcttgctctgttgccaggctggagtgcaatggtgcaatctcggctctcccgagtagctgggactacaggtgtgcgccaccacgcccagctgatttttgtatttttagtagagatggggtttcaccatgttggcgagatggtctccatctcttgacctcgtgatccacccacctcggcctcccaaagtgctggtattacaggcgtgagccatcacgcctggcctatttacatattttcattaaactcaattttcagagtcattttcagagcacatggatgatagcaagcaagaatctaccaccagtaaagaagaggaaacaaatattataagttccatagttccttcaacacaagatatttatcagcggcagaactcttcagacgttcataaatctctgttgcctgcagtggatgaaactacatgtggtcacacacactttcagcaaatgatagacaagtacattaatgaagcaaatttgatacctgaaaaaacagatttgcaagaattggaacacatttttcctaatttgcatcatcagctgtttaaacccttagaaccacatccagattttgacttatcatcatcatcctctgggatttctccagacaacagagacttttaccagagatcagattcttcatctgaaagccactgtgctactggattatccaaaagtacagtttatttcacagcactgaggaggaccagcatgcattcttctcttaacacaagtccgaatcaacaacctgacactaacttggctcatgttggagctcacagttttgctacagaaaatattattgggggatctgaacaatgttttgaacagcttcagccagaatattcttcacaggaggagagccagcatgctgatctaccaagtatttttagcattgaagcaagagattcttcccaaggcatgaaaaatcagaactatccctctgaagaacatactgaaatattacaaaacaagaaaaaaattgttcatttccagctttctataggaaacttaagttcagtctacagttcatctgatgaagctaatgtatttgatcagttaaatgtacagcatagcactccatgtggttctaactctagtgagtgctcaacaaaacaccaactagaaagcagaaaggaaagtatgggctttgaagaactatcaaaaagaggggttgttacaatgttacaaagtcaaggactcattgaagataataaaaatgaaacctgtagggttttagacataaatccacaggtagaggaaactgactctcgattatgtgtaagaacagtggagatgggaacttcaattcaggcaccatattccttaactactcaaaatgaaaaatattttgagaattcagctgaaacagacattccaaaaatcaccaaaaaactatctcaactaggagaatcagagctttttgcaagttctggatcattttcattacagagctctataccagtctgggaaacagaaactggccatggtataatggaagaaccagaacttactttaataagcaccactgataccagtattgctgaaatggattttgcaaatttaaccctagaagagaagagcgagaatgaagcaaaatgcttctttcaggtgagtgagtttctgcctcttgtatcagcaacagaagcctcagattatccagctgtatcagaactttccatagaaaaaccaaggacagcatctacagcagaaacccctcgcaggcttacacctgtaccagggagcttacaagaagcatttataaagaggaaaaaatcatttatggagagatcccaccagaggcagaaagaaataaggaataaaattcatgtctctgaaaattctcaaatcaaaacagttaaagagaaaccatctataagttcatctgtgagtcgtctaaagggcgtgaataaagtcagagcatcttttcctgaagacagaaagactacacaggctctaaggcaccaaaggggtctaaggttatacaatcaactagctgaagtgaaacaac

SEQ ID NO: 4113 - DNA, 578 bp, Homo sapiens
  source 1..578: mol_type = genomic DNA
ctttctgtggtgaggattagcggcagcaaggaatgcagtggagccattaccttgtcaccttctgagcagggttaggcttgctgaggggcaggcacaggagtcctggctgagctcatggcctgaggctgcctagcggccacggggaatggttgcaatggcggaggcagaggcaggggtggcagtggaggtccgtggactgccccctgccgtgcccgacgagctgctcactctctactttgaaaaccgccgacgctctggagggggacctgtgttgagctggcagagactgggctgtgggggcgtcctcaccttcagagagcctgcagacgccgagagggtcttggcccaggcagatcacgaactacatggtgcccagctgagcctgcggccagctccaccacgagcccctgcacgcctgctgctccaaggactgccccctggcaccacgccccagcgcttggagcagcatgtccaggccttgctgcgggcctcggggctcccagtacagccttgctgtgccttggccagcccccggccagaccgggctctggtccagttgcccaagcccctttctgagg

SEQ ID NO: 4114 - DNA, 500 bp, Homo sapiens
  source 1..500: mol_type = genomic DNA
atgctcagcacctggcaggtgtgagggaccaggagcagggttgagaaggttgctgggggcgttgaaggccagccttggccgggggcgggcctggagacccagcactttgtgtgcagagggtgtcatggacacagaggcttggagatcctgagtgaggggcagtgactcaggccccttgcagggttaggcttgctgaggggcaggcacaggagtcctggctgagctcatggcctgaggctgcctagcggccacggggaatggttgcaatggcggaggcagaggcaggggtggcagtggaggtccgtggactgccccctgccgtgcccgacgagctgctcactctctactttgaaaaccgccgacgctctggagggggacctgtgttgagctggcagagactgggctgtgggggcgtcctcaccttcagagagcctgcagacgccgagagggtcttggcccaggcagatcacgaactacatggtgcccagctgagcctgcgg

SEQ ID NO: 4115 - DNA, 3044 bp, Homo sapiens
  source 1..3044: mol_type = genomic DNA
gtctgtttaaggaatagcagaagacatgacatgtagacaaatttcaggttattttcagaagatactgggtttgttactgtattttaaaaggatactttcttggtttgttatgagatattctaattaaacagtgatgaattcttactcctggtcagtgtaagtctaaattcaagtttgttgctttgttttacagtttcctttcactcccctcccccatcccctcatgagtcataagcatgcagtgttgggaatagaacttgtcagctgagtggggatgagacagttctctgcccatactatttgtaactgtagtcaatgaggagaggaaaggacgttattaaatgctggagaaacaccttgattgaggcagcttcttctgtggctgtgtggtatggatgcagagttctgtgtgactatacactgatgtattctggctctgaatcacttagggatctcttctgcaccttgtgcattgtaggttttggatgcttatttgtttagggtctaggacctggtgcttagcctctcctggatcctgtatatttactgactttccaaattcttttgagtgtggcattatatctgcttcatcttctctttcttggctattcttagtgcccttctcattttactgtcctaatgttttcccatttatactatgaatcattgtgcaccctatgtagagcctgtcattggagattaaaatcagtggcagctctttgattttacagctcagcctcagctgaacataacttctttttttcaaagttccctgtgttgtgaactgagcttgggtgaagtgaaatctttgaggaagctaaagctgtgtgtatttgtggatcagacaagtgcagcaagttaatatcattggcttctgaaggggagagtgaggtgatggctgcgtttaagttggatttccttccagaaatgatggtggatcattgctctttgaattccagtcccgtctcaaagaaaatgaacggcaccctggaccacccagaccaaccagatcttgatgctatcaagatgtttgtgggccaggttccaaggacctggtctgaaaaggacttgcgggaactcttcgaacagtatggtgctgtgtatgaaatcaacgtcctaagggataggagccaaaacccgcctcagagcaaagggtgctgttttgttacattttacacccgtaaagctgcattagaagctcagaatgctcttcacaacatgaaagtcctcccagggatgcatcaccctatacagatgaaacctgctgacagtgagaagaacaatgtggaagacaggaagctgtttattggtatgatttccaagaagtgcactgaaaatgacatccgagtcatgttctcttcgtttggacagattgaagaatgccggatattgcggggacctgatggcctgagccgaggttgtgcatttgtgacttttacaacaagagccatggcacagacggctatcaaggcaatgcaccaagcacagaccatggagggttgctcatcacccatggtggtaaaatttgctgatacacagaaggacaaagaacagaagagaatggcccagcagctccagcagcagatgcagcaaatcagcgcagcatctgtgtggggaaaccttgctggtctaaatactcttggaccccagtatttagcactttatttgcagctccttcagcagactgcctcctctgggaacctcaacaccctgagcagcctccacccaatgggagggttgaatgcaatgcagttacagaatttggctgcactagctgctgcagctagtgcagctcagaacacaccaagtggtaccaatgctctcactacatccagcagtcccctcagcgtgctcactagttcagggtcctcacctagctctagcagcagtaattctgtcaaccccatagcctcacttggagccctgcagacattagctggagcaacggctggcctcaatgttggctctttggcaggaatggctgctttaaatggtggcctgggcagcagtggcctttccaatggcaccgggagcaccatggaggccctcactcaggcctactcgggtatccagcaatatgctgctgctgcgctccccactctgtacaaccagaatcttctgacacagcagagtattggtgctgctggaagccagaaggaaggtccagagggagccaacctgttcatctaccacctgccccaggagtttggtgatcaggacctgctgcagatgtttatgccctttgggaatgtcgtgtctgccaaggttttcatagacaagcagacaaacctgagcaagtgttttggttttgtaagttacgacaatcctgtttcggcccaagctgccatccagtccatgaacggctttcagattggcatgaagcggcttaaagtgcagctcaaacgttcgaagaatgacagcaagccctactgagcgtgctcccctctgagactggagtgagagggtcttctggtcttacttcagctcttgcctgtgacccacacagcttctgggctctgcctctgctctaagaagtgctgtgggggtagagaaccaggaaggacatgctgttgggaatgtacacctgggcagaggtggccctgttaagatgtgactgtagccacagccagggatgggatccctgggtctctggaatctgaaacctcaacaaataccagtcttgacccctagcagcagagataagaataaaggggttggtttgctattaagtcagatgggggctctctccttgtcatgctgtccctgtgggtaacagacagggattgaccatcttactgttgtacaggtagctggtggtgttggattatcccattgaagctgggacagctgttcctttctcatagtgataacttgggtctgttgtcctctaaggaacgtgaaacatacacttcttaagctgaaccacgtaaacttgaaattctgcgcactgggagaaatgtgtcctgtgtttcaaaggataaaactgttctaaaggcttccagggtcatgatgggattttttaaataaatgcaaaaaataaaaat

SEQ ID NO: 4116 - DNA, 1991 bp, Homo sapiens
  source 1..1991: mol_type = genomic DNA
agtctggtgtctcatctctcgccccggaggtcaaacctggagccagcatttctgtaccctgcgctcacacctttttcaacccggatggcggtgatagttaatactttctgagcgcttttactatggtcaggcattatatttacacctaatcctcgcaaaacactactgggaagatcctcatttgacaggagcaattccgggtcacaaaggctgacaccacaaagctagtccgtagcgggttcgaccacaggcgcccacactctttgacgcctcaatggcacagccaagtgcgcgggaagtgggctgcaaacgccggagagttttgtccggagcgcagagacgcgctgtaaccgagcaaccagcggggcccgcccccggcctgctacggcgctcccagcctgccccgcgccgctcggcgccggaagtgagtgagcatttccggcagccatccccgcggtgctgacatcccggttgttcttctgtgccgggggtcttcctgctgtcatgaaggacgtaccgggcttcctacagcagagccagaactccgggcccgggcagcccgctgtgtggcaccgtctggaggagctctacacgaagaagttgtggcatcagctgacacttcaggtgcttgattttgtgcaggatccgtgctttgcccaaggagatggtctcattaagctttatgaaaactttatcagtgaatttgaacacagggtgaaccctttgtccctcgtggaaatcattcttcatgtagttagacagatgactgatcctaatgtggctcttacttttctggaaaagactcgtgagaaggtgaaaagtagtgatgaggcagtgatcctgtgtaaaacagcaattggagctctaaaattaaacatcggggacctacaggttacaaaggaaacaattgaagatgttgaagaaatgctcaacaaccttcctggtgtgacatcggttcacagtcgtttctatgatctctccagtaaatactatcaaacaatcggaaaccacgcgtcctactacaaagatgctctgcggtttttgggctgtgttgacatcaaggatctaccagtgtctgagcagcaggagagagccttcacgctggggctagcaggacttctcggcgagggagtttttaactttggagaactcctcatgcaccctgtgctggagtccctgaggaatactgaccggcagtggctgattgacaccctctatgccttcaacagtggcaacgtagagcggttccagactctgaagactgcctggggccagcagcctgatttagcagctaatgaagcccagcttctgaggaaaattcagttgttgtgcctcatggagatgactttcacacgacctgccaatcacagacaactcacttttgaagaaattgccaaaagtgctaaaatcacagtgaatgaggtggagcttctggtgatgaaggccctttcggtggggctggtgaaaggcagtatagacgaggtggacaaacgagtccacatgacctgggtgcagccccgagtgttggatttgcaacagatcaagggaatgaaggaccgcctggagttctggtgcacggatgtgaagagcatggagatgctggtggagcaccaggcccatgacatcctcacctagggccccctggttccccgtcgtgtctcctttgactcacctgagagaggcgtttgcagccaatgaagctggctgctcagacggtcgacattgaatttgggtgggggttgggatcctgtctgaagtacagactgttcttgctctaaaaacaggactgtccctgatgggagccaggccacagggaggaggcttctttgtgggtctctcctgcagagggtgggggtctcagggtcttaggtgatacgggagagaaagaacgtgccaggcaggaggccccctgaagtctgtgtactccgaggtggatctccatccccatccacctgtacggacatcttttccgttgcggtttgagaatgttc

SEQ ID NO: 4117 - DNA, 805 bp, Homo sapiens
  source 1..805: mol_type = genomic DNA
ctttccgccagcgcccgcaggacccggatgagagcgcacgcttcggggtctccgggaagtcgcggcgccttcggatgtggcggatgcggccgtgagccggcgggggagttcctccagatccagctggtgccctcgcctgacgtttgaacgaccacctgctcacctcctcccttttgcgcgttgattcttcagacttcaaagggcccaccggtgctgctgctgcctccactgtactcagacccaggtagcacaggattgtccatcctccagcagctcagtgcaacggtgtgaactcagcctgtttcagagcctccacaccatgacctccaagaagctggtgaactcggtggctggctgtgctgatgacgctcttgctggcctggtggcctgcaaccccaacctgcagctcctgcagggccaccgcgtggccctccgttctgacctggacagcctcaagggccgggtggcactgctgtcgggtgggggctctggccatgagcctgcccatgctggtttcatagggaaggggatgctgactggggtcatcgcgggagctgtgttcacctccccggcagtgggcagcatcctggcagccatcagggccgtggcccaggccggcacagtggggacgctccttatcgtgaagaactacactggggatcggctcaacttcggcctggcccgggagcaggcccgggctgaaggcatcccggtggagatggtggtgattggggacgacagcgccttcactgtcctgaagaaggcaggccggcgggggctgtgcggcacggtgcttatacacaag

SEQ ID NO: 4118 - DNA, 8246 bp, Homo sapiens
  source 1..8246: mol_type = genomic DNA
gatcagcggcggcggtgaccgcgagtgggtcggcaccgtctccggctccgggtgcgaacaatgctgactgatagcggaggcggcggcacctcctttgaggaggacctggactctgtggctccgcgatccgccccagctggggcctcggagccgcctccgccgggaggggtcggtctggggatccgcaccgtgaggctctttggggaggccgggccagcgtcgggagtcggcagcagcggcggcggcggcagcggcagcggtacgggcggaggggacgcggcgctggatttcaagttggcggctgccgtgctgaggaccgggggtggaggtggtgcctctggcagtgacgaggacgaagtgtccgaggttgaatcatttattttggaccaagaagatctggataacccagtgcttaaaacaacatcagagatattcttatcaagtactgcagaaggagcagacttacgcactgtggatccagagacacaggcacgactagaagcattgctagaagcagcaggaattggcaaattgtcaactgctgatggtaaagcttttgcagatcctgaggtactccggagactgacatcctcagttagttgtgcactggatgaagctgctgctgcactgacacggatgaaagcagaaaacagccacaatgcaggacaagtggacactcgcagtctagcagaagcttgttcagatggggatgttaatgctgttcgtaaattgctagatgaaggcagaagtgtaaatgaacatacagaagaaggagaaagcctgctgtgtttggcttgttcagcagggtattatgaattagcacaagtattgcttgctatgcatgctaatgttgaagatcgagggaataaaggagacataactcccctgatggcagcttccagtggaggttacttagatattgtgaaattattacttcttcatgatgctgatgtcaactcccagtctgcaacaggaaacactgcgctaacttatgcatgtgctggaggatttgttgacattgttaaagtgctccttaatgaaggtgcaaatatagaagatcataatgaaaatggacatactcccttaatggaagcagccagtgcaggtcatgtggaagttgcaagagttcttttagatcatggtgcaggcatcaacactcattctaatgaattcaaagaaagtgctctaacacttgcttgctacaaaggccatttggatatggttcgctttctacttgaagctggtgcagatcaagagcacaaaacagatgagatgcacactgccttaatggaggcctgcatggatggacatgtagaggtggcacgtttgcttttggatagtggtgctcaagtgaacatgcctgcagattcatttgaatctccattgacgctagctgcctgtggaggacatgttgaattggcagctctacttattgaaaggggagcaaatcttgaagaagttaatgatgaaggatacactcccttgatggaagctgcccgggaaggacatgaagaaatggtggcactactcttagcacaaggagcaaatataaatgcccagacagaagaaactcaagaaactgctcttactttggcttgctgtggaggattttctgaagttgcagactttcttattaaggcaggggctgatatagaacttggctgctccacacctctgatggaggcatctcaggagggacacctggaattggttaaatatttgctggcttctggcgctaatgtgcatgctacaacagcaacaggagacacagccttaacctatgcttgtgaaaatggacatacggatgttgcagatgttttacttcaagcaggggctgatttagaacatgaatctgaaggtggaagaacacctttgatgaaagctgcaagagctggtcatttgtgcactgtgcagtttcttattagcaaaggtgccaatgttaacagggctacagccaataatgatcatacagtagtgtcgctggcatgtgcaggaggccacctggcagttgttgagcttctcttggctcatggggctgaccctactcatcgactcaaggatggttcaacaatgctcattgaagctgcaaagggtggccatactaatgtagtttcttatctgttggattatccaaataatgttctgtcagttcccaccacagatgtgtctcagctccctccaccttctcaagatcagtctcaggtgccacgtgtgccaacgcatacacttgccatggttgtacctccccaggaacctgacagaacttcacaggagaactctcctgcccttttaggagtgcaaaaaggtacatccaagcagaagtccagttccctccaggtagcagatcaggacctactgccatcttttcacccataccagcctttggagtgcatagtagaggagactgaaggcaagctgaatgaactgggacaaagaattagtgctattgaaaaagcacagcttaagtcactggagttaattcaaggtgaacctctgaacaaagataagatagaagaacttaaaaagaacagagaagagcaagtccagaagaagaagaaaatattgaaagaactgcagaaagtggaaaggcagttgcagatgaaaacacagcagcaatttaccaaagaatacttggaaaccaaaggtcagaaagacacagtgtctctacaccaacagtgctctcatagaggagtcttcccagaaggggaaggagatggtagtctcccagaggatcacttttcagagttacctcaggttgacacaatcttatttaaagataatgatgttgatgatgagcaacagtctccaccatcggcagaacagattgattttgtcccagtccagcctttatcatctccacagtgtaacttttccagtgacttaggttctaatgggacaaattctcttgaacttcagaaagtatcaggtaatcagcagattgtaggacagcctcagattgctattactggacatgatcaggggctgttagttcaagaaccagatggactaatggttgcaactccagctcagacgcttaccgacactcttgatgacctgatagcagctgtgagtaccagagtgcccactggttccaacagttcttctcagaccacagagtgtcttacacctgaatcctgttcgcagactacaagcaatgtggcttcccaatcgatgcctcctgtgtatccttcagttgacattgatgcacatactgagagcaatcatgacacagcattaacactagcttgtgcaggtggtcatgaagaacttgtatctgtgctcattgcacgggatgccaaaattgaacacagagacaaaaaaggtttcacaccactaatcctggcagcaacagcagggcatgttggagttgttgaaatccttttggataaaggtggagatatagaagcacagtctgaacgaactaaggatactccgctttcattggcatgttctggtggacgtcaggaggtggtagacttgctgctggctcgaggtgcaaataaagaacataggaacgtatctgattatacaccactgagtctagctgcgtctggaggatatgttaatatcattaagattctgcttaatgctggggcagaaattaattcaaggactgggagtaaactaggtatttctcccctgatgttggctgcaatgaatggacatgttcctgcagtaaaattgctgctcgatatgggttcagacattaatgcccaaatagagaccaatcggaacacggctctcaccctggcctgtttccagggccgagcagaagtagtgagtttgcttctggaccgaaaagccaatgttgaacatagggcaaagacgggtcttacccccttgatggaagcagcttctggagggtatgcagaggttggaagagttcttcttgataaaggagcagatgttaatgctccccctgtgccttcctcaagagatactgctttaacaatagcagcagacaaaggtcactacaaattttgtgaactcctgattcataggggagcccacattgatgttcgtaacaaaaagggaaatacgccactttggctggcatccaatggaggtcattttgatgttgtgcagttgctagtgcaagcaggtgctgatgtggatgcagcagataaccggaaaatcacacctcttatgtcagcatttcgcaagggtcatgtaaaagttgttcaatatttggtaaaggaagtaaatcagttcccttctgatatagaatgcatgagatacatagcaacaattacagataaggaactgttgaaaaaatgtcatcaatgtgtcgaaaccattgtgaaggctaaagaccagcaagctgcagaagcaaataagaatgcgagtattcttttaaaggaacttgatctggaaaagtcaagagaagagagcagaaagcaggctcttgctgctaaaagagaaaaaagaaaagaaaagagaaaaaagaaaaaagaggaacagaaaaggaaacaggaagaagatgaagaaaacaaacctaaggagaattcggaactaccagaggatgaagatgaagaggagaatgatgaagatgtggagcaagaagttcccatagaacctcctagtgcaaccaccaccactacgattggaatctctgcaacatctgcaacattcacaaatgtgtttgggaaaaaaagggccaatgtggtgacaactcccagcaccaatcggaaaaataagaagaacaaaacaaaagaaacccctcctacagcacatttaattttaccagaacaacatatgtctttagcccaacaaaaggcagataaaaataaaataaatggagaacctagaggtggtggtgcaggtgggaatagtgattcagataacttggacagcacagactgcaacagtgagagtagcagtggtggtaaaagccaagagttaaattttgtgatggatgtgaattcctctaaatacccctcactgctccttcattcccaagaagaaaagacaagtactgctacttccaaaactcagacacgacttgaaggtgaagtgactcctaattccttgtcaaccagctacaagacagtgtcattgccattaagctctccaaacataaagctgaatctcactagccctaaaaggggtcagaaaagagaagaagggtggaaagaagttgtacgaaggtcaaagaaattgtctgttccagcctcagtggtgtcgaggataatgggaagaggaggatgcaacatcactgcaatacaggatgttactggtgcccatattgatgtggataaacaaaaagataagaatggcgagagaatgatcacaataaggggtggcacagaatcaacaagatatgcagttcaactaatcaatgcactcattcaagatcctgctaaggaactggaagacttgattcctaaaaatcatatcagaacacctgccagcaccaaatcaattcatgctaacttctcatctggagtaggtaccacagcagcttccagtaaaaatgcatttcctttgggtgctccaactcttgtaacttcacaggcaacaacgttatctacgttccagcccgctaataaacttaataagaatgttccaacaaatgtacgttcttctttcccagtttctctacccttagcttatcctcaccctcattttgccctgctggctgctcaaactatgcaacagattcggcatcctcgcttacccatggcccagtttggaggaaccttctcaccttctcctaacacatggggaccattcccagtgagacctgtgaatcctggcaacacaaatagctctccaaagcataataacacaagccgtctacctaaccagaacgggactgttttaccctcagagtctgctggactagctactgccagttgtcctatcactgtctcttctgtagttgctgccagtcagcaactgtgtgtcactaatacccggactccttcatcagtcagaaagcagttgtttgcctgtgtgcctaagacaagtcctccagcaacagtgatttcttctgtgacaagcacttgtagttccctgccttctgtctcctctgcacctatcactagcgggcaagctcccaccacatttctacctgcaagtacttctcaagcacagctttcttcacaaaagatggagtctttctctgctgtgccacccaccaaagagaaagtgtccacacaggaccagcccatggcaaacctatgtaccccatcttcaactgcaaacagttgcagtagctctgccagcaacaccccgggagctccagaaactcacccatccagtagtcccactcctacttccagtaacacacaagaggaggcacagccatccagtgtgtctgatttaagtcctatgtcaatgccttttgcatctaactcagaacctgctccattgactttgacatcacccagaatggttgctgctgataatcaggacaccagtaatttacctcagttagctgtaccagcacctcgagtttctcatcgaatgcagcccagaggttctttttactccatggtaccaaatgcaactattcaccaggatccccagtctatttttgttacgaatccagttactttaacaccacctcaaggcccaccagctgcagtgcagctttcttcagctgtgaacattatgaatggttctcagatgcacataaacccagcaaataagtctttgccacctacatttggcccagccacacttttcaatcacttcagcagtctttttgatagtagtcaggtgccagctaaccagggctggggagatggtccactgtcctcacgagttgctacagatgcctctttcactgttcagtcagcgttcctgggtaactcagtgcttggacacttggaaaacatgcaccctgataactcaaaggcacctggcttcagaccaccttcccagcgagtttctactagtccagttgggttaccatccattgacccatcaggcagctccccatcttcctcttctgctcctctggcaagtttttccggcataccaggaacaagggttttcctgcaagggccagctcctgttgggactcctagtttcaacagacaacatttttctccccatccttggacaagcgcctcaaactcatccacttctgccccaccaacgttgggccaaccaaaaggagtcagtgccagtcaagatcgaaagatacctcccccaattggaacagagagactggcccgaattcggcaaggagggtctgttgcacaagccccggcggggaccagttttgtcgctcccgttggacacagtggaatctggtcatttggtgtcaatgctgtgtcagaaggcttatcaggttggtcgcaatctgtgatggggaaccatccaatgcatcaacaattatcagacccaagcacattctcccaacatcagccaatggagagagatgattctggaatggtagccccctctaacatttttcatcagcctatggcaagtggttttgtggatttttctaaaggtctgccaatttccatgtatggaggcaccataataccctctcatcctcagcttgctgatgttccaggaggccctctgtttaatggacttcacaatccagatcctgcttggaaccctatgataaaagttatccaaaattcaactgaatgcactgatgcccagcaggccagtctgcttccttcagtccctgctctcaaaggggaaatcccatcacctcagctaaccagaccgaagaagagaattggacggccgatggtggcctctcctaaccagaggcaccaggatcatctacgaccgaaagttcctgctggagtgcaagaactcacccattgcccggacacccccctgctgcctccctcagattcccggggtcacaactcctccaacagcccctctctccaagctggaggagctgaaggagcaggagacagaggaagagatacccgatgacgcacaatttgaaatggacatctaatccagtgcagatgacctggcatgtggagttacagagggatccctcatgccactgctgccaccacctcttcctggggcatccaaaggccagctggcctcatctaatctggaagggagtgacttgttagttccaggcctcctttagttctgaggcagctagaccagggataggagtgggcaacttgccaagcccttaactctacttcctcttcagtctgtggtactcctcctaaccctaaaccctctatgctcaggggctggaactggggaatggagtaagtcaccttctgactgcttagtaaacattc

SEQ ID NO: 4119 - DNA, 844 bp, Homo sapiens
  source 1..844: mol_type = genomic DNA
gcggggcggcggggcggccggcggcggccatgggagatatcccagccgtgggcctcagctcctggaaggcttctccagggaaagtgaccgaggcagtgaaagaggccattgacgcagggtaccggcacttcgactgtgcttacttttaccacaatgagagggaggttggagcagggatccgttgcaagatcaaggaaggcgctgtaagacgggaggatctgttcattgccactaagctgtggtgcacctgccataagaagtccttggtggaaacagcatgcagaaagagtctcaaggccttgaagctgaactatttggacctctacctcatacactggcccatgggtttcaagcctcctcatccagaatggatcatgagctgcagtgaactttccttctgcctctcacatcctcgagtgcaggacttgcctctggacgagagcaacatggttattcccagtgacacggacttcctggacacgtgggaggccatggaggacctggtgatcaccgggctggtgaagaacatcggggtgtcaaacttcaaccatgaacagcttgagaggcttttgaataagcctgggttgaggttcaagccactaaccaaccagattttgatccgatttcaaatccagaggaatgtgatagtgatccccggatctatcaccccaagtcacattaaagagaatatccaggtgtttgattttgaattaacacagcacgatatggataacatcctcagcctaaacaggaatctccgactggccatgttccccatgtaaatatggctccttctttttaaaacagagggaagaatatacagattgaatgattggtgtctgaa

SEQ ID NO: 4120 - DNA, 1124 bp, Homo sapiens
  source 1..1124: mol_type = genomic DNA
tgggtacgtgactccgcccccgggccggtgcaggccctgaggggcgccgagatgtgggagctgctggccgcggcgtgggcagttcaggggctgggcggctgagggtgcaaatagctatgggcaacttggcctcggccataaggaagatgtgctgttgccccagcaactgaatgacttctgtaaacccaggagtgtcaggaggatcacaggaggagggggccactctgcagttgtcacagatggaggagacctctttgtttgtggcctgaacaaagatgggcaactggggcttggtcacacagaggatatcccatattttaccccctgcaaatccctctttggctgtcccatccaacaggtggcctgtggctgggattttacgattatgctcacagaaaatggtcaagttctatcatgtggatccaactcctttggccagttaggagttcctcatggacctcgaagatgtgtggttccccaggccattgagctccataaagagaaggttgtttgtattgctgctggactgaggcatgcagtagctgctacagcgagtggcatcgtgttccagtgggggactggtttggcatcatgtggacgacggttgtgccctgggcagactcttccattgtttttcacagcaaaggaaccaagcagagtgacaggtctagagaattctaaagcaatgtgtgttcttgctggctcagaccactcagcttcattaacagatgcaggagaggtgtatgtttggggaagcaacaagcatgggcaactggctaatgaggctgctttccttcctgtgccccagaaaatagaagcacattgtttccagaatgaaaaggtcactgccatctggagtggatggacacacctggttgctcagacaggtctcttgtggctcagagcataatttggcaataattgtatctctgcaaggtaagtattattatcccagttttgctgatgtggaaatggagttgcagagaaattaagagatatactcaagatcacagtgttcatgtgtcatggagccatttttgaatcctgtgagagacttcagtgctgatgatcggatgaccagaccatcaaaccatgctggaggtgattttttaattaccattctg

SEQ ID NO: 4121 - DNA, 889 bp, Homo sapiens
  source 1..889: mol_type = genomic DNA
gtgactgtcgtgtccaattacagaaaagcctgaatcaagagtatgcagccaaaactactaccaaattattggtaatgggaggagaaaatttaaacagaactgggatttgggaccaccttctggaagatgttagccaaaaaccgaacagatcctaggcatcaaggggtgtgaatttcgagtcaccccgccagaccccagggcgctgcggctcactccacactttcccgggaaccctacgcccaggaggctcagcgaagctccaaaaccaattttacggactgtactactgatccacctgtcggggagaaagactctacccgcagtttgacgaaaatggtcgtttccagatgcttgtaggatttcctcgctaagctccaccctctgcggcgccttcttctgattggctctgagtaatcagagccaaagcgttacttccggcggaaaaggacgcgggagattcgattggaaggctgccggcgtgctactgagttcggccggtccgagtcactgtgcgtcgcctgggcccgttcctggtcttctcccccagggtcttgctctgtcacccaggctggagtgccatggcatcatcatagctcactatggccttgatcctcctgccttagcctcccaagcagctggtattacagaccacggtgtgaacacatgaacagaagacgaaaatttcttctagcctcagtacttgctctccagaattcaagttttatatatccatcatgtcagaagtgcttctctaggataatcctggtctccaaaaggtctaattgtccaaaatgtggctctactggtgaatctggaaatgccaattacagatacaaactttccttaaaagttgcagaatcaaacaaattgtttgttattactgtatttg

SEQ ID NO: 4122 - DNA, 481 bp, Homo sapiens
  source 1..481: mol_type = genomic DNA
agacaaggaacagtggaacagttggcttgacgacagcgtcgggacccagccctgcgcaactccacctgcttctgggaacccagggggaagcaagggaagaccgtgacctttgccccgggctgtggggagccccggagcctgggcccggagaagcgcggttaggcttgctgaggggcaggcacaggagtcctggctgagctcatggcctgaggctgcctagcggccacggggaatggttgcaatggcggaggcagaggcaggggtggcagtggaggtccgtggactgccccctgccgtgcccgacgagctgctcactctctactttgaaaaccgccgacgctctggagggggacctgtgttgagctggcagagactgggctgtgggggcgtcctcaccttcagagagcctgcagacgccgagagggtcttggcccaggcagatcacgaactacatggtgcccagctgagcctgcggccagct

SEQ ID NO: 4123 - DNA, 1022 bp, Homo sapiens
  source 1..1022: mol_type = genomic DNA
ggagaggcccctcctcaggaaatgcgcccgtggaatgctctaccctcttccgcagccagtcgcccctggccttcccaacctcgcggctgcccgaaggacctgttgtgccgggtccggaaagcgtgtttcgctccctttcccttgagggagtggggagggaatgtgactcttttcgcccagcgccgtggactcgcggcttgtggctcccaagttagggagtgagaggatcgcccgccgagggggtggctccgcagcccggctgcgcgagacgcttcccgctcggggacccgccttccgaggccaggtgaacgttaccggccccctgacctccagcagatccacacgtttgttggagactgaaccgttgcaaggaacagacgaagatgcagtagccagtgctgacttctctagcatgctctctgaggaggaaaaggaagagttaaaagcagagttagttcagctagaagacgaaattacaacactacgacaagttttgtcagcgaaagaaaggcatctagttgagataaaacaaaaactcggcatgaacctgatgaatgaattaaaacagaacttcagcaaaagctggcatgacatgcagactaccactgcctacaagaaaacacatgaaaccctgagtcacgcagggcaaaaggcaactgcagctttcagcaacgttggaacggccatcagcaagaagttcggagacatgagttactccattcgccattccataagtatgcctgctatgaggaattctcctactttcaaatcatttgaggagagggttgagacaactgtcacaagcctcaagacgaaagtaggcggtacgaaccctaatggaggcagttttgaggaggtcctcagctccacggcccatgccagtgcccagagcttggcaggaggctcccggcggaccaaggaggaggagctgcagtgctaagtccagccagcgtgcagctgcatccagaaaccggccactacccagcccatctctgcctgtgcttatccagataagaagacca

SEQ ID NO: 4124 - DNA, 331 bp, Homo sapiens
  source 1..331: mol_type = genomic DNA
gattggaaggctgccggcgtgctactgagttcggccggtccgagtcactgtgcgtcgcctgggcccgttcctggtcttctcccccagaccacggtgtgaacacatgaacagaagacgaaaatttcttctagcctcagtacttgctctccagaattcaagttttatatatccatcatgtcagaagtgcttctctaggataatcctggtctccaaaaggtctaattgtccaaaatgtggctctactggtgaatctggaaatgccaattacagatacaaactttccttaaaagttgcagaatcaaacaaattgtttgttattactgtatttgga

SEQ ID NO: 4125 - DNA, 4949 bp, Homo sapiens
  source 1..4949: mol_type = genomic DNA
tcgccccttctcggccgccgtagtttttttttttttttaaagaaaaaacggttacccagcaactagaaaaacaaccggaaccggcggcaccagctcggagagaaaggaggtgaggccgcttccccacttcctctccgataccaagacctagccttttcccttcgtctctcttattctctcagcatcccagacacagcctcggagccctgggccgtttgggagccgaggcagcccattctgcgcgagtctgaaatcccaggtcctcaacatcccgcccccgactagacccgtctgccccctccgcccgccctcctctgcccacattggttcagaatctcgccagctcttttcaccactctagaatggttcgatacccccatctactgctccctcagaaaaagcaaaagagaggagtcaggcgtggtggcgcgcgcctgtaatcccaattgctcgggaggctgaggcgggatcatcgctggagcccaggagttcgaggccagagaccccctctcaaagaaaaaaaaagcgatgaaacgagaaccctccatagtctgagcctcattaaaccgtccagttctcccaacctggacccctaccacggcctccgcctctattccgcattgacgcacactctcacattaacaggccaggtcccggaggattcttttcatactcagtagtagctcagcccgctgcttagcagctacccttaatctagcccttgtatttcaagacagaaagagacaacctgatcaagaagaaaccgaaaaatataagaattctaaaactttagaggctgggatttcaaaatcatgacacacagccccatcccatcccatccctccctcacacacacgcacgcacaaccccattccacagtacgaaggtgttcgaagcattgtgggtcatgcttcagaagtggcagcaaggggaaagattgtgcaacttcttcattcaacaaattaatttctagaaccaggactaatttctactctttaaaaaaaaatagacctcaaagaaggtcttctcagcaattgacaatgaatttaactttttagcaatcattctctctaaattcctgtgtgatagcaaaaattacccttaccttttgagcatataaagggtaaagagagaaaaagtcatattgaaaattatgggttttttgcaggattttaaatgatttggcctagtgaatgggtctgtgtttgtattatactaattcacaatggagatttcaaaactctttggaagaaatggatgggcttgggttgtgttagggaaaaaagaattcaagtccagatgtatgagtctcagaaataatttgttggcatagttgtgattatataagtaaaatcagacaaatttaaagacagtactctttaatgaatctttaggttccataggcagttcttaccaagaagatgtcgattccattctccaacacccactaccgaattccacaaggatttgggaatcttcttgaagggctgacacgcgagattctgagagagcaaccggacaatataccagcttttgcagcagcctattttgagagccttctagagaaaagagagaaaaccaactttgatccagcagaatgggggagtaaggtagaagaccgcttctataacaatcatgcattcgaggagcaagaaccacctgagaaaagtgatcctaaacaagaagagtctcagatatctgggaaggaggaagagacatcagtcaccatcttagactcttctgaggaagataaggaaaaagaagaggttgctgctgtcaaaatccaagctgccttccggggacacatagccagagaggaggcaaagaaaatgaaaacaaatagtcttcaaaatgaggaaaaagaggaaaacaagtgaggacactggttttacctccaggaaacatgaaaaataatccaaatccatcaaccttcttattaatgtcatttcttcctgaggaaggaagatttgatgttgtgaaataacattcgttactgttgtgaaaatctgtcatgagcatttgtttaataagcataccattgaaacatgccacttgaagatttctctgagatcatgagtttgtttacacttgtctcaagcctatctatagagacccttggatttagaattatagaactaaagtatctgagattacagagatctcagaggttatgtgttctaactattatcaaatgaataaatcctctctatcacatcccccaaaaatgttctttagctcctgtttcactcctagtggtaaagaatttcactgctttttaaggatagtctatttaattttggaatttttagaaagataagctgggacaaaaatctgcctccttcagcctggccaacatggtgaaaccccatgtctactaaaagtacaaaaattggccaggcgtggtgcgcacacctgtaatcccagctactcgggaggctgaggcaggagaatcgcttgaacctgggaagtggaggctgcagtaagccgagatcgcaccactgcactccagcctgggcgacagagcaagactctgtctcaaaaacaaaacaaaacaaaaaaaagcctctgcctccttgtaagtttaacccactggttttcatttatcatacatgtattcaatcatttattgaaaatgtattgagtactattcatgtgctgggaattagtagtgaatacttgttcttacactcatacaacttacaatgctttattgttttgctctccagaaccacacagaacaagactaataacatcatattgtaaaaagcaaaagctatcatatcatgctgccttcttcagttaaaacttcccaagtttttaaatatacaatggtaatgcctgtttaacaaactcagaggctttatctcttttatgttttcaatgattcattcaaatccctagtgccttagttttagaaagttccgtctctcctttttgaggcctctccacccttgattgtccaagaaactgagggttcatgtcttagaccaaagggtgcagttctcttcccaatacaaaaggtagaaagtggagtcttaccatttagttaatgctgttgccttctaccataatgttgtagcatagtccagcagactgaggtgattctctggctggttccaattcctgcctgcaccatagtggatggcccatgatttagttccaggattacatctctcttggtttatagtcacaaagccagtgttcccccaaagcttaaaaacaagccaggatggctcagtcctgaggagattctaaaaccaggtctatgttgtcacaacaaatactctcctacaaacactttgatccttgtcctaggcttagacatgctctttctgcaaagcagttttatttcaggtgcctcactgcccttccctggcactgagcctttatcaggctctgcaacagaggttcccccaagtgatcgccactcaaacacagttgattcacaccaaccctttcaaggttgtggctttcattctctaatgtccactcatacaggcagcctttctccttccaaaatcttgctgccactgtagagagtttcatgctagctaaacacaagtctctaatatcccccttcctctcctccttaacccctctcctccaggcttacagaggaaaagaaatcagttctcctccaggattccagctgttcgtccctcccattccactgaaagcaccagcttctaacaccttcccctctcagacagagccatcctgcttagcggattgtcaaggggggacccagaatttatgcaaagacttagattccctgacctggagagatcagaagaggaaaaaagggattttttccctagtgagtatatagcaggaaaaaaaaaaaagatgagttagctttttcagtaattctcctgttatacacataaagtgactagcactatgcattccatacacacacacacacacacacagatctcatggtagtgatattggtagtgaaggaggaaaaggaaaaggtgagcaatggatgtgatattatgagaacaacacatatgaatgacactttattagaacttatctggttttcctcttatctctctggctgttccttctcaattcccttcactggtaactcttcaactccccaaccactaaatgctaagtgcccttaggctcagtctttcgaccccatttctacactcacttgatttcctgcagtttcatagctttaaaatccaatcttcttaatgatcactcccagacctttctctcctctgcctgcgaacttctatattcaactgcctacataacatccccatttggatgtctataggcatctcaaaagtaacatataaaaaatgaatcctgatattgcccccaaatctgaaacttcccccacacccaagtttttccattcaaaaatggctgctccattcttccatttgctcaggccaaaaaccttggattcatctttaatgcgtcactttctttcacaccccatatacaatctatcagcaaaacctgtgggctgtacctataaaataatactcagaatctgcctacttctaaccacttccattgttaccgccttggtcctagttcccatgatagccttgtgaattattgcaataacctatattggccagtgattatctcactactactgcacaacccattccaaagttagtggtttaagacaattatattttctcctgggtctgtaggtcagtggtaatgtagctaagctaggctggactacaatctcaaggttaggttcaggtcagctctaagctgtgggtttgtgggctgacaggaaggtctgcttcaggctgtgggcccaagggtcagctgcagcacagtgcctctgcttcacgtgtccttttctgagcccctgctgaaagacgttatccaggacaagctcttctcatgctggtcacagaagacaagcaggaaaacccagcatgcaagaatatttcaagcttttgctc

SEQ ID NO: 4126 - DNA, 555 bp, Homo sapiens
  source 1..555: mol_type = genomic DNA
tttggaggtccggcacccgctctgcccatgcctatgcttcaggctctgtgagaaggctggactccttctggaacttcaggaccttggatgctcccctcctctgctcctgcctcccttcccccagccctggggtgtgtcagatgtgtgttttctcctggactcagctgaagcaaggtgtgtctctagtcctcgtggttgcctgccccactccctgccgagacgcctgccagaaaggtcacctatcctgaaccccagcaagcctgaaacagctcagccaagcaccctgcgatggaagctgcagatgcctccaggagcaacgggtcgagcccagaagccagggatgcccggagcccgtcgggccccagtggcagcctggagaatggcaccaaggctgacggcaaggatgccaagaccaccaacgggcacggcggggaggcagctgagggcaagagcctgggcagcgccctgaagccaggggaaggtaggagcgccctgttcgcgggcaatgagtggcggcgacccatcatccagtttgtcgagtccggggacgacaag

SEQ ID NO: 4127 - DNA, 1708 bp, Homo sapiens
  source 1..1708: mol_type = genomic DNA
tgcgtcttcctgactctagtacgttgaatctggccagaaaaaccacatttgctctctacgaactctccgcccagttcgccgcaactactacgacccctcctcggcccctgggaagggcgtggtgtgggagtgggagaacgacaatggctcctggacgccctacgacatggaagtgggcatcaccatccagcatgcctatgagaagcagcacccctggatcgacctcacttccattggctttagctacgtaattgacttcaacaccatgggccagatcaaccgtcagacccagcgccaacgccgcgtccgccggcgcctcgacctcatctaccccatggtcacagggaccttgcctaaggctcagtcctggccagtcagccctgggccagccacctcgccccccatgtccccctgctcctgtccccagtgtgtcttggtgatgagtgttaaggcagccgtggtcaatggcagcactgggcccctacagctgccagtgacccgcaagaacatgccgcctcctggagtggtcaagctacccccactgccaggctctggggccaagccactggacagcacaggcaccattcgaggcccactgaagaccgccccatcgcaggtgatccggagacaagcctccagcatgcccactgggacaaccatgggctctcctgccagtcccccaggacccaacagcaagaccggaagggtggccctggccaccttgaatcgtaccaacctgcagcgactggccattgcccagtcccgggtgctgatcgcctctggggtccccacagtcccagtgaagaacctaaatgggtccagtcctgtcaaccctgccttggcaggaatcactgggatcctcatgagtgcagcggggctgcctgtgtgtctcaccaggccaccaaagctggtcctacacccaccccccgtcagcaagagtgaaataaaatccatcccaggggtttccaacacaagccgcaagaccaccaaaaaacaagccaagaaaggtaaaaccccagaggaagtgctaaaaaaatatctacagaaagtccggcacccaccagatgaggactgcaccatctgtatggaacgcctcacggccccctcaggctacaagggcccgcagcctacggtaaaacctgacctggtagggaagctgtccagatgcggccacgtctaccacatctactgcttggttgccatgtacaacaatgggaacaaggatggaagtttgcagtgtccaacctgcaagaccatttatggggtgaagacaggcacccaacctccagggaagatggagtaccacctcatcccccactccttgcctggccacccagactgcaaaaccatccggatcatctacagcatcccccccggcattcagggaccggaacacccgaatcctgggaagagtttcagcgcccgaggcttcccacgacactgttaccttccggacagcgagaaagggagaaaagttctgaagctgctgctcgtggcctgggatcgccgcctcatttttgccattggcacctccagcaccacaggcgagtcagacaccgtcatctggaatgaggtccaccacaagacagagtttggctctaatctcactggccatggctacccagatgccaattacctggataatgtgctggctgaactggctgcccagggcatctctgaggacagcactgcccaggagaaggactga

SEQ ID NO: 4128 - DNA, 683 bp, Homo sapiens
  source 1..683: mol_type = genomic DNA
ctctcccccactgttagacctcagcagccagcagcccgccgcccggcgctgcagctccctgcccgcaggagccacgtctcgcgcgactccccccacctctcgcgacacttgccgcccgtgccctgcggccctgcacgccccacccgcggtcgcgcgccgcgctccccgccgcctcaccttttcgcctggcatccgggcccgctactcgcccactgggagcgccgtggcgcctggtgttcggcgcgagcccggcggggctgcagagagcgaaatgtcatcagtgcagtcacaacaggagcagttgtcccagtcagatccatctccgtcaccaaactcatgtagttcctttgagctaatagacatggatgctggcagcttgtatgaaccagtttctccccattggttttattgtaagataatagattctaaggagacatggattcctttcaactctgaggattcacagcagctggaagaggcatatagctctggaaaaggttgtaatgggagagttgttcctactgatgggggcagatatgatgttcatttgggggagaggatgcggtatgctgtatactgggatgaactggcatcggaagtgagacgatgtacgtggttttacaagggggacaaagacaataagtatgttccctactcggagagcttcagccaagttttagagg

SEQ ID NO: 4129 - DNA, 551 bp, Homo sapiens
  source 1..551: mol_type = genomic DNA
attttgggcgcttcgctgatggtgtcggtgagcgcgtttcccgcctgagcgcaactagcggcgggtcgtgggcacctccaggagagcttgtttcatatccatatcccactgtattcctgctaatctgctaatgcagtaaattggaggaaaactgttaccaggataacctgtaatgggcaaggagccacaaagaagaaaacatttcttttaatttttaaacttggtttgaaagaaaaatttcgttctttgccctgtgctcagaagatcacaataaaacttcaccacatcaagctgctgtgggatagggcaaaccgggatggttaagtccatgagtgcatgaagtttactgttggtgctactggttcagtaacaggtgatggatttcaaaagtctccagatgcctgctggcgaataatcaaagaataactaccagcatgttttggaaatttgatcttcactcatcatcccacatagacacacttctagaaagagaagatgtaacactgaaggagttaatggatgaggaagatgttttacaggaatgtaaagct

SEQ ID NO: 4130 - DNA, 7606 bp, Homo sapiens
  source 1..7606: mol_type = genomic DNA
gtcattgagctgatgtgcttttgcaaggggtctctttagaagtggtaggggcagggtcgagagaagaaggggatgcagaatctgtacatgaggaaggagccagagtcactcaggaaactcctcattcttcctgcgctggctgtggcacacccaccggtggcacacccctccctcgggtccagttcagcccacagactcctgggaggagagccagggccccagcctctcctttgaggagtgttgcagcctttctgtgtgccagatgcctagtgaagaaaagctgaaaccctggagctttgtgcatgttaatgaccttggaaatgactgagctcacggaccctcatcacaccatgggagactacaaagtggcccaccctcaggaccctcaccacccatcagagaagcctgtcattcactgccataaatgtggggagccttgcaagggtgaagtgcttcgggtccagaccaaacatttccacatcaagtgtttcacctgcaaagtgtgtggctgtgacctggcacaagggggcttcttcataaagaacggagagtatctctgcaccctggactaccagcggatgtacgggacacgctgccatggctgtggggagttcgtggagggcgaagtggtgactgctctgggcaagacctaccatcccaattgctttgcttgtactatctgcaagcgcccgtttccacccggagaccgagtcacattcaatgggagagactgcctttgtcaactctgtgcacagccgatgtcgtccagtccgaaagaaaccaccttctccagcaattgtgccggctgcggaagagatatcaagaatgggcaggcgctgctggcgctggataagcagtggcacttggggtgctttaaatgcaagtcctgcgggaaggtcctcaccggggagtacatcagcaaggatggtgctccgtactgtgaaaaggactaccagggactctttggggtgaaatgtgaggcgtgtcaccagtttatcacagggaaagtcctggaggcaggtgacaaacattaccaccccagctgtgcacgatgcagcagatgcaaccagatgttcacagaaggagaggaaatgtatcttcaaggctccaccgtttggcatcccgactgtaagcaatctacgaagaccgaggaaaagctgcggcctaccaggacatcctcggaaagtatttattctaggccaggctccagtattcctggctcaccaggtcatactatctatgcaaaagtagacaatgagatcctggattacaaggatttagcagccattccgaaggtcaaggcaatttatgacattgaacgtccagatcttattacctatgagcctttctacacttcgggctatgatgacaaacaggagagacagagccttggagagtctccgaggactttgtctcctactccatcagcagaagggtaccaggatgttcgggatcggatgatccatcggtccacgagccagggctccatcaactcccctgtgtacagccgccacagctacactccaaccacgtcccgctctccccagcatttccacagacctggcaatgagccgtccagcggccggaactcccctctcccttaccggccagacagccgccctctaactccaacttacgctcaggcccctaaacatttccatgttccagatcaaggaatcaacatttaccgaaagccacccatctacaaacagcatgctgccttggcagcccagagcaagtcctcagaagatatcatcaagttttccaagttcccagcagcccaggcaccagaccccagcgagacaccaaagattgagacggaccactggcctggtcccccctcatttgctgtcgtaggacctgacatgaaacgcagatctagtggcagagaggaagatgatgaggaacttctgagacgtcggcagcttcaagaagagcaattaatgaagcttaactcaggcctgggacagttgatcttgaaagaagagatggagaaagagagccgggaaaggtcatctctgttagccagtcgctacgattctcccatcaactcagcttcacatattccatcatctaaaactgcatctctccctggctatggaagaaatgggcttcaccggcctgtttctaccgacttcgctcagtataacagctatggggatgtcagcgggggagtgcgagatttccagacactcccagatggccacatgcctgcaatgagaatggaccgaggagtgtctatgcccaacatgttggaaccaaagatatttccatatgaaatgctcatggtgaccaacagagggcgaaacaaaatcctcagagaggtggacagaaccaggctggagcgccacttagcccctgaagtgtttcgggaaatctttggaatgtccatacaggagtttgacaggttacctctttggagacgcaacgacatgaagaaaaaagcaaaactcttctaagtcccactcgtgaatggcaattagagaaaggactgacagtggcggtgccccataggatgtcatattgaggcccaaacttgattggagaatttgcaaactaccgtcgctcagcaacaccaaaaagagaaagtctggttaaaacaccatgagtcaaatgtcgggccagccaacagtaacacttgccaagaagcatggcgtagaaatttctatgttccgaaacacagagtagtgtccacatgtgagcttttcacattaccttatgtatacaacaggagctgcgttgttttcttctttttcttttcctttatctgttgtccaacaacagtgctgactgtccggataagagctggcaagtgcccttaggatgccgcatgggaaaaatcggttatcataatttcaaagtataaatatatttattaagtagcgctgcggctaagaaggaagagtgaggggtctgtccatggggtggcagtgatttcacacccgcctttcttgaatggcttcgtgttactcagccgtgccctggcaggaatggaactccatcagggaacagggcagctctgtttgaatggggtgaaaaacagcaaaattaattcttagcaagctccttgttctctactgttcaccgggacctggctggcaaatgacttagctattagtatatttaaaaactgttcaaaagcaaaagagaaggaacaggaatgaaaggaaaccttcccttaactctttctgcttcccatagcaggtctggttcctgctccccgcctaggacaggagctgtctggagctccacctttgcaaagaaaggaaaaacacaaattgcccccagattggcccagtggcatgccattaggtgattttgcataggggccatatcattcatggccaaaaaaaaccaaaaagcaaaaaacaaaaacaagtcccatgtcctactgactctagttcttccagtcgttatcctctgctgtctctctggcatcctatgaatcagatcaagcccatgctgttgttggtttttaaggtttctttcaataataggctaaggaaagacatgtttttctcttttaaatctctgcaactccaaagtagactccttcgaacgtatttaatttggccttttcagctttcttcttgcccagctctgtcgaattcatgggtgtgtgtgcacatgttggtttcactcacccagagtaattttgtgagcatgcatgtgctttttaatttctgcttgaatgtttgtcctgctgtgttgcagcttctaaagacattgtcaccgagtgtgtgtgactcaaagatcaagagtgaggctaaactgcgaccccaacatcacttccttcatggaaaggtgttggcgctgatgtagctcatggaaggatcagactgggaaccacagaggaaggatgaggtgggatgtggaggtcagagcatctcacgagagtccctcaggctctgcaacactagattcgaatatgagcctagggtttccccaacacgtgcgtgcatatgaaaccacatcatgattcccgacgtgagttagatgagggagagtttgtgtaactccacacccaggagggtaagccactttattatcatgctttggggctgtgcttaagaatttaagctctgttttaaagccgaagaagaaaacatttgaatttaccttcatatgccactaagaacaaaagctctgaagttcttcctgctggcaccaaatattaggattacaagctgtctctctgacaccagtggtaaaaaagcaagtagaatagtttctgagtctgtgttgcagcctctgacacgtggctcaccgctgtcatttgggggatggaatgaacagtcactgttctatagcatcctcctgtgctcttacctaaggaatctaaattgtcctagccttccattgctatgcactgaatgaggactactctcgtgtgtgtgtgtgtgtgtgtgtgtgtgtgtgtgtgtgtgtgtgtgtgtgttggatctactaacatgtttagcaaatggctctgacagggtggccatgagcagatgagaccagctcttgcttggttggaagccacactgcagtttgcagtttagcctttggtgtctcagtggcttcttgcttattccatgctttttctatcccatcctctctctgtgccctcctgcaatggcagccttggcacaatgcctgggtgtcctcatccttgctttactctggaaagtgtggggatggagaggatggtgcatttccagtgcttccttacctgtcaataacaatggtggccacctgggtcccagcacttggctggtggagagatttttttcattatggagctaataaagggtccctacgttttacattgattaatgaattatcacccagacatgtgcagatgaaatgtcaatataagaaaaatcaaggtatttgggaaacatgggcataatcaggtagttttgctaaaattcctcttccttggtctacataaagaagacatgggtctgtcatagaatggggacattagactgaaaactgggacaacccccttccttattttatagagactaggagttaaggggcctgcctaagattgcagtgataaagaactgaaccctaaatcagctcccactaatgaaaccctgctttccttgtatcttttaaactcagttctgcatccaacttgagaagaaaaaaagcttctttccatatcaagtaccatatgagttcatttaaactgcaccttgcagaaatgcattgccagaaagcaccagtagcctcctatctgcaagcagagtagtgctctgctctggggaggggtcattggaaaccataatgcagagtgggccccctactccatttcccagcaaaaggctccagctggagggatgggttgtggggcaacctggttcctgctaactgccagattgaatgtgtgggctagaatgcctgcacatttagttaaactgggctcagcatgcttgtcctcaaaatgtccatcctggtcacagcacacaagatggctattggtctgcttttaccctaccctgtactatacatgaaaattccagttattaacacactcaaactggtggagcttgttcaccctaggaaggggattgtatatatggcaggcttccctggtgccgatgtaaagggctacatttgggaacatttgacttccttgggactcttaagtgcataatgatggcatgaagtaaaaggggcctcaatgatgataggaaaatcagttcttttaaaatttcttcaagaaaatccaggctatcacatagtctttctgtgtgacttattaggagataggaagagcattgggaaacttgcacagctagctatgcatctacattttggtttggggttagttatgaaatgttcttaatatgacgtgttcaataacttcacataaacttcctgttctccaaaacctcaaagagatagagttaatgagttgttgtttttttttaaatgggggtagttttctatctgtcatgggctctagcatctactccgctacccaattctgtcatctccaagctgagtttcctcttctgaggcagaggctggagcagttctttttcagttctcatcctctccatcccaatccagtatatcaatcaactctaactcggagacgtctagctggcaatgtttctaaaactttcactggatttctttagacattgaagcaaacatttttttctaagaattgcttctcagatgatgatatcaaatgtatatgcttttgcaagtttgaaaagttcaaattaaccacttttgactaggtaagtctttctaaaaaccatttaaagctaactgggtcttagcatcctcctgtgtatggaagagacaggtgaccgctccaggttgggtgctcacagaacccttttcctgactctcatggaagatggtggaaggaaaatagactgtctcatcaaccctcctgtgtcctctgaagcaatctcagtttttattaaccacctcttctgtgtttctggtagctatttaacctgtatttaatctgtacttcctatgccagcctcaattttatttgatttttacaattattctcttctaaccaatgaagtgtttgtcagtatgccccaaagcttgctcttttgtgctcccttttgaataactttctatccagaaaaagagattatttgggacttgagatttgcagtgataccaacttatagcaatgatgtactttaagggaactacccaactatgttgtgatagaagaaagagaaaccttcactttggcatttttttttaatcactgtttatttttctgtttgcggcccaggaagcagtgggaggtggtggcagatatgctttgcatatggattgttatgtttttatttgggcaagtttaatcatggaaaactcaaaaagaaggggggaaatggtcagtttaagccaaaagaaactttctaaacaatgtataggtacacagcaaaattaaacaaatccaacaatttctgaagcttagtgtaattgagtggtggttgttattcaataaaattattcccaaaagtgtttctcctaagagtgcagttcccatgagtcacttcctgaacccattgaccaaaggtggacagagacaatcctgtagaccttgacattcagaaagatgtgagctgcttactgatcatatatgcatacgtttctttacagcagaggaaaccattgtccacaaaactgatgttcttttggggttttatgtacagacttgtccaatcatgtgtgtggttcctgcgagttgctgatgactccgcattgaagctctctgagttctttgattttaagttgggtttatggaattttttcaaatgttggaaggtgtgtggttcttcctgccctccctccccttttggaaatatgaaagcaaatgtttagaagaattccttttgaaaagctgtgtcgtgttccctgtgaaactgagcaggtgtgtgttggcgcgctaagtgccacatgcttgtgtgtagaggaggaggtggccctgccggctccgcgctgctgtgcctgtgatccctacctgctccccgctcctgttgccagcagcactcactgcactcctttgtcatatactctgcatcactgtcatactcacaacttcgtgaataaagttgtgtgctttattcgt

SEQ ID NO: 4131 - DNA, 3266 bp, Homo sapiens
  source 1..3266: mol_type = genomic DNA
gtgactccgcaacctgtcgctcaggttcctcctctcccggccccgccccggcccggccccgccgagcgtcccacccgcccgcgggagacctggcgccccggccgaggcgcgaacagacggacgcaccggcgagcgccgaggggacaggccgagcgcggggcgccggaggcaggaccctcccgagggcctgaccgtggaggtagcactgcacacccactccctgtgggccggagccaggaggcacttcctgggtgtcggagcccagaaggaaaccagtggccgggaagcaccagctgggtgtgggacaggcactggcctcagaccggggccacactgaggtctgcccttctcccgctggccgccacccaagacaccatgagccagtccggggccgtgagctgctgcccgggtgccaccaatggcagcctgggccggtccgacggtgtggccaagatgagccccaaggacctgtttgagcagaggaagaagtattccaactccaacgtcatcatgcacgagacctcgcagtaccacgtccagcacctggccacattcatcatggacaagagcgaagccatcacgtctgtggacgacgccatccggaagctggtgcagctgagctccaaggagaagatctggacccaggagatgctgctgcaggtgaacgaccagtcgctgcggctgctggacatcgagtcacaggaggagctggaagacttcccgctgcccacggtgcagcgcagccagacggtcctcaaccagctgcgctacccgtctgtgctgctgctcgtgtgccaggactcggagcagagcaagccggatgtccacttcttccactgcgatgaggtggaggcagagctggtgcacgaggacatcgagagcgcgttggccgactgccggctgggcaagaagatgcggccgcagaccctgaagggacaccaggagaagattcggcagcggcagtccatcctgcctcctccccagggcccggcgcccatccccttccagcaccgcggcggggattccccggaggccaagaatcgcgtgggcccgcaggtgccactcagcgagccaggtttccgccgtcgggagtcgcaggaggagccgcgggccgtgctggctcagaagatagagaaggagacgcaaatcctcaactgcgccctggacgacatcgagtggtttgtggcccggctgcagaaggcagccgaggctttcaagcagctgaaccagcggaaaaaggggaagaagaagggcaagaaggcgccagcagagggcgtcctcacactgcgggcacggcccccctctgagggcgagttcatcgactgcttccagaaaatcaagctggcgattaacttgctggcaaagctgcagaagcacatccagaaccccagcgccgcggagctcgtgcacttcctcttcgggcctctggacctgatcgtcaacacctgcagtggcccagacatcgcacgctccgtctcctgcccactgctctcccgagatgccgtggacttcctgcgcggccacctggtccctaaggagatgtcgctgtgggagtcactgggagagagctggatgcggccccgttccgagtggccgcgggagccacaggtgcccctctacgtgcccaagttccacagcggctgggagcctcctgtggatgtgctgcaggaggccccctgggaggtggaggggctggcgtctgcccccatcgaggaggtgagtccagtgagccgacagtccataagaaactcccagaagcacagccccacttcagagcccacccccccgggggatgccctaccaccagtcagctccccacatactcacaggggctaccagccaacaccagccatggccaagtacgtcaagatcctgtatgacttcacagcccgaaatgccaacgagctatcggtgctcaaggatgaggtcctagaggtgctggaggacggccggcagtggtggaagctgcgcagccgcagcggccaggcggggtacgtgccctgcaacatcctaggcgaggcgcgaccggaggacgccggcgccccgttcgagcaggccggtcagaagtactggggccccgccagcccgacccacaagctacccccaagcttcccggggaacaaagacgagctcatgcagcacatggacgaggtcaacgacgagctcatccggaaaatcagcaacatcagggcgcagccacagaggcacttccgcgtggagcgcagccagcccgtgagccagccgctcacctacgagtcgggtccggacgaggtccgcgcctggctggaagccaaggccttcagcccgcggatcgtggagaacctgggcatcctgaccgggccgcagctcttctccctcaacaaggaggagctgaagaaagtgtgcggcgaggagggcgtccgcgtgtacagccagctcaccatgcagaaggccttcctggagaagcagcaaagtgggtcggagctggaagaactcatgaacaagtttcattccatgaatcagaggaggggggaggacagctaggcccagctgccttgggctggggcctgcggaggggaagcccacccacaatgcatggagtattatttttatatgtgtatgtattttgtatcaaggacacggagggggtgtggtgctggctagaggtccctgcccctgtctggaggcacaacgcccatccttaggccaaacagtacccaaggcctcagcccacaccaagactaatctcagccaaacctgctgcttggtggtgccagccccttgtccaccttctcttgaggccacagaactccctggggctggggcctctttctctggcctcccctgtgcacctggggggtcctggcccctgtgatgctcccccatccccacccacttctacatccatccacaccccagggtgagctggagctccaggctggccaggctgaacctcgcacacacgcagagttctgctccctgaggggggcccgggaggggctccagcaggaggccgtgggtgccattcgggggaaagtgggggaacgacacacacttcacctgcaagggccgacaacgcaggggacaccgtgccggcttcagacactcccagcgcccactcttacaggcccaggactggagctttctctggccaagtttcaggccaatgatccccgcatggtgttgggggtgctggtgtgtcttggtgcctggacttgagtctcaccctacagatgagaggtggctgaggcaccagggctaagcaattaaaccagttaagtctccca

SEQ ID NO: 4132 - DNA, 1021 bp, Homo sapiens
  source 1..1021: mol_type = genomic DNA
ccccggccattaccgaagcggatgaaaacaaacactaacgatggcggcgccgggaagcgaccggctgctgggcttaaggcgggagtgaccgcttaaccagtgagggaagcactgaagagcgccagtcgacgtgggtgcgacaactcgcggagtcttaggagcaaaacgtctggggcctgcgagccaggacccttctgaagccttaggtgtctatcggcgacgtgtacggtcactgcagctccggagcgcggaaccctcagccaggaggcgcggctggtcggtcccaggtcccggcctccgtaatgagagcccggaaccactctttgtgccgcagcttcgcaggtgagggtgactgttgactagtgaaaaaagggacccatggttcacgactgtcttcttactggcagtggaacgacctgtggaaacctgtgatccattctcattaaataaatctctggcatcttggactcaagtgattctcctgcctcagcctcctgagtagctgggactacaggacagaaaattttaataacaagatagtaagcagctcacatgaacttacatattcagcatattagcaggaaagaggcaagacatttgaagaacttgcagaaaagttgcaaagtaaatgagagactagaatgctcaaagattcctataggcaatggaaactgatctcaattcccaggacagaaaggacctggacaagtttattaaattttttgccctcaagactgtccaagtgattgtccaggctcggcttggtgaaaagatttgcactcgttcatcatcttctccaacgggttcagattggttcaacttagcaatcaaagacatcccagaggttacacatgaagcaaagaaggcactggcaggacagctgcctgcagtcgggaggtccatgtgtgtggagatttcacttaagacttctgagggagattccatggagctggaaatatggtgtcttgaaatgaatgaaaagtgtgataaagaaatcaaagtttcctacacggtgtacaac

SEQ ID NO: 4133 - DNA, 586 bp, Homo sapiens
  source 1..586: mol_type = genomic DNA
agactaccggcggcgacgaccacaggagagacggggtttcaccacatctctggtcatggtcatggccaggctggttttgaactcctgacctcaagtgatccacccacctcggcctcccaaagtgctgggattacaggcgtgagccactgcaccggtcctggctaagcatggcggacaccgacctgttcatggaatgtgaggaggaggagttggagccatggcagaaaatcagtgatgtcattgaggactctgtagttgaagattataattcagtggataaaactaccacagtttctgtgagccagcagccagtctcggctccagtgcccatcgctgcccatgcttctgttgctgggcacctctctacatccaccaccgttagtagcagcggggcacagaacagcgacagtacaaagaagactcttgtcacactaattgccaacaacaatgctggcaatcctttggtccagcaaggtggacagccactcatcctgacccagaatccagccccaggtctgggcacaatggttactcaaccagtattgaggcctgttcaggtcatgcagaatgccaatcatgtgactag

SEQ ID NO: 4134 - DNA, 819 bp, Homo sapiens
  source 1..819: mol_type = genomic DNA
tgcctgacattgtgtagctgtatcaggctggctttctggaatagctcagtggccaaagattgatcacgaagggtttagagctgtgaaaatgccccagaccttagctggatctccaaaatacaagtgaatcacccggcagttctgaggcgtgcggaacaaatccaggctcgcagaaccgtgaaaaaggagtggcaggctgcttggctcctgaaagctgttacctttatagatcttactacactttcaggtgatgatacatcttccaacattcaaaggctctgttataaagccaaatacccaatccgggaagatctcttaaaagctttaaatatgcatgataaaggcattactacagccgccgtttgtgtttatcccgcccgggtgtgtgatgctgtaaaagcactcaaggctgcaggctgtaatatccctgtggcatcagtggccgctggatttccagctggacagactcatttgaagacacgattagaagagatcagattggctgtggaagatggagctacagaaatcgacgtggtaattaacagaagcttggtgctgacaggccagtgggaagccctgtatgatgagattcgtcagtttcgcaaggcctgtggggaggctcatcttaaaactatattagcgacaggagaacttggaactcttactaatgtctataaagccagtatgatagcaatgatggcaggatcagattttattaagacctctactggaaaagaaacagtaaatgccaccttcccggtagctatagtaatgctgcgggccattagagatttcttctggaaaactggaaacaaggta

SEQ ID NO: 4135 - DNA, 550 bp, Homo sapiens
  source 1..550: mol_type = genomic DNA
tcggctcactgcaccctccgcctcctgggttcaagcgattctcctccttcagcttcctcagtagctgggattacaggcacgcgccaccacacctggcatggcggacaccgacctgttcatggaatgtgaggaggaggagttggagccatggcagaaaatcagtgatgtcattgaggactctgtagttgaagattataattcagtggataaaactaccacagtttctgtgagccagcagccagtctcggctccagtgcccatcgctgcccatgcttctgttgctgggcacctctctacatccaccaccgttagtagcagcggggcacagaacagcgacagtacaaagaagactcttgtcacactaattgccaacaacaatgctggcaatcctttggtccagcaaggtggacagccactcatcctgacccagaatccagccccaggtctgggcacaatggttactcaaccagtattgaggcctgttcaggtcatgcagaatgccaatcatgtgactagttcccctgtggcctcacaaccaatatttatcact

SEQ ID NO: 4136 - DNA, 587 bp, Homo sapiens
  source 1..587: mol_type = genomic DNA
acgcaccggcgagcgccgaggggacaggccgagcgcggggcgccggaggcagctctggggcttggtgggggcaatccctgcgtccggagagcgctggtggtagggaggcttctcccggttctgtgagcagcaggaccctcccgagggcctgaccgtggaggtagcactgcacacccactccctgtgggccggagccaggaggcacttcctgggtgtcggagcccagaaggaaaccagtggccgggaagcaccagctgggtgtgggacaggcactggcctcagaccggggccacactgaggtctgcccttctcccgctggccgccacccaagacaccatgagccagtccggggccgtgagctgctgcccgggtgccaccaatggcagcctgggccggtccgacggtgtggccaagatgagccccaaggacctgtttgagcagaggaagaagtattccaactccaacgtcatcatgcacgagacctcgcagtaccacgtccagcacctggccacattcatcatggacaagagcgaagccatcacgtctgtggacgacgccatccggaagctggtgcagctgagctccaa

SEQ ID NO: 4137 - DNA, 492 bp, Homo sapiens
  source 1..492: mol_type = genomic DNA
ggactgagggaagaagtgaaaatcggactgccaggcgacagttcctccgtttgaaatctcgccggctcctgagcgggccaccgggcccgggctgggggtctggcgggtgtttgagcccagatgagtcatggctggacgacccctccgcataggagatcagctggttctggaagaagattatgatgagacctacattcctagtgagcaagaaattcttgaatttgcccgggagattggtattgatcccatcaaggaaccagaactgatgtggctggcgcgagagggcatcgtggccccactgcctggagagtggaaaccatgccaggacatcacaggtgacatttactatttcaacttcgccaacgggcagtctatgtgggaccatccatgtgacgaacactatcggagcttggtgatccaagagcgggcaaagctgtcaacttctggggccattaagaagaagaaaaaaaaaaaggaaaagaaagacaagaa

SEQ ID NO: 4138 - DNA, 3533 bp, Homo sapiens
  source 1..3533: mol_type = genomic DNA
gggagattcgattggaaggctgccggcgtgctactgagttcggccggtccgagtcactgtgcgtcgcctgggcccgttcctggtcttctcccccagggtcttgctctgtcacccaggctggagtgccatggcatcatcatagctcactatggccttgatcctcctgccttagcctcccaagcagctggtattacagaccacggtgtgaacacatgaacagaagacgaaaatttcttctagcctcagtacttgctctccagaattcaagttttatatatccatcatgtcagaagtgcttctctaggataatcctggtctccaaaaggtctaattgtccaaaatgtggctctactggtgaatctggaaatgccaattacagatacaaactttccttaaaagttgcagaatcaaacaaattgtttgttattactgtatttggaagttgcttagatacattttttggtcttactgccactggtttgcacaggtacattcaggatcctaataaaattccagaaacactggacaatgatacaactcagaatctattaactaaagcagttgaaacttgctttgttggacaaagctttatttttggagtgacgaattttgaaaaccaacctggacaaggttcagatgccagtaacttcttacagcaatgctctgaccacaaaagaaaagccaaagcactagtggcttgccagattgttctaccagacccaggtattgcaggctttactgtcattgactacttccatcaacttttgcagacttttaatttcaggaaacttcagtgtgactctcaggcacctaacaatcacttacttgctttagatcactcaaatagtgatctcagcagcatatatacttctgacagcacttctgattttttcaagtcctgcagcaaggatactttttcaaaattctggcagccatcacttgaattcacttgcattgtttcacaactaacagataatgatgatttttcagcttcagaacaaagtaaggcctttggtactcttcagcagaacagaaagtccatctccattgcagaggccactggttccagtagctgccatgatcccattcaggattcatggagccttgtttcatatatggataaaaagagtacagcagaaaagttgggtaaagaacttggcttacaagctaaggagctgagtgcagttcacagcagtcatcatgaaattggagttaatgactctaatttattctctttggaaatgcgagagccccttgagtcaagtaatacaaaatccttccacagtgcagtggaaattaaaaataggtcccagcatgagctaccatgttttcagcatcatggtatagataccccaactagccttcagaagagatctgcatgttgtccaccttcgttactcagacttgaagagacagccagcagttcccaggatggtgaccctcaaatttgggatgatctgccattctctgaaagcctgaacaagtttctggcagttcttgaaagtgagattgctgtaacccaggcagatgtcagtagtaggaaacatcatgtagataatgacattgataaatttcatgcagaccacagcaggttatctgtgactccccagagaactactggagccctgcatacaccacctatagctttaagatcatcacaagtaatagtcaaagcaaactgtagcaaagatgacttccttttcaactgtaaaggaaatctaagtcctagtgttgaaaaggagtcacaaccagataacaaagtagaggctgtctctgtaaatcataatggaagagatatgtcagaatattttttaccgaatccttacctgtcagctctgtcttcatcttcaaaagatttagaaacaatagttactcttaagaagactatcagaatctcaccacacagggagagtgaccattctagtctaaataacaaatatttgaatggatgtggagaaatatcagtttcagaaatgaatgaaaagttgacaactctgtgttataggaagtataatgatgtctctgatctttgcaaattagaaaataaacaatattgtaggtggtccaagaaccaagatgacagttttacaatttgcaggaaacttacatatcctttagaaactctttgcaatagtccaaatagaagtacaaatacattgaaagaaatgccttggggacatatcaataacaacgtaacacagagctattctattggttatgaaggtagctatgatgcctctgctgatctctttgatgatattgctaaagaaatggacattgcaactgagattaccaaaaaatcacaggatattttgttaaaatggggaacatctttggcagaaagtcacccttcagagtctgatttttcactgagatcactttctgaagacttcatccagccttcacaaaaattatccttgcaaagcctatctgactctaggcattcaagaacatgctctccaacacctcattttcaatcagattcagaatataattttgaaaatagtcaagactttgttccatgttcacagtcaactccaatttcagggttccaccaaacaagaattcatgggataaacagagctttcaaaaaacctgtattttattcagatcttgatggtaactatgaaaaaataaggattttccctgaaaatgacaaacagcaagccagcccaagctgtccaaaaaatataaaaacacctagccagaaaatcagaagccctattgtatctggtgtttcacaaccagacgttttcaatcactacccttttgctgagtgccatgaaactgatagtgatgaatgggtccctcctaccacacaaaaaatatttccttcagatatgcttggattccaaggcataggtctagggaaatgccttgctgcctatcatttccctgatcaacaagagttaccaagaaagaaactgaaacatattagacaaggaaccaataaaggtttaattaagaagaaattaaagaatatgcttgcagcagttgttacgaaaaagaaaactcataaatataactgtaaaagttcaggctggatttccaaatgtccagacattcaagtcttagcagcacctcagctgcaccctattcttggacctgattcttgttcagaagtcaaatgttgccttccattttcagaaaaaggcccaccttcagtgtgtgaaactcgaagtgcttggtcacctgaattgttttcataaaaagtcacctgaacccaattcctgaacttttaaatctgtttggaaatgtttgccttcaggggtacggaaagcattctttacattttgaacacttggagagaagcaaattgaaaacaggactctgctgggagctactgtgccttttaaaatataaagccattgttttccccagggttttatctagaatactatgattaggtagttgagcactttatcttatactgtttattgtactttaataatattgttaagattgtttttgaaagtattaatgtttgttaaaatcacatatacatccagaaataaagactttgcaaaccaaaa

SEQ ID NO: 4139 - DNA, 570 bp, Homo sapiens
  source 1..570: mol_type = genomic DNA
agttttgaaaatcatagttttcgcccgcgctgcgccgcctggttgctcctcccgtgcgacagagccaccatggggacgacggccccagggcccattcacctgctggagctatgtgaccagaagctcatggagtttctctgcaacatggataataaggacttggtgtggcttgaggaaatccaagaggaggccgagcgcatgttcaccagagaattcagcaaagagccagagctgatgcccaaaacaccttctcagaagaaccgacggaagaagagacggatttcttatgttcaggatgaaaacagagatcccatcaggagaaggttatcccgcagaaagtctcggagcagccagctgagctcccgacgcctccgcagcaaggacagtgtagagaagctggctacagtggtcggggagaacggctccgtcctgcggcgtgtgacccgtgctgcggctgcagctgccgcggctaccatggcattggctgcaccttcttcacccacccctgagtctcccacgatgctgactaagaagcccgaggataaccacacccagtgccagctggtgcct

SEQ ID NO: 4140 - DNA, 2356 bp, Homo sapiens
  source 1..2356: mol_type = genomic DNA
tagcgccgggagtgggtgccttccgccggctgtacagagcgccggcaggtggcgcccagcggcgagcttgttccagcttggtttgggccaggtggactggaaggggcggaggtaaccagaagcggctagtggcggctgcctgcgtccccaaccccctccgcgcagcgctcgcgacacgcgtgccaggagtgggagcgagcggcggggccagctgcgttctgagcctgggcgcagctgccatctgctctgggaagcaccagggtgtccccgccgccctcagctcgaagtcagccaccatggaggcgcaggcacaaggtttgttggagactgaaccgttgcaaggaacagacgaagatgcagtagccagtgctgacttctctagcatgctctctgaggaggaaaaggaagagttaaaagcagagttagttcagctagaagacgaaattacaacactacgacaagttttgtcagcgaaagaaaggcatctagttgagataaaacaaaaactcggcatgaacctgatgaatgaattaaaacagaacttcagcaaaagctggcatgacatgcagactaccactgcctacaagaaaacacatgaaaccctgagtcacgcagggcaaaaggcaactgcagctttcagcaacgttggaacggccatcagcaagaagttcggagacatgagttactccattcgccattccataagtatgcctgctatgaggaattctcctactttcaaatcatttgaggagagggttgagacaactgtcacaagcctcaagacgaaagtaggcggtacgaaccctaatggaggcagttttgaggaggtcctcagctccacggcccatgccagtgcccagagcttggcaggaggctcccggcggaccaaggaggaggagctgcagtgctaagtccagccagcgtgcagctgcatccagaaaccggccactacccagcccatctctgcctgtgcttatccagataagaagaccaaaatcccgctgggaaaaacccaggccttgacattgttattcaaatggcccctccagaaagtttaatgatttccatttgtatttgtgttgatgatggaccacttgaccatcacatttcagtattcatagatgactgtcacattttaaaatgttcccacttgagcaggtacacaactggtcataattcctgtctgtgtaattcgatgtatatttttccaaacatgtagctattgtttgctttgatttttgcttggcctcctttatgatgtgcatgtccttgaaggctgaatgaacagtccctttcagttcagcagatcaacaggatggagctcttcatgactgtctccagcaataggatgatttactataaatttcatccaactacttgtgatctctctcacctacatcaattatgtatgttaatttcagcaattaaaagaattgattttaatgactttgaattcttaatttctttgtcttaaaagttgctagttatgattttacagatgcaattttaaatcaacttttagccaggtgcggcggctcacacctgtaatcccaactattttggatgccaaggtgagaggattgcttgaggccaggagttaaagatcagcctgggcaacacagaccctgtctctacaaaaaaagaaaaaaattagccagacatagtgttgcttgcctgtagtcccagctactctagaggctgaggcaggaggattgcatgagcctaggagttcgaaactgcagtgagctatgattgcaccactgcactactccagcctgggtgacagagtgggacactgtctccaaaaatagtaataataagtagtcaacttttactgctaatttggtgaacatgagagaggatatgaaaataaatattacctcagctatcctaggatgttaaaataatctccaattttaaaattctctccaatctacatacagtagtagttagtcagataaaggatatccaaaaaagagatagctagaaaatgggagaagcagagttctgcaacccctttcagtttgtaaattgttcacatgtatgaaaataactggtatttatcaatccactcagatttctgcactaacttttatcttatatatcatatgtatctcttttctttttctaaatgggaacatatatttgttattaggtggcagagatatagccttaagatatatttgtaaaatgcacactgaatagacatccaacctaaaaaaaatcactatttaaaaagcccatataatatatacatatttgttagcatgctaattgttcatgttttgtgtttattaaatagaagtgatatatatgacattttgaagtaaagcacatctgaaaaattctactcaaa

SEQ ID NO: 4141 - DNA, 1426 bp, Homo sapiens
  source 1..1426: mol_type = genomic DNA
gaaggtggggctatggcagctgctagggaccctccggaagtatcgctgcgagaagccacccagcgaaaattgcggaggttttccgagctaagaggcaaacttgtagcacgtggagaattctgggacatagttgcaataacagcggctgatgaaaaacaggaacttgcttacaaccaacagctgtcagaaaagctgaaaagaaaggagttaccccttggagttcaatatcacgtttttgtggatcctgctggagccaaaattggaaatggaggatcaacactttgtgcccttcaatgtttggaaaagctatatggagataaatggaattcttttaccatcttattaattcactctggtggctacagtcaacgacttccaaatgcaagtgctctgggaaaaattttcactgctttacctcttgatataccagaatgctctggcaaaacatcctgtatcattcaaagcatactggattcaagatgttctgtggcacctggctcagttgtggagtattccagattggggcctgatgtttcagttggggaaaactgcattattagtggttcttacatcctaacaaaagctgccctccccgcacattcttttgtatgttccttaagcttaaagatgaatagatgcttaaagtatgcaactatggcatttggagtgcaagacaacttgaaaaagagtgtgaaaacattgtcagatataaagttacttcaattctttggagtctgtttcctgtcatgcttagatgtttggaatcttaaagttacagaggaactgttctctggtaacaagacatgtctgagtttgtggactgcacgcattttcccagtttgttcttctttgagtgactcagttataacatccctaaagatgttaaatgctgttaagaacaagtcagcattcagcctgaatagctataagttgctgtccattgaagaaatgcttatctacaaagatgtagaagatatgataacttacagggaacaaatttttctagaaatcagtttaaaaagcagtttgatgtagagatattttaaatattgtacactttgcctttttgagtaacattccagagataggtattttttgtaggctgtttcactgaactcagttaatgaaaactgtattaacataattgttgtagcataatattaatagtgcaaaagtacatataagtcattttgatgaaaaatattccaagactaagttgagaaaagagatactattttggatgtgtatcagtatttttgtttttaataatgattgatttgtggagcattgttttttcacataattagttttaaaggtaattttctaagcatacctttggaatttttccatcttttttgaggcttttggtccagtgaagttctaagtattcactggcacttctctcctcaactgtaattctattttt

SEQ ID NO: 4142 - DNA, 943 bp, Homo sapiens
  source 1..943: mol_type = genomic DNA
tcggctttcttctcgtcggtgttcccggctgctatagagccgggtccccgcggaagccgcggtgtcggcgccatggcggagctgacggctcttgagagtctcatcgagatgggcttccccaggggacgcgcggagaaggctctggccctcacagggaaccagggcatcgaggctgcgatggactggctgatggagcacgaagacgaccccgatgtggacgagcctttagagactccccttggacatatcctgggacgggagcccacttcctcagagcaaggcggccttgaaggatctggttctgctgccggagaaggcaaacccgctttgagtgaagaggaaagacaggaacaaactaagaggatgttggagctggtggcccagaagcagcgggagcgtgaagaaagagaggaacgggaggcattggaacgggaacggcagcgcaggagacaagggcaagagttgtcagcagcacgacagcggctacaggaagatgagatgcgccgggctgctgaggagaggcggagggaaaaggccgaggagttagcagccagacaaagagttagagaaaagatcgagagggacaaagcagagagagccaagaagtatggtggcagtgtgggctctcagccacccccagtggcaccagagccaggtcctgttccctcttctcccagccaggagcctcccaccaagcgggagtatgaccagtgtcgcatacaggtcaggctgccagatgggacctcactgacccagacgttccgggcccgggaacagctggcagctgtgaggctctatgtggagctccaccgtggggaggaactaggtgggggccaggaccctgtgcaattgctcagtggcttccccagacgggccttctcagaagctgacatggagcggcctctgcaggagctgggactcgtgccttctgctgttctcattg

SEQ ID NO: 4143 - DNA, 811 bp, Homo sapiens
  source 1..811: mol_type = genomic DNA
gcggcttgtggctcccaagttagggagtgagaggatcgcccgccgagggggtggctccgcagcccggctgcgcgagacgcttcccgctcggggacccgccttccgaggccaggtgaacgttaccggccccctgacctccagcagatccacacgtttgttggagactgaaccgttgcaaggaacagacgaagatgcagtagccagtgctgacttctctagcatgctctctgaggaggaaaaggaagagttaaaagcagagttagttcagctagaagacgaaattacaacactacgacaagttttgtcagcgaaagaaaggcatctagttgagataaaacaaaaactcggcatgaacctgatgaatgaattaaaacagaacttcagcaaaagctggcatgacatgcagactaccactgcctacaagaaaacacatgaaaccctgagtcacgcagggcaaaaggcaactgcagctttcagcaacgttggaacggccatcagcaagaagttcggagacatgagacgaaagtaggcggtacgaaccctaatggaggcagttttgaggaggtcctcagctccacggcccatgccagtgcccagagcttggcaggaggctcccggcggaccaaggaggaggagctgcagtgctaagtccagccagcgtgcagctgcatccagaaaccggccactacccagcccatctctgcctgtgcttatccagataagaagaccaaaatcccgctgggaaaaacccaggccttgacattgttattcaaatggcccctccagaaagtttaatgatttccatttgtat

SEQ ID NO: 4144 - DNA, 684 bp, Homo sapiens
  source 1..684: mol_type = genomic DNA
gccattctcctgcctcagcctcctgagtagctgggactacaggtgcccgccaccaggcccggctaattttttgtatttttagtagaggcggggttttgcagtgttaaccaggatggtctcgatctcctgaccttgtgatcagcccaccttggcctcccaaagtgctgggattacaggcttgagccaccgcgcctggcccagcttttcttttattagatagcaatgaggatgggatccgaagtagagcttccaacgaccctcaggagcgctgagcgaccaagtgaagtacctacaggacccatttgtgttcactgatctattggagcagctggggattgtggtttgttggagactgaaccgttgcaaggaacagacgaagatgcagtagccagtgctgacttctctagcatgctctctgaggaggaaaaggaagagttaaaagcagagttagttcagctagaagacgaaattacaacactacgacaagttttgtcagcgaaagaaaggcatctagttgagataaaacaaaaactcggcatgaacctgatgaatgaattaaaacagaacttcagcaaaagctggcatgacatgcagactaccactgcctacaagaaaacacatgaaaccctgagtcacgcagggcaaaaggcaactgcagctttcagcaacgttggaacggccatc

SEQ ID NO: 4145 - DNA, 4189 bp, Homo sapiens
  source 1..4189: mol_type = genomic DNA
cgcgggcggcggtgctaggctcgcctctgcctccctcgtggcgggcccggacatggggtcccgtggcctgagtccctcggccggcgcgcagggctcggggccgcgcgcagcctccccgcactgactgtcgcgccgtgccctgcgccaggaggagcggaggccgcgcgcggcccgccgagcgccttcaggatgctcatcaaggaataccacattctgctgcccatgagcctggacgagtaccaggtggcccagctctacatgatccagaaaaagagccgggaggagtctagtggtgagggcagcggcgtggagatcctggccaaccggccctacacggatgggcccgggggcagcgggcaatacacacacaaggtgtaccacgtgggctcccacatcccaggctggttccgggcactgctgcccaaggctgccctgcaggtagaagaggaatcctggaatgcctacccctacacccgaacccggtacacctgccctttcgtggagaaattctccattgaaattgagacctattacctgcctgatggggggcagcagccaaacgtcttcaacctgagcggggccgagaggagacagcgcatcctggacaccatcgacatcgtgcgggatgcagtggccccaggcgagtacaaagcagaagaggacccccggctttatcactcggtcaagacgggccgagggccactgtctgatgactgggcacggacggcggcacagacggggccccttatgtgtgcctataagctgtgcaaggttgagttccgctactggggcatgcaagccaagatcgagcagttcatccatgatgtaggtctgcgtcgggtgatgctgcgggcccaccgccaggcctggtgctggcaggatgagtggacagagctgagcatggctgacatccgggcactggaagaggagactgctcgcatgctggcccagcgcatggccaagtgcaacacaggcagtgaggggtccgaggcccagccccccgggaaaccgagcaccgaggcccggtctgcggccagcaacactggcacccccgatgggcctgaggcccccccaggcccagatgcctcccccgatgccagctttgggaagcagtggtcctcatcctcccgttcctcctactcatcccaacatggaggggctgtgtctccccagagcttgtctgagtggcgcatgcagaacattgcccgagactctgagaacagctccgaggaagagttctttgatgcccacgaaggcttctcggacagtgaggaggtcttccccaaggagatgaccaagtggaactccaatgacttcattgatgcctttgcctccccagtggaggcagagggaacgccagagcctggagccgaggcagctaaaggcattgaggatggggcccaagcacccagggactcagagggcctggatggagccggggagctgggggctgaggcatgcgcagtccacgccctcttccttatcctgcacagcggcaacatcctggactcaggccctggagacgccaactccaagcaggcggatgtgcagacgctgagctccgccttcgaggccgtcacccgcatccacttccctgaggccttgggccacgtggcgctgcgactggtgccctgtccacccatctgcgccgccgcctatgcccttgtctccaacctgagcccttacagccacgatggggacagcctgtctcgctcccaagaccacattccactggctgccctgccactgctggccacctcatcctcccgctaccagggcgccgtggccaccgtcattgcccgcaccaaccaggcctactcagccttcctgcgctcacctgagggtgccggcttctgtgggcaggtcgcactgattggagatggtgttggtggcatcctgggctttgatgcactctgccacagtgctaacgcgggcaccgggagtcggggcagcagccgccgtgggagcatgaacaatgagctgctctctccggagtttggcccagtgcgggaccccctggcagatggtgtggaaggcctgggtcggggcagcccagaaccctcggccttgcctccccagcgcatccccagcgacatggccagtcctgagcccgagggctctcagaacagccttcaggcagcccccgcaaccacctcctcctgggagccccggcgggcaagcacggccttctgcccacccgctgccagttccgaggcacctgacggccccagcagcactgcccgccttgacttcaaggtctctggcttcttcctcttcggctccccactgggcctggtgctggctctgcgcaaaactgtgatgcccgccctggaggcagcccagatgcgcccagcctgtgaacagatctacaacctcttccacgcggctgacccctgcgcctcacgcctcgagcccctgctggccccgaagttccaggccatcgccccactgaccgtgccccgctaccagaagttccccctgggagatggctcatccctgctgctggccgacactctgcagacgcactccagcctctttctggaggagctggagatgctggtgccctcaacacccacctctactagcggtgccttctggaagggcagtgagttggccactgaccccccggcccagccagccgcccccagcaccaccagtgaggtggttaagatcctggagcgctggtgggggaccaagcggatcgactactcgctgtactgccccgaggcgctcaccgcctttcccaccgtcacgctgccccacctcttccacgccagctactgggagtccgccgacgtggtggcgttcatcctgcgccaggtgatcgagaaggagcggccacagctggcggaatgcgaggagccgtccatctacagcccggccttccccagggagaagtggcagcgaaaacgcacgcaggtcaagatccggaacgtcacttccaaccaccgggcgagcgacacggtggtgtgcgagggccgcccccaggtgctaagcgggcgcttcatgtacgggcccctggacgtcgtcacgctcactggagagaaggtggatgtctacatcatgacgcagccgctgtcgggcaagtggatccactttggcaccgaagtcaccaatagctcgggccgcctcaccttcccagttcccccagaacgcgcgctgggcattggtgtctaccccgtgcgcatggtggtcaggggcgaccacacctatgccgaatgctgcctgactgtggtggcccgcggcacggaggctgtggtcttcagcatcgacggctccttcaccgccagcgtctccatcatgggcagcgaccccaaggtgcgagctggcgccgtggacgtggtcaggcactggcaggactccggctacctgatcgtgtatgtcacaggccggccggatatgcagaagcaccgcgtggtggcatggctgtcgcagcacaacttcccccacggcgtcgtctccttctgcgacggcctcacccacgacccactacgccagaaggcaatgtttctgcagagcctggtgcaggaggtagaactgaacatcgtggccggttatgggtctcccaaagatgtggctgtatacgcggcgctggggctgtccccgagccagacctacatcgtgggccgtgccgtgcggaagctacaggcgcagtgccagttcctgtcagacggctatgtggcccacctgggccagctggaagcgggctcgcactcgcatgcctcctcgggacccccgagagctgccttgggcaagagcagctatggtgtggctgcccccgtggacttcctgcgcaaacagagccagctgcttcgctcgaggggccccagccaggcggagcgtgagggcccgggaacaccacccaccaccctggcacggggcaaagcacggagcatcagcctgaagctggacagcgaggagtgaggcccacaccagcctggacctgggttatttattgacacacccaaggggcccgaggggctgcgtgtgggaggctggggacccagacttttggccccagcgctggcccccccagccccacaccctatatctccgtgtgctcctcggtgttacttccctttcatatgaggggacccagcgccggggggagggaggagggcgtgggcatgggcgcagaggcttttccagtgtgtataaatccatgaaaataaacgccacctgcacccca

SEQ ID NO: 4146 - DNA, 2936 bp, Homo sapiens
  source 1..2936: mol_type = genomic DNA
aaacggagcccttaaagggcaatgctctgcgtgtgccacggtgcccaacagcatctcgtgccagctgagctgcggtgtgtggacccggggaatggaccgggctggacaacctctaagacttggctccagctcagcctgtgaaggaatcacctctctgatccccacctctgccccggagtgctagacccagggaggaagagaccccatggaccagccagaggccccctgctccagcacggggccgcgcctcgcggtggcccgcgagctgctcctggctgcgctggaggaactgagccaagagcagctgaagcgcttccgccacaagctgcgcgacgtgggcccggacggacgcagcatcccgtgggggcggctggagcgcgcggacgccgtggacctcgcggagcagctggcccagttctacggcccggagcctgccctggaggtggcccgcaagaccctcaagagggcggacgcgcgcgacgtggcggcgcagctccaggagcggcggctgcagcggctcgggctcggctccgggacgctgctctccgtgtccgagtacaagaagaagtaccgggagcacgtgctgcagctgcacgctcgggtgaaggagaggaacgcccgctccgtgaagatcaccaagcgcttcaccaagctgctcatcgcgcccgagagcgccgccccggaggaggcgatggggcccgcggaagagcctgagccggggcgcgcgcggcgctcggacacgcacactttcaaccgcctcttccgccgcgacgaggagggccggcggccgctgaccgtggtgctgcagggcccggcgggcatcggcaagaccatggcggccaaaaagatcctgtacgactgggcggcgggcaagctgtaccagggccaggtggacttcgccttcttcatgccctgcggcgagctgctggagaggccgggcacgcgcagcctggctgacctgatcctggaccagtgccccgaccgcggcgcgccggtgccgcagatgctggcccagccgcagcggctgctcttcatcctggacggcgcggacgagctgccggcgctggggggccccgaggccgcgccctgcacagaccccttcgaggcggcgagcggcgcgcgggtgctaggcgggctgctgagcaaggcgctgctgcccacggccctcctgctggtgaccacgcgcgccgccgcccccgggaggctgcagggccgcctgtgttccccgcagtgcgccgaggtgcgcggcttctccgacaaggacaagaagaagtatttctacaagtatttccgggatgagaggagggccgagcgcgcctaccgcttcgtgaaggagaacgagacgctgttcgcgctgtgcttcgtgcccttcgtgtgctggatcgtgtgcaccgtgctgcgccagcagctggagctcggtcgggacctgtcgcgcacgtccaagaccaccacgtcagtgtacctgcttttcatcaccagcgttctgagctcggctccggtagccgacgggccccggttgcagggcgacctgcgcaatctgtgccgcctggcccgcgagggcgtcctcggacgcagggcgcagtttgccgagaaggaactggagcaactggagcttcgtggctccaaagtgcagacgctgtttctcagcaaaaaggagctgccgggcgtgctggagacagaggtcacctaccagttcatcgaccagagcttccaggagttcctcgcggcactgtcctacctgctggaggacggcggggtgcccaggaccgcggctggcggcgttgggacactcctgcgtggggacgcccagccgcacagccacttggtgctcaccacgcgcttcctcttcggactgctgagcgcggagcggatgcgcgacatcgagcgccacttcggctgcatggtttcagagcgtgtgaagcaggaggccctgcggtgggtgcagggacagggacagggctgccccggagtggcaccagaggtgaccgagggggccaaagggctcgaggacaccgaagagccagaggaggaggaggagggagaggagcccaactacccactggagttgctgtactgcctgtacgagacgcaggaggacgcgtttgtgcgccaagccctgtgccggttcccggagctggcgctgcagcgagtgcgcttctgccgcatggacgtggctgttctgagctactgcgtgaggtgctgccctgctggacaggcactgcggctgatcagctgcagattggttgctgcgcaggagaagaagaagaagagcctggggaagcggctccaggccagcctgggtggcggcagttctcaaggcaccacaaaacaactgccagcctcccttcttcatccactctttcaggcaatgactgacccactgtgccatctgagcagcctcacgctgtcccactgcaaactccctgacgcggtctgccgagacctttctgaggccctgagggcagcccccgcactgacggagctgggcctcctccacaacaggctcagtgaggcgggactgcgtatgctgagtgagggcctagcctggccgcagtgcagggtgcagacggtcagggtacagctgcctgacccccagcgagggctccagtacctggtgggtatgcttcggcagagccctgccctgaccaccctggatctcagcggctgccaactgcccgcccccatggtgacctacctgtgtgcagtcctgcagcaccagggatgcggcctgcagaccctcagtctggcctctgtggagctgagcgagcagtcactacaggagcttcaggctgtgaagagagcaaagccggatctggtcatcacacacccagcgctggacggccacccacaacctcccaaggaactcatctcgaccttctgaggctctggtggccagagcagggtggaagaccctagtcaaagtccctgtggagaga

SEQ ID NO: 4147 - DNA, 474 bp, Homo sapiens
  source 1..474: mol_type = genomic DNA
gagacctggcgccccggccgaggcgcgaacagacggacgcaccggcgagcgccgaggggacaggccgagcgcggggcgccggaggcagtccctcccctaggcttggctgctgccaggggttctgcgctggccacctggccgcatccctgccctcgaggtgtgggacaggcactggcctcagaccggggccacactgaggtctgcccttctcccgctggccgccacccaagacaccatgagccagtccggggccgtgagctgctgcccgggtgccaccaatggcagcctgggccggtccgacggtgtggccaagatgagccccaaggacctgtttgagcagaggaagaagtattccaactccaacgtcatcatgcacgagacctcgcagtaccacgtccagcacctggccacattcatcatggacaagagcgaagccatcacgtctgtggacgacgccatccggaagctggtgca

SEQ ID NO: 4148 - DNA, 2076 bp, Homo sapiens
  source 1..2076: mol_type = genomic DNA
attatcctccttattgacaaacagagcggtcgcggcggcgactctcggcgtgcggtgatagccaagccatgggagacaagaagagccccaccaggccgaagcggcagccgaagccgtcctcggatgagggttactgggactgtagcgtctgcaccttccggaacagcgccgaggccttcaagtgcatgatgtgcgatgtgcggaagggcacctccacccggaaacctcgacctgtctcccagttggttgcacagcaggttactcagcagtttgtgcctcctacacagtcaaagaaagagaaaaaagataaagtagaaaaagaaaaaagtgaaaaggaaacaactagcaaaaagaatagccataagaaaaccaggccaagattgaaaaatgtggatcggagtagtgctcagcatttggaagttactgttggagatctgacagtcattattacagactttaaggagaaaacaaagtcaccgcctgcatctagtgctgcttctgcagatcaacacagtcaaagcggctctagctctgataacacagagagaggaatgtccaggtcatcttcacccagaggagaagcctcatcattgaatggagaatctcattaaagtttattttctccaatttcttagtcacttctgtcctaccatgcaaatacacagattatgccaagaggtaccacattttcatgacagatacattcatgcacaatccataatttgagttttacataaaatagaaatttgttagaatttgttagattttattgcaatgatgcctaccaaacatttccagacttaacattttggtctctgcagttaagtgccatgaaaatgtggttgaattattcattatgcagtgttattggtaagtgtattttcacttttagtttagtgaattctaacacataattcttgaattctctactattggcatgtaacgaatttaaattttttataacatagtgcaagctgcctaaatatgtattatttgagaattgtgaaacagatagttatatgtatacaagtcaaagaacaacttaactattgctgcaacaggtttttcttaatggttatcctcttaaatacacctgctggtacttggtgtggttaaataggaaaattgttattaaataaagaatttgtatgaacctttgccaatgtttttgacacgttttactaattattgttcctgaattatgtttctggttttatctattttttgaggtttttttgtttgcttatttttcaaaacattcatttattgtaatgtttactagcggactagtaaacaataaaacattgattatttagctttataattcaggtttagtgctattgtcattgaacactggtattttctgtatcatataaaacattaaaattcaaataattataagcatttggcaaaaacaagagaaaagaaacttgccatattttacaagctgcaattttagaaaagctttaacttaatgatagttttatcattgttttcttgtcccaaacttatccagggccatagaagtatgaatctaattaaaacagaaatgggaattattgcacagaaatgggaaataactaattttaaatcagtcaaattggcttcttattaaatacaataattcttatgaaaatcatagtaccctattttcagacacagctgccagtttacacatttctcagtatcctgaaaggaaaaaagtatagccccacttatactatgtaaaattaccaataaaatatttttatgactacagattttgcatttttgtttacaactatttaaagagttttatgttgtatttagaatttcaacctagaaaccacacagtacttaaattctcctggggtctcctgctttctcttaaccatttgcttaatatatatctacctaaaggagacttctgaattgtaaatgaacttaaaaatagaatgtggatgcaaaatatcacataagacatcatgataacatttgaagaaaaaataaaactgtagaccctaacagttgtgatatttggtggtttcatgtggtaatgtaattttctgtttaattacagtactttttacaggcaca

SEQ ID NO: 4149 - DNA, 3335 bp, Homo sapiens
  source 1..3335: mol_type = genomic DNA
cacaggagtcctggctgagctcatggcctgaggctgcctagcggccacggggaatggttgcaatggcggaggcagaggcaggggtggcagtggaggtccgtggactgccccctgccgtgcccgacgagctgctcactctctactttgaaaaccgccgacgctctggagggggacctgtgttgagctggcagagactgggctgtgggggcgtcctcaccttcagagagcctgcagacgccgagagggtcttggcccaggcagatcacgaactacatggtgcccagtacagccttgctgtgccttggccagcccccggccagaccgggctctggtccagttgcccaagcccctttctgaggcagatgtccgtgtcctggaggagcaggcccagaatctgggcctggaggggaccttggtgtccctggcccgggttccccaggcccgagcggtgcgtgtggtgggggatggtgcctctgtggacctgctgttgctggagttgtacctggagaatgagcgccgcagtggtggggggcccctggaggacctgcaacgcctacccgggcccctgggcactgttgcctccttccagcagtggcaagtggcagaacgagtgttgcagcaggagcaccggttgcagggctcagagctgagccttgtcccccactacgacatcctggagcccgaggagctggctgagaacaccagtggaggggaccacccgtccacccaggggcctagggctaccaagcatgctctcctgaggaccggagggttggtgacggctctgcagggtgcagggactgtgacaatgggctctggcgaggaaccagggcagtcaggggcctctctgaggacaggtcccatggtgcagggtagagggattatgacaacaggctctggccaggaaccagggcagtcagggacctctctgaggacaggtcccatggggtctctgggacaggcagagcaagtcagctcgatgcccatggggtctctggaacatgaggggctggtaagcctgaggcctgtggggttgcaggaacaggaggggcccatgagcctggggcctgtggggtctgcaggcccagtggagacctctaaggggttgctggggcaggagggcctggtggaaattgccatggactcaccagagcaagaggggctggtgggtcccatggagatcaccatggggtctctggagaaggcagggcctgtgagcccaggatgtgtgaagctggcagggcaggagggcctggtggagatggtgctattgatggagccaggggcgatgcgcttcctgcagctctaccatgaggaccttcttgcgggcctgggagacgtcgctctcttgccacttgaaggaccggatatgactggctttcggctctgtggagcccaggcttcctgccaggcggctgaggagtttctgcggagcctgctgggcagcattagctgccatgtgttgtgcctggagcacccgggcagcgccaggtttctcctgggcccagaagggcagcaccttctccaggggctggaggctcagttccagtgtgtctttgggacagagcgcctggccacagccacgttggacacaggccttgaagaggtggaccctaccgaggccctcccagtgctccctggcaacgcccacaccctgtggaccccagacagtacaggtggtgaccaggaggacgtgagcctggaggaggtccgagaactgctggccaccctggagggcctagacctagacggggaggactggctgcctcgggagctggaggaggaagggcctcaggagcagccagaggaggaggtgaccccagggcatgaggaggaggagcctgtggcccccagcactgtggcacccaggtggctggaggaggaggccgctctgcagctggccctccaccggtcactggagcctcaaggtcaggtggctgagcaggaggaggctgctgccctgcggcaagccctaaccctctccctgctggagcagcccccgttggaggcagaagagcccccagatggggggactgatggcaaggcccagctggtggtgcactcggcctttgagcaggatgtggaggagctggaccgggcgctcagggctgccttggaggtccacgtccaggaggagacggtggggccctggcgccgcacactgcctgcagagctgcgtgctcgcctggagcggtgccatggtgtgagtgttgccctgcgtggtgactgcaccatcctccgtggcttcggggcccaccctgcccgtgctgcccgccacttggtggcacttctggctggcccctgggatcagagtttggcctttcccttggcagcttcaggccctaccttggcggggcagacgctgaaggggccctggaacaacctggagcgtctggcagagaacaccggggagttccaggaggtggtgcgggccttctacgacaccctggacgctgcccgcagcagcatccgcgtcgttcgtgtggagcgcgtgtcgcacccgctgctgcagcagcagtatgagctgtaccgggagcgcctgctgcagcgatgcgagcggcgcccggtggagcaggtgctgtaccacggcacgacggcaccggcagtgcctgacatctgcgcccacggcttcaaccgcagcttctgcggccgcaacgccacggtctacgggaagggcgtgtatttcgccaggcgcgcctccctgtcggtgcaggaccgctactcgccccccaacgccgatggccataaggcggtgttcgtggcacgggtgctgactggcgactacgggcagggccgccgcggtctgcgggcgccccctctgcggggtcctggccacgtgctcctgcgctacgacagcgccgtggactgcatctgccagcccagcatcttcgtcatcttccacgacacccaggcgctgcccacccacctcatcacctgcgagcacgtgccccgcgcttcccccgacgacccctctgggctcccgggccgctccccagacacttaaccgaaggggccaccctctggcctcctgcttcccaggctcccagctccgcacaggctgatgctccccgcccccaactgtggccgcctgagctgtccccggggacgcccctgcctccctctgcgggctccagaaggcggtgtgggggatggcggtcagcagcggccgaggggggccgggctaggtcccagcctgggccgaccccaccaccaggggtcagcagagcccaggaggcgacaccgcccgcccgccgctcccagacctcgcccgagtcggctctgttgtttgaataaacgtgaacgtgaacccaggcggaagggacccgggaactctg

SEQ ID NO: 4150 - DNA, 1224 bp, Homo sapiens
  source 1..1224: mol_type = genomic DNA
caacggaccctacctcttgtagtgattctcggggccacgggcaccggcaaatccacgctggcgttgcagctaggccagcggctcggcggtgagatcgtcagcgctgactccatgcaggtctatgaaggcctagacatcatcaccaacaaggtttctgcccaagagcagagaatctgccggcaccacatgatcagctttgtggatcctcttgtgaccaattacacagtggtggacttcagaaatagagcaactgctctgatatatttgcccgagacaaaattcctattgttgtgggaggaaccaattattacattgaatctctgctctggaaagttcttgtcaataccaaggagcttgcaagtttttgaagaaacaggaatctctcatagtgaatttctccatcgtcaacatacggaagaaggtggtggtccccttggaggtcctctgaagttctctaacccttgcatcctttggcttcatgctgaccaggcagttctagatgagcgcttggataagagggtggatgacatgcttgctgctgggctcttggaggaactaagagattttcacagacgctataatcagaagaatgtttcggaaaatagccaggactatcaacatggtatcttccaatcaattggcttcaaggaatttcacgagtacctgatcactgagggaaaatgcacactggagactagtaaccagcttctaaagaaaggtattgaggctctgaaacaagtaactaagagatatgcccggaaacaaaaccgatgggttaaaaaccgttttttgagcagacctggtcccattgtcccccctgtctatggcttagaggtatctgatgtctcgaagtgggaagagtctgttcttgaacctgctcttgaaatcgtgcaaagtttcatccagggccacaagcctacagccactccaataaagatgccatacaatgaagctgagaacaagagaagttatcacctgtgtgacctctgtgatcgaatcatcattggggatcgcgaatgggcagcgcacataaaatccaaatcccacttgaaccaactgaagaaaagaagaagattggactcagatgctgtcaacaccatagaaagtcagagtgtttccccagaccataacaaagaacctaaagagaagggatccccagggcagaatgatcaagagctgaaatgcagcgtttaagagacatgtccagtggcctttggaaaggtg

SEQ ID NO: 4151 - DNA, 1707 bp, Homo sapiens
  source 1..1707: mol_type = genomic DNA
gcagcaatggagagctgagggagcgtcgtcaggctctggacatcctgagcccaagtcccccacactcagtgcagtgatgagtgcggaagtgaaggtgacagggcagaaccaggagcaatttctgctcctagccaagtcggccaagggggcagcgctggccacactcatccatcaggtgctggaggcccctggtgtctacgtgtttggagaactgctggacatgcccaatgttagagagctggctgagagtgactttgcctctaccttccggctgctcacagtgtttgcttatgggacatacgctgactacttagctgaagcccggaatcttcctccactaacagaggctcagaagaataagcttcgacacctctcagttgtcaccctggctgctaaagtaaagtgtatcccatatgcagtgttgctggaggctcttgccctgcgtaatgtgcggcagctggaagaccttgtgattgaggctgtgtatgctgacgtgcttcgtggctccctggaccagcgcaaccagcggctcgaggttgactacagcatcgggcgggacatccagcgccaggacctcagtgccattgcccgaaccctgcaggaatggtgtgtgggctgtgaggtcgtgctgtcaggcattgaggagcaggtgagccgtgccaaccaacacaaggagcagcagctgggcctgaagcagcagattgagagtgaggttgccaaccttaaaaaaaccattaaagttacgacggcagcagcagccgcagccacatctcaggaccctgagcaacacctgactgagctgagggaaccagctcctggcaccaaccagcgccagcccagcaagaaagcctcaaagggcaaggggctccgagggagcgccaagatttggtccaagtcgaattgaaaggactgtcgtttcctccctggggatgtggggtcccagctgcctgcctgcctcttaggagtcctcagagagccttctgtgcccctggccagctgataatcctaggttcatgacccttcacctcccctaaccccaaacatagatcacaccttctctagggaggaggcaaatgtaggtcatgtttttgttggtactttctgttttttgtgacttcatgtgttccattgctccccgctgccatgctctctcccttgtttccttaagagctcagcatctgtccctgttcattacatgtcattgagtaggtgggtagccctgatgggggtcgctctgtctggagcataacccacaggcgttttttctgccaccccatccctgcatgcctgatccccagttcctataccctacccctgacctattgagcagcctctgaagagccatagggcccccacctttactcacaccctgagaattctgggagccagtctgccatgccaggagtcactggacatgttcatcctagaatcctgtcacactacagtcatttcttttcctctctctggcccttgggtcctgggaatgctgctgcttcaaccccagagcctaagaatggcagccgtttcttaacatgttgagagatgattctttcttggccctggccatctcgggaagcttgatggcaatcctggaagggtttaatctccttttgtgagtttggtggggaagggaagggtatatagattgtattaaaaaaaaaaaggtatatatgcatatatctatatataatatgacgcagaaataaa

SEQ ID NO: 4152 - DNA, 2048 bp, Homo sapiens
  source 1..2048: mol_type = genomic DNA
atctccactcccctcccaccaggcacgaggacatccccatccccacgccactcgcaccgggtccgcggggaaccccctatctctaccttccccgacgcggctcccacaagacccccatctctgcgccgggcccctccacgtgcggggtctcaggtttgaggtggtcccctccaagtttaaagagaagctggacaaagcctccttcgctactccgtatgggtacgccatggagaccgccaagcagaaggccctggaggtggccaaccggctgtaccagaaagacctgcgggcccccgacgtggtcattggagcggacacgatcgtgacagtcggggggctgattctggagaagccggtggacaagcaggacgcctacaggatgctgtcccggttgagtgggagagaacacagcgtgttcacaggtgtcgcgatcgtccactgctccagcaaagaccatcagctggacaccagggtctcggaattctacgaggaaacgaaggtgaagttctcggagctgtccgaggagctgctctgggaatacgtccacagcggggagcccatggacaaagctggcggctacgggatccaggccctgggcggcatgctggtggagtccgtacacggggactttctgaacgtggtgggattcccgctgaaccacttctgcaagcagctggtgaagctctactacccgccccgtccggaggacctgcggcggagtgtcaagcacgactccatcccggccgcggacaccttcgaagacctcagtgacgtggaggggggcggctcggagcccactcagagggacgcgggcagccgcgatgagaaggccgaggcgggagaggcgggacaggccacggcagaggctgagtgtcacaggactcgggagaccctgcctccgttcccgacacgcctcctggagctgattgagggctttatgctatccaagggcctgctcaccgcttgcaaactgaaggtgttcgatttgttaaaagatgaagcaccccagaaggctgcggatattgccagcaaagtggacgcctctgcgtgtggaatggagaggcttctggacatctgtgctgccatggggctcctggagaagacagagcaaggttacagtaacacagagacagcgaacgtctacctggcatcggatggcgaatactctctgcacggcttcatcatgcacaataatgacctcacatggaacctctttacatacctggagtttgccatccgagagggaacaaaccagcaccacagggcgttggggaagaaggcggaagatctgttccaggatgcgtactaccagagcccggagacgcggctgaggttcatgcgggccatgcacggcatgacgaagctgactgcgtgccaggtggccacggccttcaatctgtcccgcttctcctccgcctgcgacgtgggaggctgcacgggtgcactggcccgagagctggcccgtgagtaccctcgtatgcaggtgactgtgtttgacctcccagacattatcgagctggccgcccacttccaaccccccggaccgcaggcagtgcagatccacttcgcagcaggtgactttttcagggaccccctccccagcgctgagctgtacgtcctgtgccggatcctgcatgactggccagacgacaaagtccacaagttactcagcagggtcgccgagagctgcaagccaggggccggcctgctgctggtggagacgctcctggatgaggagaagagggtggcgcagcgcgccctgatgcagtcactgaacatgctggtgcagactgaaggcaaggagcggagcctgggcgagtatcagtgcttgctggagctgcacggcttccaccaggtgcaggtggtgcacttggggggtgtcctggatgccatcttggccaccaaagtggccccctgaagcccaggcagcatgttcattatagggatgtcctcccccaggctgcaggtggaccgcccggtccccaagtaccataggacagtcacataggagcgtgtagtcgtgactgaataaagaaagcaaaagcctg

SEQ ID NO: 4153 - DNA, 2034 bp, Homo sapiens
  source 1..2034: mol_type = genomic DNA
gcgcgtgcggggcagcaatggagagctgagggagcgtcgtcagggtggacaccatgcgacacccatttctcctttgcatcctgtgtcttggggttcaatggggtgcacgtgatggggcttggggttaggcccaggggagggggtgggtgtggcagccttgcgaagtggctgactttaggattcctagatcagaattttagaccgctccatgtctgattcctcaccgcagaaccgacttagtgcctttacaatccagtccctcagccttgtgcttcccatccgaccagccatcggggacctctagcttcacatcctctttccttgcagctctggacatcctgagcccaagtcccccacactcagtgcagtgatgagtgcggaagtgaaggtgacagggcagaaccaggagcaatttctgctcctagccaagtcggccaagggggcagcgctggccacactcatccatcaggtgctggaggcccctggtgtctacgtgtttggagaactgctggacatgcccaatgttagagagctggctgagagtgactttgcctctaccttccggctgctcacagtgtttgcttatgggacatacgctgactacttagctgaagcccggaatcttcctccactaacagaggctcagaagaataagcttcgacacctctcagttgtcaccctggctgctaaagtaaagtgtatcccatatgcagtgttgctggaggctcttgccctgcgtaatgtgcggcagctggaagaccttgtgattgaggctgtgtatgctgacgtgcttcgtggctccctggaccagcgcaaccagcggctcgaggttgactacagcatcgggcgggacatccagcgccaggacctcagtgccattgcccgaaccctgcaggaatggtgtgtgggctgtgaggtcgtgctgtcaggcattgaggagcaggtgagccgtgccaaccaacacaaggagcagcagctgggcctgaagcagcagattgagagtgaggttgccaaccttaaaaaaaccattaaagttacgacggcagcagcagccgcagccacatctcaggaccctgagcaacacctgactgagctgagggaaccagctcctggcaccaaccagcgccagcccagcaagaaagcctcaaagggcaaggggctccgagggagcgccaagatttggtccaagtcgaattgaaaggactgtcgtttcctccctggggatgtggggtcccagctgcctgcctgcctcttaggagtcctcagagagccttctgtgcccctggccagctgataatcctaggttcatgacccttcacctcccctaaccccaaacatagatcacaccttctctagggaggaggcaaatgtaggtcatgtttttgttggtactttctgttttttgtgacttcatgtgttccattgctccccgctgccatgctctctcccttgtttccttaagagctcagcatctgtccctgttcattacatgtcattgagtaggtgggtagccctgatgggggtcgctctgtctggagcataacccacaggcgttttttctgccaccccatccctgcatgcctgatccccagttcctataccctacccctgacctattgagcagcctctgaagagccatagggcccccacctttactcacaccctgagaattctgggagccagtctgccatgccaggagtcactggacatgttcatcctagaatcctgtcacactacagtcatttcttttcctctctctggcccttgggtcctgggaatgctgctgcttcaaccccagagcctaagaatggcagccgtttcttaacatgttgagagatgattctttcttggccctggccatctcgggaagcttgatggcaatcctggaagggtttaatctccttttgtgagtttggtggggaagggaagggtatatagattgtattaaaaaaaaaaaggtatatatgcatatatctatatataatatgacgcagaaataaatctatgagaaatctatctacaaactaccctgaa

SEQ ID NO: 4154 - DNA, 1536 bp, Homo sapiens
  source 1..1536: mol_type = genomic DNA
gtcgcctccgggctttctccggtcgctgccgccaccaccgttgcttcgcgggctgggaggcccggggtccccgggcgaacagaggctgcggcactctcgagtggaccctgaggagctcttcaccaagctcgaccgcattggcaagggctcgtttggggaggtctacaagggcatcgataaccacacaaaggaggtggtggccatcaagatcatcgacctggaggaggccgaggatgagatcgaggacatccagcaggagatcactgtcctcagtcagtgcgacagcccctacatcacccgctactttggctcctacctaaagagcaccaagctatggatcatcatggagtacctgggcggcggctcagcactggacttgcttaaaccaggtcccctggaggagacatacattgccacgatcctgcgggagattctgaagggcctggattatctgcactccgaacgcaagatccaccgagacatcaaagctgccaacgtgctactctcggagcagggtgacgtgaagctggcggactttggggtagcagggcagctcacagacacgcagattaagaggaacacattcgtgggcacccccttctggatggcacctgaggtcatcaagcagtcggcctacgacttcaaggctgacatctggtccctggggatcacagccatcgagctggccaagggggagcctccaaactctgacctccaccccatgcgcgtcctgttcctgattcccaagaacagcccacccacactggagggccagcacagcaagcccttcaaggagttcgtggaggcctgcctcaacaaagacccccgattccggcccacggccaaggagctcctgaagcacaagttcatcacacgctacaccaagaagacctccttcctcacggagctcatcgaccgctataagcgctggaagtcagaggggcatggcgaggagtccagctctgaggactctgacattgatggcgaggcggaggacggggagcagggccccatctggacgttcccccctaccatccggccgagtccacacagcaagcttcacaaggggacggccctgcacagttcacagaagcctgcggagcccgtcaagaggcagccgaggtcccagtgcctgtccacgctggtccggcccgtcttcggagagctcaaagagaagcacaagcagagcggcgggagcgtgggtgcgctggaggagctggagaacgccttcagcctggccgaggagtcctgccccggcatctcagacaagctgatggtgcacctggtggagcgagtgcagaggttttcacacaacagaaaccacctgacatccacccgctgaagcgcactgctgttcagataggggacggaaggtcgtttgtttttgttctgagctccataagaactgtgctgacttggaaggtgccctgtgctatgtcgtgcctgcagggacacgtcggatcccgtgggcctcacatgccaggtcaccaggtcaccgtctccttccacccctgcagtgtgctgttgtgcacgtca

SEQ ID NO: 4155 - DNA, 556 bp, Homo sapiens
  source 1..556: mol_type = genomic DNA
ctgcacgacgcctgtgtgtctggcctttccttcttcttctcttccccggcagcacagtgtggctgtttgtctccttgcccgccaaagttctgcccagtccaacgactccacgcagctcgcccttggtaaggggtcggggaggggcacaagctcttctttactagaggttggagtgcaatggcattatcttggctcactgtaacctcaaacttctgggctgaagcgatcctcctccctcagcctcctgagtagctaggactacaggtgtgaaaaagacagcatgaactttaccccaacacacacccctgtctgcagaaagcgaacagttgtctccaaacgtggtgttgccgtcagtggtcccaccaagaggaggggaatggcagattcactggagtcaacccccttgccttcccccgaagatcgtctggccaaactccatccttctaaggagctcctggaatattatcaaaagaagatggctgagtgtgaggcagaaaatgaggacttgctgaagaaactggaactctacaaagaagcttgtgaaggacagcataaa

SEQ ID NO: 4156 - DNA, 899 bp, Homo sapiens
  source 1..899: mol_type = genomic DNA
atggcccagaaggagaactcctacccctggccctacggccgacagacggctccatctggcctgagcaccctgccccagcgagtcctccggaaagagcctgtcaccccatctgcacttgtcctcatgagccgctccaatgtccagcccacagctgcccctggccagaaggtgatggagaatagcagtgggacacccgacatcttaaccaggcggcacttcacaattgatgactttgagattgggcgtcctctgggcaaaggcaagtttggaaacgtgtacttggctcgggagaagaaaagccatttcatcgtggcgctcaaggtcctcttcaagtcccagatagagaaggagggcgtggagcatcagctgcgcagagagatcgaaatccaggcccacctgcaatcatggaggagttggcagatgctctaatgtactgccatgggaagaaggtgattcacagagacataaagccagaaaatctgctcttagggctcaagggagagctgaagattgctgacttcggctggtctgtgcatgcgccctccctgaggaggaagacaatgtgtggcaccctggactacctgcccccagagatgattgaggggcgcatgcacaatgagaaggtggatctgtggtgcattggagtgctttgctatgagctgctggtggggaacccaccctttgagagtgcatcacacaacgagacctatcgccgcatcgtcaaggtggacctaaagttccccgcttccgtgcccatgggagcccaggacctcatctccaaactgctcaggcataacccctcggaacggctgcccctggcccaggtctcagcccacccttgggtccgggccaactctcggagggtgctgcctccctctgcccttcaatctgtcgcctga

SEQ ID NO: 4157 - DNA, 934 bp, Homo sapiens
  source 1..934: mol_type = genomic DNA
acaacaagatggcggcgctgcgggacggctagcggccctgcgtgcggttcctcagtgactatggcctgcagtgggtgggcgagcccatggaccaggaggactcagagagcaagacagtctcagagcatggcgagagggactggatgacagccaagaagttctggaagccaggggactcattggcgccccctgaggtggactttgacaggctgctggccagcctgcaggatcttagtgagctggtggtagagggtgacacccaagtgacaccagtgcccggcggggcacggctgcgtaccctcgagcccatcccgctgaagctctaccggaatggcatcatgatgttcgacgggcccttccagcccttctacgatccctccacacagcgctgcctccgagacatattggatggcttctttccctcagagctccagcgactgtaccccaatggggtcccctttaaggtgataagctgctcctcaaaccacacctttggggattttgaagggagtggggatacacagcctccccagacacctcccattctgaggggaagccgctgcactccctgggggaccccagtctgatgccctccaggaggataagtctgaagccgggctgggaagggagcggagaggcccgaaacagagcagcaggcagcgccctctgctggcaccctggagacagcctcggctgcggggcccctgccttctagtcctccccagctttcaggacaccttgacaacctggggtccctgcagaagtggcccggctgtcccccaagtctcctgaagctatctgggtagggtgggaggcagtgctgtgagccacaaatgcaaagcagaggggacagatgttgggactcaaagacatgaggtagagctggccccatgggtaggtgccaccaccagagcccatgaggcttcgtgttcta

SEQ ID NO: 4158 - DNA, 2175 bp, Homo sapiens
  source 1..2175: mol_type = genomic DNA
cggacctctcaggctaatcccgagggccgggcctgttgggcttttctgcacaccagccgaggcagcgagccaacatgagccaagtgctgttccaccaactagtcccgttgcaggtgaaatgcaaagactgtgaggagaggagagtaagtataagaatgagcattgaactacaatcagtttctaatccagttcacagaaagtttaaaattccagcaaggtcttctggtagacttcttagctttcccacaaaaatttatagatctccttcagcaatgtactcaagaacatgccaaagaaattccaaggtttttgctacagttagtttctccagcagctattttggataactcacctgcatttttaaatgtggtagagacaaatccttttaagcatcttacacacctctcactaaaacttttacctggaaatgatgtggagataaagaaatttctcgcaggctgtttgaaatgtagcaaggaagaaaaattatcattgatgcaatcactagatgatgctactaagcaactggactttacacgaaagacattagcagaaaaaaaacaagaattagataagttacggaatgaatgggcgtcacatacagcagccttgacaaacaagcattctcaggaactgacaaatgaaaaggaaaaagccttgcaggcacaggttcaatatcaacagcagcatgaacaacagaaaaaagatttagaaatcctccatcaacaaaacatccaccagctacaaaacagactgtctgagttagaagcggctaataaagacttaaccgaaagaaaatataaaggagactccactattagagaacttaaagcaaaactttctggtgttgaagaggagctacagcggactaagcaagaagtcctctctttgcgaagagagaattctacactagatgttgaatgccacgagaaagaaaagcacgttaatcagctacaaacaaaagtggcagttttagaacaggaaatcaaggataaggaccagcttgttttaagaacaaaagaggcatttgatacaatccaggaacaaaaggtggttttagaagaaaatggtgagaaaaatcaagtacaactaggaaagcttgaagctacaataaaatcattatctgcagaacttctgaaggcaaatgaaattatcaagaagttacaaggggatctgaaaactttaatgggtaagttgaaattgaagaatacagttactattcagcaagaaaaactcttggctgagaaggaggaaaaattacaaaaggaacaaaaggaattacaagatgttggacagtctcttcgaattaaagagcaagaggtatgcaaattacaagaacaattagaagctacagttaaaaaacttgaagaaagcaaacaacttctaaaaaataatgaaaagttaatcacgtggttaaataaagaactaaatgaaaatcagctagtgagaaagcaagatgtattgggaccttctactactccgcctgcacattccagcagcaacacaatcagaagtggaatttctcctaacctgaatgtggttgatggtagactgacttacccaacctgtgggattggttatcctgtctcctctgcatttgcattccagaataccttccctcattcgatatctgccaaaaataccagccaccctggttcaggaacaaaggttcagtttaatttgcagtttacaaaaccaaatgcatcactaggagatgttcagtcaggagcaactattagtatgccttgctcaactgataaggaaaatggtgaaaatgtagggttggaatccaaatacctgaagaaaagggaagatagcattcctttacgcggactcagccagaacctatttagtaattcagaccatcagagagatggcactttaggagcattacatacatcttccaaacccacagcgctcccctctgcgtcttcagcctatttccctgggcagttaccaaacagttaattctagtgtcatgttttactttttattggtattttagaaactcaggtgcttaaaaaatatgtcaacacaaaccagatcctcaaatagcaagtttcaaattttacttgagctgttaaagactggatactttaagtactgcttttatggcagtttataatataggaacaaatttgtacttggggattggtaaagattgtgagtaaatga

SEQ ID NO: 4159 - DNA, 3681 bp, Homo sapiens
  source 1..3681: mol_type = genomic DNA
attggtgagtggggcagggcaggagggaactgaagagtgagaaagcattatttcagcaaaaggtctttcctcccttgctctctcctccaaccactggctcagcctctccgcccgctgcctgtgaatgatgcaatggaaggtgtgctggggtcgccctgtgtcccgtgcataggagcatctcagcctccaggtcctctcctttggggctcacggcacccccatgctacgaaccgcaggcagggacggcctctgtcgcctgtccacctacttggaagaactcgaggctgtggaactgaagaagttcaagttatacctggggaccgcgacagagctgggagaaggcaagatcccctggggaagcatggagaaggccggtcccctggaaatggcccagctgctcatcacccacttcgggccagaggaggcctggaggttggctctcagcacctttgagcggataaacaggaaggacctgtgggagagaggacagagagaggacctggtgagggataccccacctggtggcccgtcctcacttgggaaccagtcaacatgccttctggaagtctctcttgtcactccaagaaaagatccccaggaaacctacagggactatgtccgcaggaaattccggctcatggaagaccgcaatgcgcgcctaggggaatgtgtcaacctcagccaccggtacacccggctcctgctggtgaaggagcactcaaaccccatgcaggtccagcagcagcttctggacacaggccggggacacgcgaggaccgtgggacaccaggctagccccatcaagatagagaccctctttgagccagacgaggagcgccccgagccaccgcgcaccgtggtcatgcaaggcgcggcagggataggcaagtccatgctggcacacaaggtgatgctggactgggcggacgggaagctcttccaaggcagatttgattatctcttctacatcaactgcagggagatgaaccagagtgccacggaatgcagcatgcaagacctcatcttcagctgctggcctgagcccagcgcgcctctccaggagctcatccgagttcccgagcgcctccttttcatcatcgacggcttcgatgagctcaagccttctttccacgatcctcagggaccctggtgcctctgctgggaggagaaacggcccacggagctgcttcttaacagcttaattcggaagaagctgctccctgagctatctttgctcatcaccacacggcccacggctttggagaagctccaccgtctgctggagcaccccaggcatgtggagatcctgggcttctctgaggcagaaaggaaggaatacttctacaagtatttccacaatgcagagcaggcgggccaagtcttcaattacgtgagggacaacgagcctctcttcaccatgtgcttcgtccccctggtgtgctgggtggtgtgtacctgcctccagcagcagctggagggtggggggctgttgagacagacgtccaggaccaccactgcagtgtacatgctctacctgctgagtctgatgcaacccaagccgggggccccgcgcctccagcccccacccaaccagagagggttgtgctccttggcggcagatgggctctggaatcagaaaatcctatttgaggagcaggacctccggaagcacggcctagacggggaagacgtctctgccttcctcaacatgaacatcttccagaaggacatcaactgtgagaggtactacagcttcatccacttgagtttccaggaattctttgcagctatgtactatatcctggacgagggggagggcggggcaggcccagaccaggacgtgaccaggctgttgaccgagtacgcgttttctgaaaggagcttcctggcactcaccagccgcttcctgtttggactcctgaacgaggagaccaggagccacctggagaagagtctctgctggaaggtctcgccgcacatcaagatggacctgttgcagtggatccaaagcaaagctcagagcgacggctccaccctgcagcagggctccttggagttcttcagctgcttgtacgagatccaggaggaggagtttatccagcaggccctgagccacttccaggtgatcgtggtcagcaacattgcctccaagatggagcacatggtctcctcgttctgtctgaagcgctgcaggagcgcccaggtgctgcacttgtatggcgccacctacagcgcggacggggaagaccgcgcgaggtgctccgcaggagcgcacacgctgttggtgcagctaccagagaggaccgttctgctggacgcctacagtgaacatctggcagcggccctgtgcaccaatccaaacctgatagagctgtctctgtaccgaaatgccctgggcagccggggggtgaagctgctctgtcaaggactcagacaccccaactgcaaacttcagaacctgaggctgaagaggtgccgcatctccagctcagcctgcgaggacctctctgcagctctcatagccaataagaatttgacaaggatggatctcagtggcaacggcgttggattcccaggcatgatgctgctttgcgagggcctgcggcatccccagtgcaggctgcagatgattcagttgaggaagtgtcagctggagtccggggcttgtcaggagatggcttctgtgctcggcaccaacccacatctggttgagttggacctgacaggaaatgcactggaggatttgggcctgaggttactatgccagggactgaggcacccagtctgcagactacggactttgtggctgaagatctgccgcctcactgctgctgcctgtgacgagctggcctcaactctcagtgtgaaccagagcctgagagagctggacctgagcctgaatgagctgggggacctcggggtgctgctgctgtgtgagggcctcaggcatcccacgtgcaagctccagaccctgcggttgggcatctgccggctgggctctgccgcctgtgagggtctttctgtggtgctccaggccaaccacaacctccgggagctggacttgagtttcaacgacctgggagactggggcctgtggttgctggctgaggggctgcaacatcccgcctgcagactccagaaactgtggttatttgggatggacctgaataaaatgacccacagtaggttggcagcgcttcgagtaacaaaaccttatttggacattggctgctgaatggtcctatctgctggctctcccctgagatctggacagaggaagatgggagggtgctcatcacccccccagcataatgatcagcctccttcctagagacagactcatgcagattgagatcaaaagtccctctgcttgggatcaaattaatgtttgacagagctggccaggcgtggtggctcatgtatgtaatcctagcacttcgagaggccgaggcaggtggatcacgaggtcaggagtttgagattagcctggccaagatggtgaaaccctgtctctactaaaaataaaaaaaaattagccaggcatggtggcgggcacctgtagtcccagctactcaggaggctgaggcaggagaatcgcttgaacccgggaggtggaggttgcagtgagccgagatcgcgccactgcactccagcctgggcgacagagtgggactccatctc

SEQ ID NO: 4160 - DNA, 4641 bp, Homo sapiens
  source 1..4641: mol_type = genomic DNA
aagcactttcgcgccgtatccctccgccccccttcccgacaccctcgcggcgagcggttcttgccgcatcctgcgcagcccctgcctactttggtgcagaggcgtggggggcgggacgcgtctttcccgttcggatcgcggggaaagcagtggctccaagtgagccagaggagagctgaggagaggagggggaggccgacgacctgggccctgggcctctgaaggcctactttaaggctggccaattctgcaagaaaggcaaggaggaggagactggctcacagctctggaggacccccttctgtcagctgtggggcttgacaccacttgaacaagaaaaggagggggaaactgcaccacatcagtgaaggaggcagccggtccagagagactttctcaaagcccagctgtcccacctagcattcaacatcagtcgcactgcatacgtctcatacaattggaagagactcaaagcctcatttcattctctctccctagatccacctccagtggctgctctgctggtggtggagttgctgctgacaaccaccctcaacgggtctgcacccatccaggaaatatctgtcttcctttagcttggttgtacctgttctcactctatctgtattattgaattattgactgagactgtgtttgggaaggaggctgagtgactactggactggatattgactctaactcttattcccaagcttatatccttaatcacctaaagatcagagtgtgaagaaacaaacctgtgacagatctgtggttgaggtttagactacgggaggagtatattacctgactttctttgtaacttgtaccatgactggggcagagattgagcctagtgcccaggccaagcctgaaaagaaggctggggaagaggttatcgctgggcctgagagagagaatgatgtccctctggtggtcagacccaaggttaggacccaggcaactactggggcaaggcccaaaactgagaccaagtctgtgcctgcggcaaggcccaaaactgaggcccaagcaatgtctggggcaaggcccaaaactgaggtccaagtaatgggtggtgcaagacccaaaacggaggctcaaggaatcacaggggccaggcccaaaaccgatgccagggcagtaggtggcgctcgttctaaaactgatgccaaggcaatccctggagcaaggcccaaggatgaggcccaggcatgggcccagagtgaatttgggactgaagcagtgtcacaggcagaaggagtgtcccagactaatgccgttgcttggccactggccactgctgagtctggatcagttactaaatctaagggcctgtctatggatagagaactagtcaatgtggatgctgaaacctttcctggcacccagggtcagaaaggaatccagccctggtttggaccaggggaggagactaatatggggtcttggtgctattccaggcccagggccagagaggaggcctctaatgagtctgggttctggtcagcagatgagacctctacagcgtcttctttctggactggagaagagacaagtgtcagatcatggcccagggaagagtccaataccaggtccaggcacagggctaaacatcagactaatcccaggtccaggcccagatccaagcaagaagcctatgttgattcctggtctggatctgaggatgaggccagcaacccattctccttctgggttggagaaaataccaataacttgttcaggcccagagtcagggaggaggcaaatatcaggtccaagctcaggacaaatagagaagattgttttgaatctgagtctgaagatgagttctataagcagtcctgggttttgcctggagaagaggccaatagtagattcaggcacagagacaaagaagatcctaatactgccttgaaactcagggcccagaaagatgttgacagtgatagggtcaaacaagaacccaggtttgaggaggaagtcattattgggtcctggttctgggcagaaaaagaggccagtttggagggtggagcttcagcaatctgtgaatctgagccaggaactgaggagggggccattggcggatccgcgtactgggctgaggaaaagtccagtttgggggctgtggccagagaagaggccaagccggagtctgaagaagaggccatatttgggtcctggttctgggacagagatgaggcctgctttgacctaaatccctgtcctgtgtacaaggtcagtgataggttcagagatgcagctgaggagcttaatgcatcctccaggccccaaacctgggacgaggtcactgttgaattcaaacctggtctttttcatggggttggcttccgatccacaagcccctttggaattcccgaagaggcttctgaaatgcttgaggcaaagcccaagaacctggaacttagcccagaaggagaagagcaggaatctttgcttcagcctgatcagcctagtcctgagttcacatttcagtatgatccttcctaccggtcagtccgggaaattcgagagcatcttagggccagggagagtgcagagtctgagagttggtcctgcagctgcatacaatgtgagctgaaaattggttctgaagagtttgaagaattccttttattaatggacaaaattcgggatccttttattcatgaaatatctaaaattgcaatgggtatgagaagtgcttctcaatttacccgagatttcattcgagattcaggtgttgtctcacttattgaaaccttgcttaattatccatcctctagagttaggacaagttttttggaaaatatgattcacatggctccaccttatccaaatctaaacatgattgagacattcatatgtcaagtgtgtgaggaaacccttgcacatagtgtggattcccttgagcagctgactggaataaggatgcttagacacctcactatgactattgactatcacacactgattgccaactatatgtccgggtttctctccttattaaccacagccaatgcgagaacgaagtttcacgttctgaaaatgctattgaatttgtctgaaaatcctgctgtggcaaaaaaactattcagtgccaaagctctttcaatatttgtgggtctctttaacatagaagagacaaatgataatattcaaattgttattaaaatgtttcagaatatcagtaacattataaaaagtggaaagatgtccttaattgatgatgatttcagtcttgagccgcttatttctgcatttcgtgaatttgaggagttagctaagcaactacaagcccaaatagacaaccaaaatgatcctgaggtgggacaacaaagttaatatgattaaccacctgccgctgatcagccttatgttcccaaagagccctgagtagtgctttggtgttcacagtctgtttttttgttgtaacttatattttttaatgctgatgttaactttgtcaaactcttgttttgagctggatcattttgtggatgccaaatgaatatcaaaactgaaaacacatttgttgatatttgtcttgctgtccagattgcggtatttttcagtattaagttttcaatgaactgtgtcacctaagtaagctaccctgctattcgttgtttaaatatatggttctctatttgagtctgtgttttcaataaagttctatgttaaaattggcataagtgacccttcttcagtttaagaaccatgtacagataaatcgtgtgcacttacaaacataggtaattattagtatgacaaacatgcgcttattagaaaattctgttcttgagttaagaagggagagattattgtgggccctgatacttgaggaatgtttccgagaagagggacccacttaaattggtcaggatagaacaaattggtcaggataggagagcaagacaacttgcccgcctgcttgcccaattatgagccttcccaacaagcaacctaaaattaatacttcttataggacccatttaaattaccatcttagccctgggatttgcctaagggtaggataagacaaatcattaggttgctcttggaagtgggcagtggtggtttgaagaaaagtgtgtaattgaataatctgttctagtagcatggatgaacccagtctgcttgaaacaagtaaaaggagtttgatgagaaatgcagttagaaagttgggaagaggccaatttggggaacagaataagccaaatctgcatatttaacaattcaaagtacaggtgttacttcaatgccacctaaaggctgaaagagtaggatagcacaattaaatggagtggggaatatgatttcctttatattcctagacaaaggaaagtgttaaggaaataccatgcagccgttggaatgattatgtatggataggtttattgacacaaaaggacattaattattttatatttggtgaaacagagaatgtgacatcatgtatggaaaattagattccatttttaaaacatctgtaaatgtacacaattcctatgcaatttcaatatgaatttctaaacacagtctggaataaaatatataccttgttaaaaaatgcttagagacaggcgttggggagatacaaacattaataagacaaattaaaaaattaatatgctt

SEQ ID NO: 4161 - DNA, 550 bp, Homo sapiens
  source 1..550: mol_type = genomic DNA
agaaaaggctggagtcccagtccgtggaggagcacttacagggtctttcctaagtgctgatggcaaagaattagaaactaagtggatgctttcgacagaggaacagttggataagatgtcacacgtccatgccttggatttctgcacttgacctggaaggattcccatgagaaaagaaaagggctctgtgtatgaatgacaaggataccttcagccagctcattctggatgaatgaatgattacactaagtgtcctccacattcctctgtgggctcacttcatggactcactttgcgtgcttgttaaatgtgctgtgttgctcccaagaccatgtaaagcctactgaccactaacctccctcacagcagaaactagacgtcaggttaaaatgggcaactccgacagtcagtacacccttcaaggatctaaaaatcatagcaatactattactggtgctaagcaaattccttgctccctgaaaatacgtggcattcatgcaaaagaggaaaagtcattgcatggatggggtcacggaagcaacggagcagg

SEQ ID NO: 4162 - DNA, 1398 bp, Homo sapiens
  source 1..1398: mol_type = genomic DNA
cctggagttccggccaggccactgcttgggaagcaagaaggtgaaggcacctctgctgggccaagcactcttagggccgaggggcactgcagctgacaagagctccctgtttcgctgaggcctggagcccccatggcctcactgagccgagccctacgtgtggctgctgcccaccctcgccagagccctacccggggcatggggccatgcaacctgtccagcgcagctggccccacagccgagaagagtgtgccatatcagcggaccctgaaggagggacagggcacctcggtggtggcccaaggcccaagccggcccctgcccagcacggccaacgtggtggtcattggtggaggcagcttgggctgccagaccctgtaccacctggccaagctgggcatgagtggggcggtgctgctggagcgggagcggctgacctccgggaccacctggcacacggcaggcctgctgtggcagctgcggcccagtgacgtggaggtggagcttctggcccacactcggcgggtggtgagccgggagctggaggaggagacgggactacacacgggctggatccagaatgggggcctcttcatcgcgtccaaccggcagcgcctggacgagtacaagaggctcatgtcgctgggcaaggcgtatggtgtggaatcccatgtgctgagcccggcagagaccaagactctgtacccgctgatgaatgtggacgacctctacgggaccctgtatgtgccgcacgacggtaccatggaccccgctggcacctgtaccaccctcgccagggcagcttctgcccgaggagcacaggtcattgagaactgcccagtgaccggcattcgtgtgtggacggatgattttggggtgcggcgggtcgcgggtgtggagactcagcatggttccatccagacaccctgcgtggtcaactgtgcaggagtgtgggcaagtgctgtgggccggatggctggagtcaaggtcccgctggtggccatgcaccatgcctatgtcgtcaccgagcgcatcgaggggattcagaacatgcccaatgtccgtgatcatgatgcctctgtctacctccgcctccaaggggatgccttgtctgtgggtggctatgaggccaaccccatcttttgggaggaggtgtcagacaagtttgccttcggcctctttgacctggactgggaggtgttcacccagcacattgaaggcgccatcaacagggtccccgtgctggagaagacaggaatcaagtccacggtctgcggccctgaatccttcacgcccgaccacaagcccctgatgggggaggcacctgagctccgagggttcttcctgggctgtggcttcaacagcgcaggtgagtccgggcaggccctcctggccccc

SEQ ID NO: 4163 - DNA, 665 bp, Homo sapiens
  source 1..665: mol_type = genomic DNA
attaagctgtgaatgaacctcccaaacccaggaatatgatatgagaacatagcctttgaatttctctctcaagtttgacttgaaaaatcagcctcagaaacatctttatcttaagatagatttccgttgctctcagaacgtctctcccctgaccttctgttattaagttcatggacatacagcattttagaattaggtgggggctccgaagtctgcgagtgcagctgtgcacagatttaatccagagactgacttcactatagaacccacagttgtatcaatggttggggaaagatagtggcaacaggcaaaggagaaacagctctgacatacaaagaaaatgagtatgctaaagccaagtgggcttaaggcccccaccaagatcctgaagcctggaagcacagctctgaagacacctacggctgttgtagctccagtagaaaaaaccatatccagtgaaaaagcatcaagcactccatcatctgagactcaggaggaatttgtggatgactttcgagttggggagcgagtttgggtgaatggaaataagcctggatttatccagtttcttggagaaacccagtttgcaccaggccagtgggctggaattgttttagatgaacccataggcaagaacgatggttcggtggcaggagttcggtatt

SEQ ID NO: 4164 - DNA, 2775 bp, Homo sapiens
  source 1..2775: mol_type = genomic DNA
ctgcaggacgagccgagaggctcagccatatttgatggttttgttgctttgctcgggagttctcgggagtaatttaatgccgaaggtcgctgcctagtggaaataatataatacgtcattaatatggcgccaaaagattgggttctcgatctgtagcgaggagggagggaggcagccgctgagcgcagcgttactatcccaccagtaacttgggcattgccggggcgggggccggaggaggaggagaggatgatttttggatcctgagaattgatctatgttggatcagctgcctgctgtttcccggggagatcatgaaacgaggtcgccttcccagcagcagtgaggattctgacgacaatggcagcctgtcaactacttggtcccagaattcccgatcccagcataggagaagctcctgctccagacatgaagatcgaaagccttcagaggtgtttaggacagacctgatcactgccatgaagttgcatgactcctaccagctgaatccggatgagtactatgtgttggcagatccctggagacaggaatgggagaaaggggtccaggtgcctgtgagcccggggaccatccctcagcctgtggccagggttgtgtctgaagagaaatccctcatgttcatcaggcccaagaagtacatcgtgtcatcaggctctgagcctcccgagttgggctatgtggacatccggacgctggctgacagcgtgtgtcgctatgacctcaatgacatggatgctgcatggctggaactgaccaatgaagaatttaaggagatgggaatgcctgaactagatgaatacaccatggagagggtcctagaggaatttgagcagcgatgctacgacaatatgaatcatgccatagagactgaggaaggcctggggatcgaatatgatgaagatgttgtctgtgatgtctgccagtctcctgatggtgaggacggcaatgagatggtgttctgtgacaaatgcaacatctgtgtgcaccaggcctgttatggaatcctcaaggtaccagagggcagctggctgtgccggacatgtgccctgggggttcagccaaaatgtctgctgtgtccgaagaagggtggagctatgaagcccacccgtagcggaaccaagtgggtccacgttagctgtgctctgtggatccctgaggtgagcattggcagcccagagaagatggagcccatcaccaaggtgtcacacattcccagcagccggtgggcgctagtgtgcagcctctgcaatgagaagtttggggcctctatacagtgctctgtgaagaactgccgcacagccttccatgtgacctgtgcttttgaccggggcctggagatgaagaccatcttagcagagaatgatgaagtcaagttcaagtcctattgcccaaagcacagctcacataggaaacccgaggagagtcttggcaagggggctgcacaggagaatggggcccctgagtgttccccccggaatccgctggagccctttgccagccttgagcagaaccgggaggaggcccaccgggtgagtgtccgtaagcagaagctgcagcagttggaggatgagttctacaccttcgtcaacctgctggatgttgccagggctctgcggctgcctgaggaagtagtggatttcctgtaccagtactggaagttgaagaggaaggtcaacttcaacaagcccctgatcaccccaaagaaagatgaagaggacaatctagccaagcgggagcaggatgtcttatttaggaggctgcagctgttcacgcacctgcggcaggacctggagagggttcggaacctcacttacatggtgacccgcagggaaaagattaaacggtctgtgtgcaaagtccaggaacagatattcaatctttacactaagcttttggagcaagaaagagtttcaggtgtgccttcttcctgctcctcctcctcactggaaaacatgcttttgtttaacagtccttctgttggccctgatgctcccaagatagaggacttgaagtggcattctgcattcttcagaaaacaaatgggtacttccttggttcattcgctgaaaaagccccataagcgagatcctttgcagaatagccctggaagtgaaggcaaaaccctgctgaagcagccagacctgtgtggtagaagggaggggatggtggtcccagagagctttttgggtttagaaaagacctttgcagaagcacgtctcatatcagcacaacagaaaaatggtgtggtgatgccagaccatgggaaaagaagagacaatcgttttcattgtgatctcattaaaggagacttaaaggacaaatcttttaaacagagtcacaagcctctcaggtccacagatgtgtcccagaggcatctggacaacacaagagctgctgcaatatggagatttagggtaatatggcaaggtcctgctgcttgaagcctgtgagtgggttgtggatatgggactggtggagagtgagactgttaggaaagttgtatctatgaataagggcagttgaagtagaatttttaccagtccacttgaccttcttcttccctaaccactggctcttgagccagcttgggatttccctggccattgccaatacctggccatctggcttccaatagtacagtggctactcaagttcaagcgaagaacttccagactctggtgactgttacttcccagagccaaccactagtgcatatgttagggaatctgggcttccaacatgaatggattcctt

SEQ ID NO: 4165 - DNA, 494 bp, Homo sapiens
  source 1..494: mol_type = genomic DNA
ggaggggcgcgaggtttcaagatggcggtagctgaggggttgaccgagagacccagttgaaggcctttacgaagtgaaagaggccgggagtcgccccctacccgcttctcgtagtcctgggagcacagcagaagtttgtgttttgaactcttgagagtcaagcattatatctgaactagaactgaatctgaattaaatatgcttaaattaatgagtttttagtgtcttagaagtattgagaatgtacagcatacatgccaagaaaaaccatggagagaggcaaaggtgaggtttttctttttttaatgaacaagtaaaccatacaaattgtcaacatgggacggagatctacatcatccaccaagagtggaaaatttatgaaccccacagaccaagcccgaaaggaagcccggaagagagaattaaagaagaacaaaaaacagcgcatgatggttcgagctgcagttttaaagatgaaggatccaaaacagata

SEQ ID NO: 4166 - DNA, 1351 bp, Homo sapiens
  source 1..1351: mol_type = genomic DNA
ctgcttgttggacatgaagagagggagacaaaggctctcagaaagagaaagacgggctggtgaaggacaaactaaggaatttgattattcacttttccaagataaagtggcatggagtggggaaagaccattaaggaatgctgaacataaaggaatcctggggacctgaccctcagttaagacataagaatgacaaccaggagtgtgctcgatgttgaaacatttgtagcagatatactgaaaggagaaaatttatccaagaaagcaaaggaaaagagagaatcccttattaagaagataaaagatgtaaagtctatctatcttcaggaatttcaagacaaaggtgatgcagaagatggggaagaatatgatgacccttttgctgggcctccagacactatttcattagcctcagaacgatatgataaagacgatgaagccccctctgatggagcccagtttcctccaattgcagcacaagaccttccttttgttctaaaggctggctaccttgaaaaacgcagaaaagatcacagctttctgggatttgaatggcagaaacggtggtgtgctctcagtaaaacggtattctattattatggaagtgataaagacaaacaacagaaaggtgaatttgcaatagatggctacagtgtcagaatgaataacactctaagaaaggatggaaagaaagattgctgttttgaaatctctgctcctgataaacgtatatatcagtttacagcagcttctcccaaagatgctgaagaatgggtacagcagctgaaatttgtattgcaagatatggaatctgatattattcctgaggattatgatgagagaggagaattatatgatgatgttgatcatcctctaccaataagcaatccactaacaagcagtcaaccaatagatgatgaaatttatgaagaacttccagaagaagaagaggacagtgctccagtgaaagtggaagaacaaaggaagatgagtcaggatagtgtccatcacacctcaggggataagagcactgattatgctaatttttaccagggattgtgggattgtactggagctttttctgatgagttgtcatttaagcgtggtgatgtgatttacattcttagcaaggaatacaatagatatggctggtgggtaggagaaatgaagggagccattggcttggtgcctaaagcctacataatggagatgtatgatatttgagagtcctggaaaaggaaaattcttctgcttgtctgcaaatgctttggatttagaagcgtcatgaaagcacgagtgacagctcctaacctctccttgttttattaaacattacttatctttgactgtt

SEQ ID NO: 4167 - DNA, 3389 bp, Homo sapiens
  source 1..3389: mol_type = genomic DNA
gaaaccgtttggcaggggcggcggtggcggcggcgttggcggcagcggccgagcggaaagcttgcgtgtggtggtgccagattggattatggaagtgggaagtgaagaagaaaaatgggagaagctggatgcagaatttgatcactttgtggttgatatgaagccctttgttctaaaattacctcataggacagaacggcagaggtgtgctctttggattagaaagctgtgcgaaccttcaggaacaggtgcaggaataatggggaggaagaatcggaacctgtatgcaaaattgttattgcatatgcttaaacgaggtgcgcttgaaggcccttttacacaccgacctgaacccgggacactaaaaattctaccttcatacatgtccatctattttgatgaaccaaatccagcacgagcaaaaggttcaagcccagagggattaccagcctgggtactgggtgagctggagacaagtgaacacaaattaaatgaatcatggaaactctcttctggagaagataacactttagtacagtcgccaactgatgtctacagcagggaacagtacactgggaagctccgagtgagatcacactccttgagtccaactcacagagaagatggacaaaatattaccccaaagatttgtgaagtttattcgaaaaaatctcctgtttctttggatgatagtgacattgaagctcgccttaatagttggaatcttgggatagaaaatcctcgatacctgagacagaagcctatcccagtttctctgatgacaccgaaattcagcctgagaaaatccagcagtttccatgatgatcattttctctctcgaatacgtgagaaagagctggacatgaaaacaaaaatgatggaagctaaatttcatgaagaaaagcttaaactgcaacagaaacatgatgctgatgttcagaagattttagaaagaaagaataatgaaatagaagaactgaaaactttatacaggagtaaacaacatgaaactgaagagactattagaaagcttgaaaagaaagttcagacactgatacgtgactgtcaagttatcagagagactaaagaagaccagattgcagagctgaaaaagatatgtgaacaaagtacggaatctctaaataatgactgggaaaaaaagcttcacaatgctgtagcagaaatggaacaggaaaagtttgatcttcaaaagcaacacactgaaaacattcaagaattgcttgaggatacaaatgtgcgtctgaataaaatggagagtgaatacatggcgcaaacacagtccacaaaccacatgatcaaagaactggaggcccgtgtccagcagctgactggagaagcagagaacagtaatttacagaggcagaaattaattcaagaaaaagcagaacttgaaagatgttaccagataacgtgtagtgaattacaagaagtaaaggcaaggcgtaacacactgcataaagagaaggaccatcttgtaaatgattatgagcaaaacatgaaactgttacaaaccaaatatgatgctgatataaaccttctaaaacaagaacatgctctttcagcttctaaggcatctagtatgattgaagaattagagcagaatgtctgtcaattaaaacagcagttacaggaatcagaacttcaaagaaagcaacaactaagggatcaagaaaataagtttcagatggagaaaagtcatttaaaacacatctatgaaaaaaaggctcatgacttgcagagtgaacttgataaaggaaaagaagatactcaaaagaaaattcataaatttgaggaagctttgaaggaaaaagaggagcagctaactcgtgtgactgaagttcagaggttgcaggcccagcaggcagatgccgctctggaagagtttaagcggcaggtggaactgaactcagagaaagtctatgctgaaatgaaagagcagatggaaaaagtggaggcagatctaactagatccaaatctcttcgtgagaaacaatcaaaggagtttttatggcaactggaggacatcagacagcggtatgaacaacagatagtagagctgaagctggagcatgaacaggagaagacgcacctattacagcagcataacgcagagaaggatagcctagtccgagaccatgaacgggaaattgaaaacctggaaaaacagcttcgcgctgccaatatggagcacgaaaatcaaattcaggagttcaagaaacgagatgcacaggttattgccgacatggaggcccaggttcacaagttgagagaagaattgatcaatgtgaactcacagcggaaacagcagctggtagagcttggtcttcttcgtgaagaggaaaagcaaagggctacaagggaacatgagattgtcgtcaataaactgaaggctgaatcagaaaagatgaaaatagagctgaaaaagactcatgctgctgagacagagatgacactggaaaaggccaacagcaagctgaagcagattgagaaggaatacactcagaagcttgccaaatcttcacagatcatagcagaacttcagacaaccatttcctctctgaaagaagagaacagccagcagcagcttgctgcagaaaggcggctccaggatgttagacaaaagtttgaagatgagaagaagcagctgattagagataatgaccaagcaatcaaggttttacaagatgaattagaaaaccgttctaatcaggtgcgatgtgcagagaaaaaattacaacacaaagaattggagtcacaggaacagataacttacatacgacaagaatatgaaacaaaattgaaaggattgatgccagcatccctaagacaagaacttgaagacaccatttcctccctaaaatcacaggttaattttctgcaaaagagagcttccatccttcaggaagaactgactacatatcaaggcagaaggtaactgcacgagagaatgcaacggatgcaatttccaggctgtgctgtggacttcttccagcaggtttgaagatttggatattgtaaactgtgagatcagtggcattttttaaatccttaaatgtaattaagatcataaaaacatgcatcattcatacactagtggggtggttttatttgtgtctgcctaagttatttttttaacattcctttatttccgattttcatgtttgtgtgcatttgagtatgtgctgagaactgcttatattgggcaaagtgatttcctatgatatgccttgttaatccttttgcatagaattttaccagttgcgtacgatcaaaatcacgtttgtagtatcatatcaaaaattctaacctgtttacattgttttcatgttcatgttcctatgttattaaaatattattttgtacttacc

SEQ ID NO: 4168 - DNA, 1663 bp, Homo sapiens
  source 1..1663: mol_type = genomic DNA
gtttcccccttgggcggtggtggaggtggtaaccgtgatagtagcagctccggcggcagcaacagcgactacgagggatggcggcggctgcagcaggaactgcaacatcccagaggtttttccagagcttctcggatgccctaatcgacgaggacccccaggcggcgttagaggagctgactaaggctttggaacagaaaccagatgatgcacagtattattgtcaaagagcttattgtcacattcttcttgggaattactgtgggaaaaactgaataccttgagtaaaattacatagaaaatgttaatgagacaaggaggtgaattttgtgacacagctgtattcattgaagagctttaagaaggaagctaaatgttaagccaaaaggaagttgctgttgctgatgcaaagaagtctctagaactcaatccaaataattccactgctatgctgagaaaaggaatatgtgaataccatgaaaaaaactatgctgctgccctagaaacttttacagaaggacaaaaattagatagtgcagatgctaatttcagtgtctggattaaaaggtgtcaagaagctcagaatggctcagaatctgaggtgtggactcatcagtcaaaaatcaagtatgactggtatcaaacagaatctcaagtagtcattacacttatgatcaagaatgttcagaagaatgatgtaaatgtggaattttcagaaaaagagttgtctgctttggttaaacttccttctggagaggattacaatttgaaactggaacttcttcatcctataataccagaacagagcacgtttaaagtactttcaacaaagattgaaattaaactgaaaaagccagaggctgtgagatgggaaaagctagaggggcaaggagatgtgcctacgccaaaacaattcgtagcagatgtaaagaacctatatccatcatcatctccttatacaagaaattgggataaattggttggtgagatcaaagaagaagaaaagaatgaaaagttggagggagatgcagctttaaacagattatttcagcagatctattcagatggttctgatgaagtgaaacgtgccatgaacaaatcctttatggagtcgggtggtacagttttgagtaccaactggtctgatgtaggtaaaaggaaagttgaaatcaatcctcctgatgatatggaatggaaaaagtactaaataaattaatttgctctcatcgtattgtgtatattcacctaatgcccattgtgtattgatattgcattcttgaattttgaacactgaatatctttttgaaagattatacttctttacctctttgtgctttagaaattattttccttcaagtgttcaagtctaatgaagaatgaagataacattttatcacttctgtccttaaaggtttcagacatggtgaaactgaataaagcatgtcatttgctcctagatagattcattctatctagttgtggggatggagaaatctttaatggtatattttcggttattgccttatttttgatacagtattctgtcagtaatttattagacctggcagctttgggtgagcttagatttttcaccttcagtgttacattgtgtttgcttttaaaaactgcttttgaatggagttgtaaatacaatttttctatg

SEQ ID NO: 4169 - DNA, 1327 bp, Homo sapiens
  source 1..1327: mol_type = genomic DNA
cgagctgttgtgcatccagaggtggaattggggcccggtaagtgatttgaataatttaataaataagttagagggctcagcaggcccagaacgagccattttgtcagctgcagcagtcattaactccgcagaggcctctggtccctcgccaggaagtttcttcactggaaactgggaagacagggtggtttagggttgaaggtccgacgtggaagagataagggctgagacctgagtcacttctcacaggcattccctcctcgtcccgggctggcccttgcccccaccctgcaactcctggttgagatgggctcagccaagagcgtcccagtcacaccagcgcggcctccgccgcacaacaagcatctggctcgagtggcggacccccgttcacctagtgctggcatcctgcgcactcccatccaggtggagagctctccacagccaggcctaccagcaggggagcaactggagggtcttaaacatgcccaggactcagatccccgctctcctactcttggtattgcacggacacctatgaagaccagcagtggagaccccccaagcccactggtgaaacagctgagtgaagtatttgaaactgaagactctaaatcaaatcttcccccagagcctgttctgcccccagaggcacctttatcttctgaattggacttgcctctgggtacccagttatctgttgaggaacagatgccaccttggaaccagactgagttcccctccaaacaggtgttttccaaggaggaagcaagacagcccacagaaacccctgtggccagccagagctccgacaagccctcaagggaccctgagactcccagatcttcaggttctatgcgcaatagatggaaaccaaacagcagcaaggtactagggagatcccccctcaccatcctgcaggatgacaactcccctggcaccctgacactacgacagggtaagcggccttcacccctaagtgaaaatgttagtgaactaaaggaaggagccattcttggaactggacgacttctgaaaactggaggacgagcatgggagcaaggccaggaccatgacaaggaaaatcagcactttcccttggtggagagctaggccctgcatggccccagcaatgcagtcacccagggcctggtgatatctgtgtcctctcaccccttctttcccagggatactgaggaatggcttgttttcttagactcctcctcagctaccaaactgggactcacagctttattgggctttctttgtgtcttgtgtgtttcttttatattaaaggaagtaattttaaatgttactttaaaaaggt

SEQ ID NO: 4170 - DNA, 1416 bp, Homo sapiens
  source 1..1416: mol_type = genomic DNA
agcgatgcggtttcactatggtgtccaggctggtctgcaactcccgggctcaagcgatcctcccgccccgcctctcaaagtgctgggaaggtcccttccaggcttaagcagcgataatggttttcaagttaaaaacaaaggaggaacagcacagcatgctgggctctggatttaaagctgagcgcttaagagtgaatttgagattagtcataaatcgccttaaactattggagaaaaagaaaacggaactggcccagaaagcaaggaaggagattgctgactatctggctgctgggaaagatgaacgagctcggatccgtgtggagcacattatccgggaagactacctcgtggaggccatggagatcctggagctgtactgtgacctgctgctggctcggtttggccttatccagtctatgaaggaactagattctggtctggctgaatctgtgtctacattgatctgggctgctcctcgactccagtcagaagtggctgagttgaaaatagttgctgatcagctctgtgccaagtatagcaaggaatatggcaagctatgtaggaccaaccagattggaactgtgaatgacaggctaatgcacaagctgagtgtggaagccccacccaaaatcctggtggagagatacctgattgaaattgcaaagaattacaacgtaccctatgaacctgactctgtggtcatggcagaagctcctcctggggtagagacagatcttattgatgttggattcacagatgatgtgaagaaaggaggccctggaagaggagggagtggtggcttcacagcaccagttggtggacctgatggaacggtgccaatgcccatgcccatgcccatgcctatgccatctgcaaatacgcctttctcatatccactgccaaagggaccatcagatttcaatggactgccaatggggacttatcaggcctttcccaatattcatccacctcagataccagcaactcccccatcgtatgaatctgtagatgacattaatgctgataagaatatctcttctgcacagattgttggtcctggacccaagccagaagcctctgcaaagcttccttccagacctgcagataactatgacaactttgtcctaccagagttgccatctgtgccagacacactaccaactgcatctgctggtgccagcacctcagcatctgaagacattgactttgatgatctttcccggaggtttgaagagctgaaaaagaaaacataggtctcttaaaccaggcaactttcacgttttgggagttgagactgagcaatttctccttgtaacaaagaatctccatgaaattctgtttcatctgttaaccgtcactcagcacaacactccctctgggctctcttcctgctcctccagattctgctgcttt

SEQ ID NO: 4171 - DNA, 1021 bp, Homo sapiens
  source 1..1021: mol_type = genomic DNA
gagccaccgcgccgcggtacgcggttccccgacggccgccgcgaggggcgaggagcgaggagcgaggggcgaagggcgaggccgagcagccagatggccaggccgctgtccacccccagctcttcgcagatgcaagccaggaagaaacacagagggatcatagagaaacggcgtcgagaccgcatcaacagtagcctttctgaattgcgacgcttggtccccactgcctttgagaaacagggctcttccaagctggagaaagccgaggtcttgcagatgacggtggatcacttgaaaatgctccatgccactggtgggacaggattctttgatgcccgagccctggcagttgacttccggagcattggttttcgggagtgcctcactgaggtcatcaggtacctgggggtccttgaagggcccagcagccgtgcagaccccgtccggattcgccttctctcccacctcaacagctacgcagccgagatggagccttcgcccacgcccactggccctttggccttccctgcctggccctggtctttcttccatagctgtccagggctgccagccctgagcaaccagctcgccatcctgggaagagtgcccagccctgtcctccccggtgtctcctctcctgcttaccccatcccagccctccgaaccgctccccttcgcagagccacaggcatcatcctgccagcccggaggaatgtgctgcccagtcgaggggcatcttccacccggagggcccgccccctagagaggccagcgacccctgtgcctgtcgcccccagcagcagggctgccaggagcagccacatcgctcccctcctgcagtcttcctccccaacaccccctggtcctacagggtcggctgcttacgtggctgttcccacccccaactcatcctccccagggccagctgggaggccagcgggagccatgctctaccactcctgggtctctgaaatcactgaaatcggggctttctgagctgccccttcaccaccccgcccca

SEQ ID NO: 4172 - DNA, 4006 bp, Homo sapiens
  source 1..4006: mol_type = genomic DNA
gcctcctcttgcgctgtcctgttaatggcgggcagtagccgctgaggggattgcagataaccgcttcccgcacggggaaagtctaccctgcctgccactttctgctcgccgtcagcgccggagctcgccagcatgtctgtggtaccgcccaatcgctcgcagaccggctggccccggggggtcactcagttcggcaacaagtacatccagcagacgaagcccctcaccctggagcgcaccatcaacctgtaccctcttaccaattatacttttggtacaaaagagcccctctacgagaaggacagctctgttgcagccagatttcagcgcatgagggaagaatttgataaaattggaatgaggaggactgtagaaggggttctgattgtacatgagcaccggctaccccatgtgttactgttgagcaggttcaattttatttacaactgaattcctgcgcagtggagaagtaaaagaagccgcttgtctctgtgagcacagctatatacagtgtagaataaatgtggtagaaaagtttttttggttttatctcttttgcgatccctaaattgccacctttctattgtttgaatagtaaaattaatatgaagaactagatagtggtgtaaacaaatgtgataatgtttatttactttcggttctgctcatacttttttgtacaacattaaagaaaatggactttttttattttaatttctcattaaacttctaaaattcttataggtgaggatcatttttccccccaccttaggatggtgaatgttgcaacacaatgacaggtttaagtcagtcaagtttattggacccttgctttgataccattcttgggcacatactccaagattgtattagatttttgtgatgaagagcttccattacttctgaaaactatatttatctgagtgagtccaaggtgcaactcctaaatgaattgtgttgcagagaactcccagtataattcactgaccagtacattttataaccatccaggccttggtttgcaagcaacagaccttaaacatacaggaaactattaaaattggctcgatcagtagtcataggaattggtataagaagagactcatttagagctcagagttttcttcacataatgggggtattaattatttgtgctgttgcgaaattatgtgtcttattcttaaagccatggtaaaaatagggatctgtgaaggaaatttctaaaattggatgtattaggttttgaactctgagattgcacaaatattcaattaacttgaagttgtgtacatagagaagaaaatttggttttagcaaatgacagagccttcaaaaatatttttggaataatgtgaatcaaccgaaaactgggggcaaggcagaggacaggttttctcaggttaagagaaaaacgaaattttaaaaactttaaaaaatactgataaattcggatcaaatttgggggaataaaaaatattagagcaaaggagtttgctggttgtgtcattatttaatgatcaaagtatagcatgtatgccttattacagacttgttgactataggcttaatgtaaaaaggaatcttgccagatgtagctacttaaggaaaaaagggtttttaatagaaatgaacttttgattagtatggtgccagtcacagggctattttcctgaatattgggtgatgtcaaaggtatatgatacttgaggaaatcaggccaagtgtagctgagcaattaataaacactcaagtttttttagttggggtcatgtcaaaccctcacatggtggttaagtagtgactaactgtgcatgtccttcatggtaggtgagcaccagtctccatgatcaaaaatgccccagtttcctttgaaaaagccactagttctgtgaattgtccttttccctcctgcccctaacagtcctacccctctagcctacattagcatatttctcatgtaatgtattttgctggtaagctcatccattagctgcgtccttcagctattcctttagattggaggaagtggatatgaagatggattgattcagctcaccttccatgattgcttttgagggaaaagctacagtggccacatttcagatgttcacttttgcaatttgtggagggtggagagaggtagacttttgttgtgtgttttataaagtactctcagtaaggagtgtttgagttgaagagtcatctgattcgaggccactcatgttctttgtaacttaaactttgaccaagaaattcttcacttctcacttcttcacttcttcccaatatacagtaagtacgtgagccagtcatccatacactaaggcctagttgagaaaaacctttgattcaggatggctgggttactaaccttgaaatgtaagagatctggttttgaatgtaaaagttgcaacacacaaacggaagtcttaaaaactttttgctctggtcagttacaggtggatccccaataatctgtttttggttttctgatggaaataatagaattaggggaaatcaaatctggttggtaggtgtctacagtattagaagagggtataagggcactgtttaacactaagttctaatacttccagaaactgtgcattccagatctacatactaaatgctcttatcattttgaaatgggctcttgattaatagacccatattttttagtggcttctatgttgtatatttgtctaaaatgaaagctcttttgcgttctaaaactacaatatatgtcatcttattttccctgagtatccaagtatagtgcagattctatgtaaaactactaaatgacactggaatatgtttagtagattagggggaaaaactataaaggtttatacaattgtttgtagttacatttaggatggacttatccctttggagaagagtgaagtttgttttttcgccatgtgatgaagaccactgtgattttttaaaaaagtagataatacttaaaatggcgtaataattctgcacttgaatttgtactgttaacagcacatttggaagattttaaaactttttattgtcttataaatagcattcacttattattttggatatttaagggttccattaagttaacactgtatttggacaaagtgtgaccaaattagccagtctgttttcttccatgtttaattagaagtgagaggtagaagtacttcaaattcaacaggccagcaagcaatcggcttaaaattccctttcttaaatgttgtgctcttatgttctcggctttttaatgactttatttttacagtacttgttcagtcacttgagatgaaatgcttggggtagcttttccatcctcaaacttaatgtttttactagttcatagtgtttggaacagtatatgccaatcactgagactgcatcagagtttgcaattttgtatgtttcattgccaaagaaggcttagtggttgttgactgtagtataagtcagctttctgtagcataagatttgattttcccatacttacttcacttgttatacatcactgattatttgggttaaactggactcatttcaagcagtttgcttttgttcaaatcgtgatgagaaacctaatactgtaatttgatttgagccataaaacacattttaatattagcttgtattatagttattaagcttgtttttgtggaaaaaaacttactaaaacctaggtaactctagattaggccagttcaggtgtattttgtatcttagtaatggatcatatcgtaaaaatagagataagttgggaagatatattgattatgctgttctgttgagggaaaggtcatgtatttagaaatttaaacttttggttattgtgttcacatcatagtattcaagcatcatttatagtttggttttgagaacttttctggtattacgtttatggcaaatgtataaaagaaacaagttttggttatatttttatatttgtaaagtaagtttggttaaagtgatcactgttctttttttattttattgtcatttc

SEQ ID NO: 4173 - DNA, 877 bp, Homo sapiens
  source 1..877: mol_type = genomic DNA
attccccttcagttgctccatctgggcagccagctcagggcctcagtccagagacaaagcagaggcagacgattctagttttctttgctgtaaatgccacactacatggaactagagaatttgggaatctgactcatccaatcaagcccaggctaaaggcaaatgaagaaaaggctcacttcatggactcactttgcgtgcttgttaaatgtgctgtgttgctcccaagaccatgtaaagcctactgaccactaacctccctcacagcagaaactagacgtcaggttaaaatgggcaactccgacagtcagtacacccttcaaggatctaaaaatcatagcaatactattactggtgctaagcaaattccttgctccctgaaaatacgtggcattcatgcaaaagaggaaaagtcattgcatggatggggtcacggaagcaacggagcaggttacaagtccaggtccctggcccgaagctgcctttctcactttaagagtaaccagccttacgcatcgagactcggtggccccacatgcaaggtctccagaggtgttgcctactccacgcacaggacaaatgccccagggaaggatttccagggcatcagtgctgctttctcaactgagaatggcttccactctgttggccacgagctggcagataaccacatcacctccagagactgcaacggacaccttctcaactgctacgggaggaatgagagcattgcctccaccccaccgggcgaagaccgcaagagcccccgagtgctcatcaaaacgctggggaagctggatgggtgtttaagggtcgagttccacaatggtggcaaccccagcaaagtgcctgcagaggactgcagtgagccggtgca

SEQ ID NO: 4174 - DNA, 3112 bp, Homo sapiens
  source 1..3112: mol_type = genomic DNA
attgctggagcgcaggcggcggagaggatgactgccgctgccattctctcttgagctagcgagccgccgccaccctccaccctcccccggcagggcggagaggagcggccggagtcagcgatggtgcccggcgaggagaaccaactggtcccgaaagaggatgtgttttggagatgcagacaaaatatctttgatgaaatgaagaagaaatttttacagatagaaaatgctgctgaagaacctagagtcttatgtattatacaagatactactaattcaaagacagtgaatgaacggatcactttaaatttaccagcatctactccagtcagaaagctctttgaagatgtggccaacaaagtaggctacataaatggaacctttgacttggtgtggggaaatggaatcaatactgctgatatggcaccactggatcataccagtgacaagtcacttctcgacgctaattttgagccaggaaagaagaactttctgcatttgacagataaagatggtgaacaacctcaaatactgctggaggattccagtgctggggaagacagtgttcatgacaggtttataggtccgcttccaagagaaggttctgggggttctaccagtgattatgtcagccaaagctactcctactcatctattttgaataaatcagaaactggatatgtgggactagtaaaccaagcaatgacttgctatttgaatagccttttgcaaacactttttatgactcctgaatttaggaatgcattatataagtgggaatttgaagaatctgaagaagatccagtgacaagtattccataccaacttcaaaggctttttgttttgttacaaaccagcaaaaagagagcaattgaaaccacagatgttacaaggagctttggatgggatagtagtgaggcttggcagcagcatgatgtacaagaactatgcagagtcatgtttgatgctttggaacagaaatggaagcaaacagaacaggctgatcttataaatgagctatatcaaggcaagctgaaggactacgtgagatgtctggaatgtggttatgagggctggcgaatcgacacatatcttgatattccattggtcatccgaccttatgggtccagccaagcatttgctagtgtggaagaagcattgcatgcatttattcagccagagattctggatggcccaaatcagtatttttgtgaacgttgtaagaagaagtgtgatgcacggaagggccttcggtttttgcattttccttatctgctgaccttacagctgaaaagattcgattttgattatacaaccatgcataggattaaactgaatgatcgaatgacatttcccgaggaactagatatgagtacttttattgatgttgaagatgagaaatctcctcagactgaaagttgcactgacagtggagcagaaaatgaaggtagttgtcacagtgatcagatgagcaacgatttctccaatgatgatggtgttgatgaaggaatctgtcttgaaaccaatagtggaactgaaaagatctcaaaatctggacttgaaaagaattccttgatctatgaacttttctctgttatggttcattctgggagcgctgctggtggtcattattatgcatgtataaagtcatcagtgatgagcagtggtacagcttcaatgatcaacatgtcagcaggataacacaagaggacattaagaaaacacatggtggatcttcaggaagcagaggatattattctagtgctttcgcaagttccacaaatgcatatatgctgatctatagactgaaggatccagccagaaatgcaaaatttctagaagtggatgaatacccagaacatattaaaaacttggtgcagaaagagagagagttggaagaacaagaaaagagacaacgagaaattgagcgcaatacatgcaagataaaattattctgtttgcatcctacaaaacaagtaatgatggaaaataaattggaggttcataaggataagacattaaaggaagcagtagaaatggcttataagatgatggatttagaagaggtaatacccctggattgctgtcgccttgttaaatatgatgagtttcatgattatctagaacggtcatatgaaggagaagaagatacaccaatggggcttctactaggtggcgtcaagtcaacatatatgtttgatctgctgttggagacgagaaagcctgatcaggttttccaatcttataaacctggagaagtgatggtgaaagttcatgttgttgatctaaaggcagaatctgtagctgctcctataactgttcgtgcttacttaaatcagacagttacagaattcaaacaactgatttcaaaggccatccatttacctgctgaaacaatgagaatagtgctggaacgctgctacaatgatttgcgtcttctcagtgtctccagtaaaaccctgaaagctgaaggattttttagaagtaacaaggtgtttgttgaaagctccgagactttggattaccagatggcctttgcagactctcatttatggaaactcctggatcggcatgcaaatacaatcagattatttgttttgctacctgaacaatccccagtatcttattccaaaaggacagcataccagaaagctggaggcgattctggtaatgtggatgatgactgtgaaagagtcaaaggacctgtaggaagcctaaagtctgtggaagctattctagaagaaagcactgaaaaactcaaaagcttgtcactgcagcaacagcaggatggagataatggggacagcagcaaaagtactgagacaagtgactttgaaaacatcgaatcacctctcaatgagagggactcttcagcatcagtggataatagagaacttgaacagcatattcagacttctgatccagaaaattttcagtctgaagaacgatcagactcagatgtgaataatgacaggagtacaagttcagtggacagtgatattcttagctccagtcatagcagtgatactttgtgcaatgcagacaatgctcagatccctttggctaatggacttgactctcacagtatcacaagtagtagaagaacgaaagc

SEQ ID NO: 4175 - DNA, 1563 bp, Homo sapiens
  source 1..1563: mol_type = genomic DNA
cggtttggggggtgcgttgcccggagacggaaagtttgggagcccgagcaggctcggctgcagcctcggggagggggtccagcgggtggcggccctggggatggggaaggagcaggagctgctggaggcggcccgcaccgggcacctcccggcggtggagaagctgctgtccgggaagcggctctcctcaggctttgggggcggcggcggcggtggctctgggggcggcggcggcggcagcggcggcggcggcggcggcctcggctcttccagccaccccctctccagtctgctcagcatgtggagagggccaaatgtgaactgtgttgacagcactggctacacacccctgcaccatgctgctttgaatggccataaggatgtggtcgaggttcttctgaggaacgatgcgctgaccaacgtggctgactcaaaaggctgctaccctctgcatttggcagcctggaaaggagatgcccagatagtgcggttgctcatccatcaagggccttcacacaccagagtcaatgaacagaacaatgacaacgagacagccctgcattgtgcagcgcagtatggccacacagaggtggtgaaggtgctcttagaggagctgacggaccccaccatgcgcaacaacaaattcgagacccctttggacctggcagcactgtacgggcgactggaggtggtgaaaatgctccttaatgcacaccccaacctcctgagctgcaacactaagaagcacacccctctgcacttggcagcaaggaatggccacaaagccgtggtccaggtcctcctcgatgctggcatggacagcaactaccagacggagatgggcagtgctttgcatgaggctgctttgtttggcaagaccgatgtggtgcaaatcctgctggctgcaggaactgacgtcaacataaaagataaccatggactgactgccctagacactgttcgggaactgccttctcaaaagagccagcaaatagcagcattaattgaagatctcgacaccttgcagttttacttcatttcctgcccctttcagggcctgtgaggatgcccatgagctaccgctgtacagttctcggccccggctttcttccaagagttgaccaggaaccctaaagcatccagagtagactgcgctgccactgcgcacatgctggtgcccgtcttcctcctaaggggccaggccacatccaagtgggcctctgtcgggggcggggcggtaggtccgaaagaaaccgcagacactacgatgcactcctcaagctgtcttttgtgcttagatcatccataggtgtttcttctgcttgaagctgctatatcatctttatttattcagggtattttcatattggaagccttggctagtctgctctagctctgggttctgtttagagattggtttatttctgaatattcaagaaaggaaaatgactgggcctttctttcttttcttctcctctgggatgggtagtctccctttcctagaaaggttattataactttaaggacaggcttcaagtgggaaggcccctacttttgcacttc

SEQ ID NO: 4176 - DNA, 2352 bp, Homo sapiens
  source 1..2352: mol_type = genomic DNA
acctgcttgtgttcttgtattcagggcactggagtgcgtgccagctggtctggaagcagctccagcaagtcacttacacggtggccaggggcggcctgactttcaatccgagacccgccgggaatgactttgggataatcacaacctccggtcctcagtttccttacctgtgaaatggggctgataacgcacagctgtgggaagcaccggcccaaacgcagggcttggggacacgaccaccatccccgcccacgggtccccgcgccaggcttcgctctccacccctcccgccgcgggccccagcgcttcgccgaggtcggccccgggcgccaagaggcgtggtcggcccgagcggaccctcgcggcggccatggcgtcggtggtggaatacaagggcctcagggccggctaccactgcggctactgcgattccaaggagggcaaagcgtcctgcggcatgtgggcacattccatgacagtacaggattatcaggatctcatagaccgaggatggcgaaggtgccgacctttacaatttcagccttcaaaatctcacaagaaggttttgaaaaaaatgttgaaatttctagctaaaggggaggttcccaaaggaagttgtgaggatgagcccatggattccacaatggatgatgctgttgcgggtgactttgcattgataaataaactggatatacagtgtgatcttaaaacactcagtgatgacatcaaagagagtttagagagtgaaggaaaaaattcaaagaaagaagaacctcaggaattacttcagtcacaagatttcgtaggagagaagttgggctctggtgaaccgtcacattcagttaaagttcacacagttcctaagccaggtgagggtggtgagatcatctccaccaagttcgcagttcaaagccacacttctggagtcttaccaggtctataaacgttaccagatggttattcacaagaacccacctgatacgccaaccgaaagccagttcacaagattcctttgcagttcacccttggaggcagagactccccctaatgggccagattgtggctatggctcctttcaccagcagtactggcttgacggaaagatcattgctgtgggggtgattgacatcctcccaaactgtgtatcatctgtgtatttgtactacgatcctgattattcgtttttgtctttgggcgtctactctgcactacgagaaattgcttttactaggcagcttcatgagaaaacttctcaactcagctattattatatgggtttctacattcattcatgtcccaagatgaaatataagggtcagtatagaccttctgatttgctgtgccctgagacatatgtttgggtacccattgagcaatgcctgccttcacttgaaaactccaagtactgccgtttcaaccaggacccagaagcagtggatgaggatcgcagtacggaacctgaccgattgcaggtgtttcacaagagagccatcatgccttacggtgtttataagaaacagcagaaagacccaagtgaggaggctgctgttctgcagtacgccagcctggtggggcagaagtgctccgagcggatgctgctgttcagaaactgacctgttcacctctgccgggaagttcctgtgttgtgctgatgatttgtgccaggatacatattcagtacctgtggggaaataactgtcaccacccacaaattagacattttttattttgactatctatggcttttaaaaaatattttgtggcaatgtatctgtgagaatctcatagttaatataaagattttaaaactgcattatgacctagcccccataattgggatttatcattttggaggattctttctagagcaagatacgctcaaattctcctgtttgtattttgtaaaatgaagaagtgaatctaagtaacttaatcacagttgtgcattttttttggttctgttagagaaattaaaacagactgtttcctcaggcccattttaaactgaacttatgctaggaaaccttaagtatggggaaggtagaaagttcatttcatcacttagaaaatatgtcttctcaagaacaaaactgtgctgttacaactcagtgttcaatgtgaaattgctgccaaatgttatgtagtttaatagagaacttgaaaaaataaaacattaaaatggagcttgtgttagcatcaggtatccatttgttcaggacagtcctgttcatgtctgttgtcttggcatagttttttcccctagaatatagtactcccttttactctaaaaaatatcccagtttggacaataaaatacataattactctagttatattatttgctttacttct

SEQ ID NO: 4177 - DNA, 2106 bp, Homo sapiens
  source 1..2106: mol_type = genomic DNA
gaagaaaccttcagccaaacagcagaaggaggtagagaaggttaaaccccagtgtaaggaagttcatcagaccctgattctggacccagcacaaaggaagagactccagcagcagatgcagcagaaagagctgggaacctttgctcaaagctccatcgcccttcaccatcagtacaaccccaagtttcagaccctgttccaaccctgtaacttgatgggagctatgcagctgattgaagacttcagcacacatgtcagcattgactgcagccctcataaaactgtcaagaagactgccaatgaatttccctgtttgccaaagcaagtggcttggatcctggccacaagcaaggttttcatgtatccagagttacttccagtgtgttccctgaaggcaaagaatccccaggataagatcctcttcaccaaggctgaggacaacaagtaccttctaacctgcaagactgcccgccaactgacagtgagaatcaagaacctcaacatgaacagagctcctgacaacatcattaaattttataagaagaccaaacagctgccagtcctaggaaaatgctgtgaagagatccagccacatcagtggaagccacctatagagagagaagaacaccggctcccattctggttaaaggccagtctgccatccatccaggaagaactgcggcacatggctgatggtgctagagaggtaggaaatatgactggaaccactgagatcaactcagatcaaggcctagaaaaagacaactcagagttggggagtgaaactcggtacccactgctattgcctaagggtgtagtcctgaaactgaagccagttgccgaccgtttccccaagaaggcttggagacagaagcgttcatcagtcctgaaacccctccttatccaacccagcccctctctccagcccagcttcaaccctgggaaaacaccagcccaatcaactcattcagaagcccctccgagcaaaatggtgctccggattcctcacccaatacagccagccactgttttacagacagttccaggtgtccctccactgggggtcagtggaggtgagagttttgagtctcctgcagcactgcctgctatgccccctgaggccaggacaagcttccctctgtctgagtcccagactttgctctcttctgcccctgtgcccaaggtaatgatgccctcccctgcctcttccatgtttcgaaagccatatgtgagacggagaccctcaaaaagaaggggagccagggcctttcgctgtatcaaacctgcccctgttatccaccctgcatctgttatcttcactgttcctgctaccactgtgaagattgtgagccttggcggtggctgtaacatgatccagcctgtcaatgcggctgtggcccagagtccccagactattcccatcgccaccctcttggttaaccctacttccttcccctgtccattgaaccagccccttgtggcctcctctgtctcacccttaattgtttctggcaattctgtgaatcttcctataccatccacccctgaagataaggcccacatgaatgtggacattgcttgtgctgtggctgatggggaaaatgcctttcagggcctagaacccaaattagagccccaggaactatctcctctctctgctactgttttccccaaagtggaacatagcccagggcctccaccagtcgataaacagtgccaagaaggattgtcagagaacagtgcctatcgctggaccgttgtgaaaacagaggagggaaggcaagctctggagccgctccctcagggcatccaggagtctctaaacaactcttcccctggggatttagaggaagttgtcaagatggaacctgaagatgctacagaggaaatcagtggatttctttgagctaggagaataagagtctggagactgggagccttcacttcggcctccgattggtggcgcatagggtgtaaccaataggaaacccctaaagggtacttaaaccccagattttgcaactggggctcttgagcagcttgctttagcctgctcccactctgtggaatatacttttgcttcaataaatctgtgcttttattgct

SEQ ID NO: 4178 - DNA, 1027 bp, Homo sapiens
  source 1..1027: mol_type = genomic DNA
atggctgataaatccaaatttattgaatacattgacgaagctttagaaaaatcaaaagaaactgcactctctcatttatttttcacctatcaggggattccttaccccatcaccatgtgcacctcagaaactttccaagcgctggacaccttcgaagccagacatgatgacatcgtgctagcatcttatccaaagtgcggttcaaactggattctccacattgtcagtgaattaatatatgctgtttctaaaaaaaagtataaatatccagaattcccagttcttgaatgtggggattcagaaaaatatcagagaatgaaaggctttccatcaccaaggattttggcaactcacctccactatgacaaattacctgggtctatcttcgagaataaagccaagatattggtgatatttcgaaaccctaaagatacagcagtatcttttttgcatttccacaacgatgtccccgatattccaagctatggctcttgggatgaattcttcagacagttcatgaaaggacaagtttcttggggaaggtattttgattttgcaatcaattggaacaaacatcttgatggcgacaatgttaagttcatattatatgaagacctgaaagagaatctggctgctggaataaaacagattgctgagttcttgggattctttctaactggggagcaaattcaaactatctcagtccagagcaccttccaagccatgcgtgcgaagtctcaggacacacacggtgctgtcggcccattccttttccgcaaaggtgaagttggtgattggaaaaatttgttcagtgaaattcagaaccaggaaatggatgaaaaattcaaagagtgcttagcaggcacctccctcggagcaaagttgaagtatgaatcatattgccagggttgattccagtcaattcagcaggcctagatttattttccttaataataattaagtgtaaataattaaatgataattcaatcaaataatcaaataataattaaacaatattgaaatctaa

SEQ ID NO: 4179 - DNA, 1177 bp, Homo sapiens
  source 1..1177: mol_type = genomic DNA
gtgaccagagcggttgcgggctgagcggtttcgagccggcgtcggggagcggcggtaccgggcggctgcggggctggctcgacccagcttgaggtctcggcgtccgcgtcctgcggtgccctgggatccgccgacatgaatcccatcgtagtggtccacggcggcggagccggtcccatctccaaggatcggaaggagcgagtgcaccagggcatggtcagagccgccaccgtgggctacggcatcctccgggagggcgggagcgccgtggatgccgtagagggagctgtcgtcgccctggaagacgatcccgagttcaacgcagacacctcattgctttctgactgaccaaggcgcagcgcagtttgcagcagctatgggggttccagagattcctggagaaaaactggtgacagagagaaacaaaaagcgcctggaaaaagagaagcatgaaaaaggtgctcagaaaacagattgtcaaaaaaacttgggaaccgtgggtgctgttgccttggactgcaaagggaatgtagcctacgcaacctccacaggcggtatcgttaataaaatggtcggccgcgttggggactcaccgtgtctaggtaggaccaagggatgcctcctgccccttcccctcttctcccgccctcaggctttcctcactctctattccctgcccctctccgtttcttgctgcgttccctttctgcttttggtgcagctccaggatgtctgggagtgacaatggggttggaaggggttgttcggggtgctgccttgagagggtgtttgtatctggcgccactgtttttactagattgcatgcctttttggaacaacttggggagagaagtggagacagggatgctaacgttgcccccagtctaccctgtcgtgattctgtcttctctttagccacagtttcaggatctgcagacttacttgagtaagacttactcccgagacatgggctctgattagcaatctgagaaatctgagactgcagttgttagatctgagcagcatgaaagtgacatacttctacagacacattatagattgagatgttgtttacattaacggggaagcacgccatctcattcccaggagtgggtgagaggcagggctggggggctgtatgtttcactccgtgcagactttcacacttgtcatgcag

SEQ ID NO: 4180 - DNA, 1423 bp, Homo sapiens
  source 1..1423: mol_type = genomic DNA
gaaacgtgaagaaggtgaagatggcggtggccagggccggggtcttgggagtccagtggctgcaaagggcatcccggaacgtgatgccgctgggcgcacggacagcctcccacatgaccaaggacatgttcccggggccctatcctaggaccccagaagaacgggccgccgccgccaagaagtataatatgcgtgtggaagactacgaaccttacccggatgatggcatggggtatggcgactacccgaagctccctgaccgctcacagcatgagagagatccatggtatagctgggaccagccgggcctgaggttgaactggggtgaaccggatagaccatgaagctgaaggaacttgagcggccagctgtccaggcatggagcccagccagccaataccctttgtatctggccacaggaacatctgcccaacagctagattcctccttcagcacaaatggcacattggaaatatttgaggttgatttcagggacccttctctggacttgaaacacagaggagtcctttctgccttgagcagggcaacctcctggcttcaggggccagcgattctgaaatcttcatttgggatctgaataacttgaatgtgccaatgaccctgggatccaagtcacagcagcctccagaggacatcaaggcactgtcttggaaccggcaagcccaacacattctgtcttctgctcaccccagtggcaaggcagttgtgtgggatctcaggaagaatgaacctatcatcaaagtcagtgatcacagcaacaggatgcactgctcaggcctggcctggcatcctgacatagccacccagttagtgctgtgctcagaggatgatcgacttcccgtgattcagctgtgggacttgcgctttgcctcctcgcccttgaaggtgctggagagccacagcagggggatcttgtcagtgtcatggagccaggctgatgctgagctgctgctcactagtgctaaggacagccagatcttgtgccggaacctggggagcagtgaggtggtatataagctaccaacacagagcagctggtgctttgatgtgcagtggtgccctcgggacccttcagtgttctctgctgcctccttcaacggctggatcagtttgtactctgtgatgggtaggagctgggaagtccagcatatgagacaggctgacaaggtttgaagggcttggtagagaatgctggagggaaggggctgtctctgtttgtgggagagagacatatggcttgagaagcggagatattggagattgggagaccagggcccggggtttgggagggctgcacctttgccctagtgcccatcttcctgaaaggatgttagtttctgccacaatgtgaagaaggccttcaccttgactcttgttattggatgggccctgtagtatttca

SEQ ID NO: 4181 - DNA, 748 bp, Homo sapiens
  source 1..748: mol_type = genomic DNA
gcctgagctgagtgaggccgaggccgggaggccgtgcccggagtaaggcgaaagagaatgaaagacgtagataacctcaaaagtataaaagaagaatgggtttgtgaaacaggatctgataatcaacctcttggtaataatcaacaatcaaattgtgaatattttgttgatagcctttttgaggaagctcagaaggttagttccaaatgtgtgtctcccgctgaacagaagaaacaggtagatgtaaatataaaattatggaaaaacggattcaccgtcaacgacgatttcagaagttattccgatggtgccagtcagcagtttttgaactccatcaaaaagggggaattaccttcagaattacagggaatttttgataaagaagaggtggacgttaaagttgaagacaagaaaaatgaaatatgtttgtctacgaagcctgtgttccagcccttttcaggacagggtcacagactaggaagagtaagccatatcaaagacttcattgaaaaataccaaggatctcaaagaagtcctccgttttccctggcaacagctcttcctgtcctcaggttgctagatgagacactcacactggaagaagcagatttacagaatgctgtcatcattcagagactccaaaaaactgcatcttttagagaactttcagagcactgatttttgatagactaagtggaaaatttgcagagaaatgatggttgtaagtggacatgcaaaccaaaattgg

SEQ ID NO: 4182 - DNA, 1460 bp, Homo sapiens
  source 1..1460: mol_type = genomic DNA
attcgtcaccaggaggaagacggagctggctgcccagcccaaaggcccatgaggggatgcagttatgggctctgtcgccgtggattgttattttgtgtcattttagatgatcagagtggtaagaaaagtgtaaatgataaaaatctgaaaaagacagtggaggatgaagatcaagatagtgaggaagaaaaagataacgacagttacataaaagagagaagtgatattccttctggaacaagtaagcacttacagaaaaaagcaaagaaacaagccaaaaagcaagccaagaaccaacgaagacaacaaaaaattcaaggaaaagttcttcatttaaatgatatttgtactattgaccatcctgaagacagtgaatatgaagctgaaatgtcacttcaaggagaagtaaatattaaatccaaccatatttcacaagagggtgttatgcataaagaatattgtgtcaaccagaaagatttgaatggccaagcaaaaatgatcgaaagtgtaactgacaatcaaaaatccacagaggaagtagatatgaaaaatatcaacatggataatgatctggaggttttaacatcttctcccactaggaatttaaatggtgcctacctaacggaagggagcaatggagaagtggacatttccaatggtttcaaaaacctaaatttgaatgctgctcttcatcctgatgaaataaatatagagattctgaatgatagtcatactcctggaacaaaggtgtatgaggttgtaaatgaagatccagaaactgctttctgtactcttgcaaacagggaagttttcaatactgatgagtgttcaatccaacattgtttatatcagttcacccgtaatgagaaacttcgagatgcgaataaactgctttgtgaagtatgcacacggagacagtgtaatggaccaaaggcaaatataaaaggtgaaaggaagcatgtttacaccaatgccaaaaagcagatgctaatttctcttgctcctcctgttcttactcttcatttaaagagatttcagcaggctggttttaacctacgcaaagttaacaaacacataaagtttccggaaatcttagatttggctcctttttgcacccttaaatgtaagaatgttgcagaagaaaatacaagggtactctattccttatatggagttgttgaacacagtggtactatgaggtcggggcattacactgcctatgccaaggcaagaaccgcaaatagtcatctctctaatcttgttcttcacggtgatattccacaagattttgaaatggaatcaaaagggcagtggtttcacatcagcgacacacatgtgcaagctgtgcctacaactaaagtactaaactcacaagcgtacctcctattttatgagagaatactgtaataatatcaaaagcactttttctggaaacacatttatggcttttataatggctg

SEQ ID NO: 4183 - DNA, 3328 bp, Homo sapiens
  source 1..3328: mol_type = genomic DNA
gagccgcggtcacgcgcccgcccgaaggctcctgtcgggacagggcgccgccccgtgtcggcccccgcagagctcgcggcccccgcctgtccgggcgccgccatggagcgcatcgagggggcgtccgtgggccgctgcgccgcctcaccctacctgcggccgctcacgctgcattaccgccagaatggtgcccagaagtcctgggacttcatgaagacgcatgacagcgtgaccgttctcttattcaactcttctcggaggagcctggtgttggtgaagcagttccggccagctgtgtatgcgggtgaggtggagcgccgcttcccagggtccctagcagctgtagaccaggacgggcctcgggagctacagccagccctgcccggctcagcgggggtgacagttgagctgtgtgccggcctcgtggaccagcctgggctctcgctggaggaagtggcttgcaaggaggcttgggaggagtgtggctaccacttggccccctctgatctgcgccgggtcgccacatactgggacgctacgatgggctcctgaccccagctgaggtcttggggaaggaggagggtgtcacagacccccacccccaccagctgagcaccagcctccacagcctcctccagaggccagggcccgctccactgggagaagcaccggaagtctctgcacctgtcagcctggcacatgggccactcagggttgagcctggggccctcccacctcagcagcctcaaggacttcacctgggcacgttcctggctggatgggtggactcccaagttaaaggcagcatttccacgctgggccaggcacggtggctcacgcctgtaatcccagcactttgggaggccgaggcaggcggatcacctgaggtcaggagttcgagaccagcctgaccacatggagaaaccccgcctctgctaaaagtacaaaattagccaggcgtggtggcaggagcctgtaattccagctactcaggagactgaggcaggagaatcgcttgaacccaggaggcggaggttgcggtgagccgagatcgcgccattgcactctagcctgggcaacaagagcgaaactctgtctcaacaaaacagaatttccatgccgaagggtggacttgggtgtgaaggatgggccttggttttctgcaggtgtctaccccgtggtgggccacgcccactgtgcccccagctccccagcccatagtactgagcacagccgggaggcatgggaggggctggagtccccttggtccccctggaggaggtgggcctgggcaggttcctggcagagggaccgcacaggctctcagggcaagtggtcaagcagccctggccgcggtggttctactggtacagcctctgggccacagcctgattgtgagggtgctggggagccaaggagggctctgggaagtaggcatcctgcttagactcgcatcgggaagagcaggccgtggcttcagggatgcaggactggagatgctgctgactaggggtcagggtgtccgtctctgagggcctgatggggggctggactgacagcaaagttcacccaccctgtggcagggcccgtggctccctgtctctgattctggaggtgagccaggcctcttacctgccgctgcaaaggacaaggcccagggaggcagtcagcttggggcgtgatggagtgaagttggaacgtgccctggggtgggggaggcgttgcccagcctggctggcagattcctctcagcccgggccaagggccgggcctgtctccttcacaagccggcggaaaccggggctggaaaccccagacccgccacttccctcagaggcgcagccgcggccgccgccggaaatgggccatcaggaaggggtctgcgggaggtgaggggctagagggcaaggaagcagctgggtaaggtcggtctggggtgagtccccccggaggtggggaggccttgggggtggggcatggaagcccccagttctgtccctgcccctgtatgttgggtacatctcagagggcggcctctaccctgcaggcctccggctggccttggttcatggcacccgacagcccctcctgcggcgagccagggctcccccaccccctggtcatcttcccagatgcccctcagtcccgtttctccccagatccacacctggccctccccctcctgttccagaatgcagcccagcccctctgccatcctgtcctcctagcccgtggtctccctccacacacgccagtccaggctccttcccttggtgcctgacccctcctggctgccagcagcccccttctggccactgcccactgagggagggggcttcctcttacccctccccagcctgggccactgggcctggtactgaggacctcgctgccaccccaccccactctgccatgctacggggggtgggggggcggtcagtgcatgctgttcctagtctgaaacttgtgtcctgtgggtgcctggtggggaacccttgcgggaaggcctggtgggtttgtccctgcttcccagccagcctgtgtccccgggtatgggctggggtctggcatgggcctctgcagctggccacagactgaggggctccaaacagcactgggaacagcctcagggtatctggttgggggctgcagacaggggtggggtcttctgcttggccttgacaggttgcaggcaggttgtcagccggatctgcaatctcatgggggcttggggtcttcccggctcacgaggttatggcagaattcagctcctggtggctggggactgggtcccacctccctgctggctgttggcccttcccagcatggcggttgcttccccttcagggccagcaggactggcctgaatttctccctttctggcgttgaaacaccctctggagggcttcgtgatcgggccatgcccgcctaggatgctctcccttctgatgagctcaagtcaccggttagggtccttaatcacatcgacaacacccaccccacctggtctggagtgggactgactggctccagacagaccatgttctacacagaggtgacagatgcccagcgtagcggtccaggtgggggcctggtggaggagggtgagctcattgaggtggtgcacctgcccctggaaggcgcccaggcctttgcagacgacccggacatccccaagaccctcggcgtcatctttggtgtctcatggttcctcagccaggtggcccccaacctggatctccagtgagactccagggttctagacagaggccagtcttggccactcaccccacaccccgcggaccccaataaaggcttgcatagctcc

SEQ ID NO: 4184 - DNA, 982 bp, Homo sapiens
  source 1..982: mol_type = genomic DNA
agaccttgaatcgaaacccaggctcctgcaggcactggcacagctacagcgagggcctcggccatccaagggtctcccagcagccttggaagtggagtttactctccccttgaggaagctgaaggtcagaaagggagagacgattgcctgaggtcacacagctgatggacagtagagctgggttatgaactcgaatgcatctgagcatacagggatgctgagaacttgctggagtcacagccactgggatcctttctcatcagggtcagtcacagccatgtgggctacacactctcctacaagtaaggcctgggccgggatccagggcaggggcaggtgggctcttgggtttccttggagggggcaaggggtgcttcatgtcatagcttctcagaaagcagcagtaactgaggctgtggatctgagaacgggagctgctagccaagcaatgagtgaagcttttgtccgtagtggcatgttttatctgaggccagcctttgtactcctgtgttataaatgggggaaactgaggcacagcgaggttagtaacctgctgggtgttgcatggccagtgagtgaagaagcctgcatgggaacctggggtagtctggctgtagcagtgacgctgccggcccaagggctggggacttggggcagggatgagggggagtaggatgtcccagcccccgcagtgtctccgcagagcccaaagcagctgctgccatttcatggtgaagctcttggatgatgggactttcatgatccccggggagaaggtggcccacacctcgctggacgccctggtcaccttccaccagcagaagccaattgagccgcgcagggagctgctgacacagccctgcaggcagaaggatcccgcaaacgtggattacgaggatctcttcctctactccaacgcagtggccgaggaagctgcctgcccggtgtctgcccctgaggagacggagtcttgctttgtcga

SEQ ID NO: 4185 - DNA, 1607 bp, Homo sapiens
  source 1..1607: mol_type = genomic DNA
gaggtgggggcgggggccttaccccaccctggcaccggcaggcgcgggcggatggggggatgtcgcctagagccccccggccggcccacaaactcccgtcccccttccggctctgcctggacgtccctgcgggccccgggggaaagcacccaacttctcccgcctcggcttctagcagaaacgtgacggggctggactttgatcgccgagggctctctgctcttcagagtctgcttggaacgggataagagggatggtgccatccagggaagctctgctgggaccaggcacaactgccattaggtgccccaagaaattacagaaccaaaattacaagggccatggattgtcaaagggaaaagagcgagagcagagagcatcgatccggttcaagaccaccctcatgaacacactcatggacgtccttcgccacaggccaggatgggtggaagtgaaggacgaaggggagtgggatttctactggtgtgacgtcagctggctccgggagaacttcgaccacacctacatggatgaacatgtgcggatcagtcacttccggaaccactatgagctgacccggaagaactacatggtgaagaacctgaagcggttccggaagcagctggagcgtgaggcaggaaagctggaggcagccaagtgtgacttcttccccaaaacctttgagatgccttgcgagtaccacctgtttgtagaggagtttcgcaaaaacccaggaatcacctggatcatgaagcctgtagcccggtctcaagggaaaggcatcttcctcttccgtaggctgaaggacatcgtggactggaggaaggacacaagaagctctgacgaccagaaagatgatattcccgtggagaactatgtggctcagcgttacattgaaaatccttacctgataggaggccgcaagtttgacctgcgtgtctatgtgctggtgatgtcggtgtttgctgaatgcctgctgtggtctgggcacaggagacaggatgttcacctcaccaacgtggctgtgcaaaaaacatctcccgactaccacccaaagaagggctgcaagtggacgctgcagcgcttccggcagtacctggcgtccaaacacgggcccgaggcagtggagacactcttcagggacatcgacaacatctttgtcaaaagcctgcagagtgtgcagaaggtgatcatcagtgacaagcactgcttcgagctgtacggctatgacatcctcatcgaccaggacctcaagccgtggctcctggaggtcaatgcgtccccatcactgacagccagcagccaggaagactatgagctcaagacctgcctcctggaagacaccctgcatgttgtggacatggaagcgaggctcacgggaagggagaagcgagtcgggggctttgacctcatgtggaatgatggccctgttagcagagaggagggggctcctgacctgtcgggaatgggaaactttgtgaccaacacacatctcggctgcgtcaacgatcggaagaaacaactgaggcagctcttctgctcccttcaagttcagaagaaagcttccagttgatccccagctgccaggaggaaatcagccttagcag

SEQ ID NO: 4186 - DNA, 1173 bp, Homo sapiens
  source 1..1173: mol_type = genomic DNA
aagttaaggaggggagggggtggagggaaaagcaagccaggaggtgcttgcggccgcttctagtagtttccaggcgctgccgggcggctggcactaagcggtcctgaggctgtggctacggctgctccggagctggtggcgccgcgataggagagccgatggccaagtggggtgagggagacccacgctggatcgtggaggagcgggcggacgccaccaacgtcaacaactggcactggacggagagagatgcttcaaattggtccacggataagctgaaaacactgttcctggcagtgcaggttcaaaatgaagaaggcaagtgtgaggtgacggaagtgagtaagcttgatggagaggcatccattaacaatcgcaaagggaaacttatcttcttttatgaatggagcgtcaaactaaactggacaggtacttctaagtcaggagtacaatacaaaggacatgtggagatccccaatttgtctgatgaaaacagcgtggatgaagtggagattagtgtgagccttgccaaagatgagcctgacacaaatctcgtggccttaatgaaggaagaaggggtgaaacttctaagagaagcaatgggaatttacatcagcaccctcaaaacagagttcacccagggcatgatcttacctacaatgaatggagagtcagtagacccagtggggcagccagcactgaaaactgaggagcgcaaggctaagcctgctccttcaaaaacccaggccagacctgttggagtcaaaatccccacttgtaagatcactcttaaggaaaccttcctgacgtcaccagaggagctctatagagtgtttaccacccaagagctggtgcaggcctttacccatgctcctgcaacattagaagcagacagaggtggaaagttccacatggtagatggcaacgtctctggggaatttactgatctggtccctgagaaacatattgtgatgaagtggaggtttaaatcttggccagaggggtctcactgtcactcaggctagagtgcagtggcataatcacagcaaactgcagccttaacctcccagacccaaacgatcctcctgcttcagcttcccaagtagctgagactacgtgtgccaccatgccagcttttttttttttttttttttttttacttttttacttttt

SEQ ID NO: 4187 - DNA, 2059 bp, Homo sapiens
  source 1..2059: mol_type = genomic DNA
aaagtttacgggatgtaggcggcggcggcggtagtggtagcggttattcggcggcccgcggcggaccatggccctggccctggcccggcgtcgctgggctttcctcacggcgtccccgagcagcgtcgcagagcgggccgacttccgggaaggaactgaccagcgactgagcggcggccggcgcgcttagcgccctgaacatgcggcagtccctgcgggcgaccccgggctccggacaggcggcggcggaggcggcggctcgggagggaaggaggcggcggcgccggcggaggtggcggcggaggtgcaggggaagtacgtgaagaaggagacgtcgcctctgcttcggaatcttatgccttcattcatccggcatggtccaacaattccaagacgaactgatatctgtcttccagattcaagccctaatgccttttcaacttctggagatgtagtttcaagaaaccagagtttccttagaactccaattcaaagaacacctcatgaaataatgagaagagaaagcaacagattatctgcaccttcttatcttgccagaagtctagcagatgtccctagagagtatggttcttctcagtcatttgtaacggaagttagttttgctgttgaaaatggagactctggttcccgatattattattcagacaatttttttgatggtcagagaaagcggccacttggagatcgtgcacatgaagactacagatattatgaatacaaccatgatctcttccaaagaatgccacagaatcaggggaggcatgcttcaggtattgggagagttgctgctacatctttaggaaatttgactaaccatggttctgaagatttaccccttcctcctggctggtctgtggactggacaatgagagggagaaaatattatatagatcataacacaaatacaactcactggagccatcctcttgagcgagaaggacttcctcctggatgggaacgagttgagtcatccgaatttggaacctattatgtagatcacacaaataagaaggcccaatacaggcatccctgtgctcctagtgtacctcggtatgatcaaccacctcctgtcacataccagccacagcaaactgaaagaaatcagtcccttctggtacctgcaaatccatatcatactgcagaaattcctgactggcttcaggtttacgcacgagcccctgtgaaatatgaccacattctgaagtgggaactcttccagctggctgacctggatacataccagggaatgctaaagttgctcttcatgaaagaattggagcagattgttaaaatgtatgaagcatacagacaagcccttcttacagagttggaaaaccgaaagcagagacagcagtggtatgcccaacaacatggaaaaaatttttgagctgattttttaaaaatttaagttttgtaagagctttaaaatattttcacagataaaaaattgcaaacaagtactctggttaataaatgctgcttcctttgtggaaattataaaattctaactttacatgtattttgttattagaaattttcttttattgaatgagaaaaattagtctatcattttaagagccaatatggcaaacactttcaaatactgtatattaggaaactgttttggtattcttgatggaaaaaaacgcagcggaaatgtcattatgaacagatgttaaataggaaattattacttgttaacttcttacagcagtagtaccttctttaaaaaaaaaaaagaatctgcggtatttttttaaaaaaaaagtttaccgctgtagtgtgaaatattgtctggaaagggatggtttaaatattaccatgatgtagttgaaatataaaataggatttggaaccttattgtgataaatatttatatatgatgtatgtttgtctcccctctccaaagtaaggaacccagctgggcgtggtggctcactcctgtaatcccagcattttgggaggccgaggtgggtggaccgcttgagtccacgagtttaagaccagcctgggcaacatggtgaagccccatctctac

SEQ ID NO: 4188 - DNA, 996 bp, Homo sapiens
  source 1..996: mol_type = genomic DNA
aggctggtctatttgacagctgtgaccccagacaactttctgtctcccgaagcctgagtttttttcactagaagaaggcggaataataataataactacaagtctaggaaaacccagaagagaaactctttattgttcataaggctatcacagatctttctctccaagaaactagtgctgatgaaatgacattcagagaagggcatcagtgggagaagattcctctgagtggcagtaaccaggaaataagaagacagaaggagaggattactgagcagcctctcaaagaggaagaagatgaggacaggaagaacaaaggtcaccaggcagctgaaattgaatggctgggatttcgaaaacctagccaagctgacatgttacattctaaacatgatgaggagcagaaggtttgggatgaagaaattgatgatgatgatgatgataattgcaataatgatgaagatgaagttcgagtgatagaatttaagaaaaaacatgaagaggtttctcaatttaaagaggaaggtgatgcaagtgaggactccccactgagcagtgccagttcccaagctgtgacacctgatgagcagccaaccttagggaagaagagtgatatctccagaaatgcttattccagatacaatacaatatcctatcggaaaatcagaaagggaaataccaagcaaagaattgatgaattcgagtctatgatgcatttataaactaactggaactgagaaattctcatgcccactaaaggaaaagctaattctattgccccagggtgcatatttctatgccttatttgagttatcacttggagggaggtggaagttgactctctttttcactgtagaataatgtggaaataaccctagataaaaattcagtctgataacctcaaatcaaaaagctttaaataaattcttgggcatttatcttttaaaacttcactaatatagcattgtgtgataagcactaagcagtcagtcccct

SEQ ID NO: 4189 - DNA, 549 bp, Homo sapiens
  source 1..549: mol_type = genomic DNA
attgtgtgctgggctgagcctcccttcacatggtcacatccccattttaatccaatactccctttccctaccccttccccagtcctgcctctttctgtggcacttattgctggtttccctgagctcctgtttccactttgtgttttttgtggggcccaggaagctaaagctgtgtgtatttgtggatcagacaagtgcagcaagttaatatcattggcttctgaaggggagagtgaggtgatggctgcgtttaagttggatttccttccagaaatgatggtggatcattgctctttgaattccagtcccgtctcaaagaaaatgaacggcaccctggaccacccagaccaaccagatcttgatgctatcaagatgtttgtgggccaggttccaaggacctggtctgaaaaggacttgcgggaactcttcgaacagtatggtgctgtgtatgaaatcaacgtcctaagggataggagccaaaacccgcctcagagcaaagggtgctgttttgttacattttacacccgtaaagctgcattagaagctcag

SEQ ID NO: 4190 - DNA, 2256 bp, Homo sapiens
  source 1..2256: mol_type = genomic DNA
aggcgagctgacaaaagggcggcgcgcgtctgaaccgccattggggcccacagctcccttaggactagctctggatcctcccggcgggccccagtgcagagagcccacggccatccagtgcctacaatggggacctcaatggacttctggtcccagacccgctctgctcaggtgatagtacctcagcaaacaagactggtcttcggaccatgccacccattaacctgcaagagaagcaggtcatctgtctctcaggagatgatagctccacctgcattgggattttggccaaggaggtggagattgtggctagcagtgactctagcatttcaagcaaggcccggggaagcaacaaggtgaaaattcagcctgtcgccaagtatgactgggaacagaagtactactatggcaacctgattgctgtgtctaactccttcttggcctatgccattcgggctgccaacaatggctctgccatggtgcgggtgatcagcgtcagcacttcggagcggaccttgctcaagggcttcacaggcagtgtggctgatctggctttcgcgcacctcaactctccacagctggcctgcctggatgaggcaggcaacctgttcgtgtggcgcttggctctggttaatggcaaaattcaagaagagatcttggtccatattcggcagccagagggcacgccactgaaccactttcgcaggatcatctggtgccccttcatccctgaggagagcgaagactgctgtgaggagagcagcccaacagtggccctgctgcatgaagaccgggctgaggtgtgggacctggacatgctccgctccagccacagtacctggcctgtggatgttagccagatcaagcagggcttcattgtggtaaaaggtcatagcacgtgcctcagtgaaggagccctctctcctgatgggactgtgctggctactgcgagccacgatggctatgtcaagttctggcagatctacattgaggggcaagatgagccaaggtgtctgcacgagtggaaacctcatgatgggcggcccctctcctgcctcctgttctgtgacaaccataagaaacaagaccctgatgtccctttctggaggttccttattactggtgctgaccagaaccgagagttaaagatgtggtgtacagtatcctggacctgcctgcagactattcgcttctccccagatatcttcagctcagtgagtgtgccccctagcctcaaggtttgcttggacctctcagcagaatacctgattctcagcgatgtgcaacggaaggtcctctatgtgatggagctgctgcaaaaccaggaggagggccacgcctgcttcagctccatctcggagttcctgctcacccaccctgtgctgagctttggtatccaggttgtgagtcgctgccggctacggcacactgaggtgctgcctgccgaagaggaaaatgacagcctgggtgctgatggtacccatggagccggtgccatggagtctgcggccggtgtgctcatcaagctcttttgtgtgcatactaaggcactgcaagatgtgcagatccgcttccagccacagctgaaccctgatgtggtggccccactgcccacccacactgcccacgaggacttcacatttggagagtctcggcccgaactgggctctgagggcctggggtcagccgctcacggctcccagcctgacctccgacgaatcgtggagctgcctgcacctgccgacttcctcagtctgagcagtgagaccaagcccaagttgatgacacctgacgccttcatgacacctagcgcctccttgcagcagatcactgcctctcccagcagcagcagcagcggtagcagcagcagcagcagcagtagcagcagctcccttacagctgtgtctgccatgagcagcacctcagctgtggacccctccttgaccaggccacctgaggagctgaccttgagccccaagctgcagctggatggcagcctgacaatgagcagcagtggcagccttcaggcaagcccgcgtggcctcctgcctggcctgctcccagccccagctgacaaactgactcccaaggggccgggccaggtgtgtgactgggtgtgtgtgtgaagtgtggggagcaggtgggcagcagcagggaaggtgggtggtgggctcctcccagccccctgctgctgatcctgctctacccgacatggtccgtgtttccctgaggtcatttcaccctcctgtgtttcct

SEQ ID NO: 4191 - DNA, 1322 bp, Homo sapiens
  source 1..1322: mol_type = genomic DNA
gttctcctccgtcctctctcggttccccttgattcctgcggggtccagggacccggacagcttggggacgtccgcagagcctgggtggctttttctcaagtatattttccagtctgtttggaactcgggaaatgagaattttaattttgggattagatggagcaggaaaaaccacaattttgtacagattacaagtgggagaagttgttactactatacctaccattggatttaatgtagagacggtgacgtacaaaaaccttaaattccaagtctgggatttaggaggacagacaagtatcaggccatactggagatgttactattcaaacacagatgcagtcatttatgtagtagacagttgtgaccgagaccgaattggcatttccaaatcagagttagttgccatgttggaggaagaagagctgagaaaagccattttagtggtgtttgcaaataaacaggacatggaacaggccatgacttcctcagagatggcaaattcacttgggttacctgccttgaaggaccgaaaatggcagatattcaaaacgtcagcaaccaaaggcaccggccttgatgaggcaatggaatggttagttgaaacattaaaaagcagacagtaattcagtccattcttctcccctgaaatgaagactacatcacctctctccctttggaaacagtcaagtgtacttcacactactagatgttaaaactatatgattattggcatatactgactgactgcaatatttgtagtaaatagggaaaataagtatttagttggagggataatttgatcgaatcacctgaatgttctatgtaatgtaaaatattcttttcttgctttcttgtgttaaggtatatattctatttgtatggaattcttattcaaatacagttctattaaagagtatactcctattggatgaaaaaaacctatttttgaatagtagttgcagcttgtttgtataaatactaaaaaatatcttaacagatttttttccccttaaaatgaattatctttccaaagattagactcagtatgagagtaggtgaggaacatagtttgtgtaatataatctttatttgcttacctgaccactttttattaagctgttttgtttaaaagcttttggttataggcatgaatattgttttgatggttaacttcactgacttatctgtaagtgtcattttatagtactttacagttgtcaaaaaaaatcttacatatattgatctagttgatcggtagaggaagcttgtgaagtaggtaggacaggttatgatgtcttcactgtatggacgtgaaccca

SEQ ID NO: 4192 - DNA, 2553 bp, Homo sapiens
  source 1..2553: mol_type = genomic DNA
accgaaggtgaggctggtgggtcccgcgggcgcggagaaggcgggtgacggtgtgaccctctttagctctcatggattgggagctgggaaaggaatgagaagacagaagtcagagacaagaagaggctaacatgactgataccactataatttagtgaactgcctcttttctaaagaggactccaaaggaaggactggtcatctctttcatatctcaaaaccatggctcagggatcagtgtctttcaatgatgtgactgtggacttcactcaggaggagtggcagcacctggatcatgctcagaagactctatatatggatgtgatgttggaaaactattgccacctcatctctgtggggtgtcacatgaccaaacctgatgtgatcctcaagttggaacgaggagaagagccatggacatcatttgcaggtcatacctgcttggaagaaaactggaaagctgaagactttttagtgaaattcaaggaacaccaagagaagtattctagatcagttgtaagcatcaaccacaaaaaactggtgaaggagaagagtaaaatatatgaaaagacatttactctaggcaaaaaccctgtgaattcaaaaaatctacctcctgaatatgatactcatggaaggattttgaaaaatgtttcagaattaatcatcagtaatctaaatcctgcaagaaagagacttagtgagtataatggatatgggaaatcactcctgagtactaaacaagagactactcatcctgaagtcaaatcccataatcaaagtgccagagctttcagtcataatgaagttcttatgcagtatcagaaaacggaaactccagcacagtcatttggatataatgactgtgagaaatcattccttcaaaggggaggcctgattacacatagtagaccttacaaaggagaaaacccatctgtatataataaaaaaagaagagcaaccaatattgaaaaaaaacatacatgcaatgaatgtgggaaatctttctgcaggaaatcagtattgattctgcatcagggaattcactcagaagaaaaaccctatcaatgtcatcaatgtggaaatgcatttagaaggaaatcatatctcattgatcatcagagaactcacacaggagagaaaccctttgtttgcaatgaatgtggtaagtccttccgcctcaagacagccctcactgatcatcagagaacacacacaggggagaaatcgtatgaatgtctgcaatgtaggaatgccttcagattgaagtcacacctcattcgtcatcagagaactcacacgggagagaaaccatatgagtgtaatgactgtgggaagtccttccgccagaagacaacactctctctacatcagagaatccatacaggtgagaaaccctacatttgtaaagaatgtgggaagtcctttcaccagaaggcaaatcttactgtacatcagagaactcatacaggggaaaagccctatatttgtaatgaatgtgggaaatccttctcccagaagacaacccttgctcttcatgagaaaactcataatgaggagaaaccctatatttgtagtgaatgtggaaagtccttccgccagaagacaacccttgtagcacatcagagaacacatacaggggagaaatcttatgaatgtcctcactgtgggaaggcctttagaatgaagtcatacctcattgatcatcaccgaactcacacaggagagaaaccatatgaatgtaatgaatgtggtaaatcattcagtcaaaagacaaatctcaatctacatcagagaattcatacaggggagaaaccctatgtttgtaatgaatgtgggaagtcctttcgccagaaagcaaccctcactgtacatcagaaaatacataccggccagaaatcctatgaatgtcctcagtgtgggaaagcctttagcaggaagtcatatctcattcatcatcaaagaactcatacgggagagaaaccatataaatgtagtgaatgtggaaagtgcttccgccagaagacaaatcttattgtacatcagagaactcacacaggtgagaaaccctatgtttgtaatgagtgtggtaagtctttcagttataagagaaacctcattgtccatcaaagaactcacaagggagaaaacattgaaatgcaataaatgatgtggtttcttatatgaattctttacaagctgttgtaaacatttagttttaaaaagaaaagcatgctgaaacatgttaatgtaattttaaatcacaagtctaataattattaaagtaccatacggaataactgtctactgtttactagcatataaaataagtatgatcattattattgaactctatcagctatgaagctaaattttaaagtcaactgctcttcctactgactcaaatagtttattttttaaaaatacttatataatacatgcagagacaagatacacaatgattataagtattaatctccataagagaaaatatttatgaactatatttctcattgcactctgtaataaaaagcagttagttgttacttacct

SEQ ID NO: 4193 - DNA, 4332 bp, Homo sapiens
  source 1..4332: mol_type = genomic DNA
aacagccgcctccagccaagagagagaaaaaaactataagaattcgggatccaaaccagggaggtaaagacataacagaggagattatgtctggaggtggcagcagaaatcctactccacccataggaagacccacgtccacacctactcctcctcagaggagaagccaaaaccagatccagtgttaaagtctccttccccagtccttaggctagtcctcagtggagagaagaaagaacaagaaggccagacatctgaaactactgcaatagtatccatagcagagcttcctctgcctccatcacctaccactgtttcttctgttgctcgaagtacaattgcagcccccacctcttctgctcttagtagccaaccaatattcaccactgctatagatgacagatgtgaactctcatccccaagagaagacacaattcctatacccagcctcacatcttgcacagaaacatcagaccctttaccaacaaatgaaaatgatgatgatatatgcaagaaaccctgtagtgtagcacctaatgatattccactggtttctagtactaacctaattaatgaaataaatggagttagcgaaaaattatcagccacggagagcattgtggaaatagtaaaacaggaagtattgccattgactcttgaattggagattctcgaaaatcccccagaagaaatgaaactggagtgtatcccagctcccatcaccccttccacagttccttcctttcctccaactcctccaactcctccagcttctcctcctcacactccagtcattgttcctgctgctgccactactgttagttctccgagtgctgccatcacagtccagagagtcctagaggaggacgagagcataagaacttgccttagtgaagatgcaaaagagattcagaacaaaatagaggtagaagcagatgggcaaacagaagagattttggattctcaaaacttaaattcaagaaggagccctgtcccagctcaaatagctataactgtaccaaagacatggaagaaaccaaaagatcggacccgaaccactgaagagatgttagaggcagaattggagcttaaagctgaagaggagctttccattgacaaagtacttgaatctgaacaagataaaatgagccaggggtttcatcctgaaagagacccctctgacctaaaaaaagtgaaagctgtggaagaaaatggagaagaagctgagccagtacgtaatggtgctgagagtgtttctgagggtgaaggaatagatgctaattcaggctccacagatagttctggtgatggggttacatttccatttaaaccagaatcctggaagcctactgatactgaaggtaagaagcagtatgacagggagtttctgctggacttccagttcatgcctgcctgtatacaaaaaccagagggcctgcctcctatcagtgatgtggttcttgacaagatcaaccaacccaaattgccaatgcgaactctggatcctcgaattttgcctcgaggaccagactttacaccagcctttgctgattttggaaggcagacacctggtggaagaggcgtacctttgttgaatgttgggtcacgaagatctcaacctggccaaagaagagaacccagaaagatcatcacagtttctgtaaaagaagatgtacacctgaaaaaggcagaaaatgcctggaagccaagccaaaaacgagacagccaagccgatgatcccgaaaacattaaaacccaggagctttttagaaaagttcgaagtatcttaaataaattgacaccacagatgttcaatcaactgatgaagcaagtgtcaggacttactgttgacacagaggagcggctgaaaggagttattgacctggtctttgagaaggctattgatgaacccagtttctctgtggcttacgcaaacatgtgtcgatgtctagtaacgctgaaagtacccatggcagacaagcctggtaacacagtgaatttccggaagctgctactgaaccgttgccagaaggagtttgaaaaagataaagcagatgatgatgtctttgagaagaagcagaaagaacttgaggctgccagtgctccagaggagaggacaaggcttcatgatgaactggaagaagccaaggacaaagcccggcggagatccattggcaacatcaagtttattggagaactctttaaactcaaaatgctgactgaagccatcatgcatgactgtgtggtgaagctgctaaagaaccatgatgaagaatccctggagtgcctgtgtcgcctgctcaccaccattggcaaagacttggactttgaaaaagcaaagccacgtatggaccagtactttaatcagatggagaaaattgtgaaagaaagaaaaacctcatctaggattcggttcatgcttcaagatgttatagacctaaggctgtgcaattgggtatctcgaagagcagatcaagggcctaaaactatcgaacagattcacaaagaggctaaaatagaagaacaagaagagcaaaggaaggtccagcaactcatgaccaaagagaagagaagaccaggtgtccagagagtggacgaaggtgggtggaacactgtacaaggggccaagaacagtcgggtactggacccctcaaaattcctaaaaatcactaagcctacaattgatgaaaaaattcagctggtacctaaagcacagctaggcagctggggaaaaggcagcagtggtggagcaaaggcaagtgagactgatgccttacggtcaagtgcttccagtttaaacagattctctgccctgcaacctccagcaccctcagggtccacgccatccacgcctgtagagtttgattcccgaaggaccttaactagtcgtggaagtatgggcagggagaagaatgacaagccccttccatctgcaacagctcggccaaatactttcatgaggggtggcagcagtaaagacctgctagacaatcagtctcaagaagagcagcggagagagatgctggagaccgtgaagcagctcacaggaggtgtggatgtggagaggaacagcactgaggctgagcgaaataaaacaagggagtcagcaaaaccagaaatttcagcaatgtcagctcatgacaaggctgcattatcagaagaggaactggagaggaagtcgaaatctatcattgatgaatttctacacattaatgattttaaggaagccatgcagtgtgtggaagagctgaatgcccagggcctactacatgtttttgtgagagtgggagtggagtccaccctggaaaggagccagatcaccagggatcacatgggccaattactctatcagctggtacagtcagaaaaactcagcaaacaggactttttcaaaggtttttcagaaactttggaattggcagatgacatggccattgatattccccatatttggttgtaccttgctgaactggtgacccccatgttaaaagaaggtggaatctccatgagagaacttaccatagaatttagcaaacctttacttcctgttggaagagctggggtcttgctatctgaaatattgcacctactatgcaaacaaatgagccataagaaagtgggagccttatggagggaggctgacctcagctggaaggactttttaccagaaggagaagatgtacataattttcttttggagcagaagttggacttcatagagtctgacagtccctgttcctctgaagcactttcaaagaaagaactgtctgccgaagagctgtataagcgactcgagaaactcattattgaggacaaagcgaatgatgaacagatctttgactgggtagaggctaatctagacgaaatccagatgagttcacctacattccttagagctttaatgactgctgtttgtaaagcagctattatagccgactcttctaccttcagagtggacactgctgttatcaagcagagagtgccgatcttactcaagtacctagactcagatacagagaaggaactgcaagcactttatgcactacaagcatcgatagtaaaacttgatcaacctgccaatttgctgcggatgttttttgattgtctatatgacgaggaggtgatctccgaggatgccttctacaaatgggagagcagcaaggaccctgcagagcagaatgggaagggcgtggctctgaaatctgtcacggcattcttcacgtggctgcgggaagcagaagaggagtctgaggataactaaaacttcaaatacacaaaatgaaacaaaagaaacaatttaagtatttttttaaaaagtttcacgtcttcgcc

SEQ ID NO: 4194 - DNA, 1623 bp, Homo sapiens
  source 1..1623: mol_type = genomic DNA
gcatgatgggggaggcggccgtggccgcggggccttgtccgttgcgcgaggacagcttcacgcgcttctcgtcgcagagcaatgtgtacgggctggcaggcggcgccggcgggcgcggggagctgctggccgccacccttaaaggcaaggtgctcggcttccgctaccaagacctccgacagaaaatccggccagtggccaaggagctgcagttcaactacattcccgtggatgcggagattgtctccatcgacactttcaacaagtcaccccccaagcggggtctggttgtggggatcacgttcatcaaggattcaggggacaagggcagccccttcctgaacatttactgcgactacgagcccggctctgagtacaaccttgactctattgcccagagctgcctgaacctggagctccagttcactccgttccagctgtgccatgcggagtgagtgtcccctgcgcatcgacgcccactccactatggtgggttggatttggtctgcaggtcataacttggccaacctctggtctaacagggtccaggtcggggatcaacttgagactgtgtttctcttgagtgggaacgacccggccattcatctctacaaggagaacgaggggctgcatcagtttgaggaacagcccgtggaaaacctcttcccagagctgacgaacctgaccacgtcctctggctggacgtccacaacttccccggcacgtcccggcgcctctcagctctgggctgtcagagtggttatgtccgtgtcgcccacgtggaccagcggagtcgagaggttctgcagatgtggtcggtcctgcaggacggtcccatctcccgagtgattgtgttcagcctctcggccgccaaggagaccaaggacaggccactacaagatgagtacagcgtgctcgtggccagcatgttggagccagcagtggtgtatcgggacctgctgaaccggggtcttgaagaccagcttctcctgcccggcagtgaccagtttgacagcgtcctctgcagcctggtcaccgatgtggatttggatgggcggccagaagtcctggtggccacctatggacaggaactgctgtgttataagtaccggggcccagagtcggggcttcctgaggcccagcacgggttccatctgctgtggcagcggagcttctccagtcccctgctggccatggctcacgtggacctgaccggggatgggctgcaggagcttgccgtggtctccctgaagggcgtgcacatcctgcagcacagcctgattcaggcctcagagctggtcttgacccggcttcgacatcaagtggagcagaggagacgtcggctacaggggttggaggacggggcaggtgcagggcctgctgagaatgcagcctcttaagcacccatgcacccactcttcccagacctggggcgactcatggcgtgctcacctccagccgctggtggggggtgtcctgaaggacaggatgctctccccagacctccccagggtggtgaagctgtgccctggggccccagctaacccactcctctctctgtacgtcaatgtccctatttgaaagcagggatgatcccattccaccctgtccactctggatgag

SEQ ID NO: 4195 - DNA, 1702 bp, Homo sapiens
  source 1..1702: mol_type = genomic DNA
gataagatggttgattcacagaacccaggctggacgggacttgtggcgagcagtccagcacagcctcacagtgcagagcatgagctttggagcctgcccccaccctagctttgtgaccttaagtgagctacatagcttctcatgtgtaaactactcatcataatggttctgacctcagtggtttgttgtgttctaggaaatgatgccagtgaatgcgtagtcccagcctcagcacaggggagccaccttgaagctctcaaatatcactgttgtgaatacagagagggaaaaccaactgtaacgtgccacccaaataaagctcattactagtcctgtccagcaacgtgcctctcctggccctagagttcttggaaatagcccaggccaaagagaaggcctttctccccatggtcagccacacgttccacatgcgcacagaggagtctgatgcctcacaggagggcgatgacctacccaagtcctcagcaaacaccagccatcccaagcaggatgacagccccaagtcctcagaagaaaccatccagcccaaggagggtgacatccccaaggccccagaagaaaccatccaatccaagaaggaggacctccccaagtcctcagaaaaagccatccagcccaaagagagtaacatccccaagtcctcagcaaaacccatccagcccaagctgggcaatattcccaagacctcagtgaagcccagccagcccaaggagagtgatatccccaagtccccagaagaagccatccagcccaaggagggtgacatccccaagtccctagaggaagccatccagcctaaggagggtgacatccccaagtccccagaagaaaccatccagcccaagaagggtgacatccccaagtccccagaagaagccatccagcccaaggagggtgacattcccaagtctccaaaacaagccatccagcccaaggagggtgacattcccaagtccctagaggaagccatcccacccaaggagattgacatccccaagtccccagaagaaaccatccagcccaaggaggatgacagccccaagtccctagaagaagccaccccatccaaggagggtgacatcctaaagcctgaagaagaaacaatggagttcccggagggggacaaggtgaaagtgatcctgagcaaggaggactttgaggcatcactgaaggaggccggggagaggctggtggctgtggacttctcggccacgtggtgtgggccctgcaggaccatcagaccattcttccatgccctgtctgtgaagcatgaggatgtggtgttcctggaggtggacgctgacaactgtgaggaggtggtgagagagtgcgccatcatgtgtgtcccaacctttcagttttataaaaaagaagaaaaggtggatgaactttgcggcgcccttaaggaaaaacttgaagcagtcattgcagaattaaagtaaacatgtattctgaaaacattgcagacagtcaggtgtttatagcttttgagttctcttttattatttacacaaagtgatcaggtataacaaaagtgtatgtccaaatggcactgcttgtacatgataatattaactctacccttttcaaaaaacagtccaagcattaaagtacattgcgactgtgtttctgttagtgggagagtataaaattagaaattcccatggtgaagactgctaag

SEQ ID NO: 4196 - DNA, 1934 bp, Homo sapiens
  source 1..1934: mol_type = genomic DNA
gtgatctgctcttccaagccctgggccgcacctacactgacgaagaatttgatgaactatgttttgaatttggtctggagcttgatgaaattgtccctcctgagatctgccatctcctgggaggtgactcagctttcttcactattgaaacaacatctgagaaggaaataataagtaaagaacaaggtaatgtaaaggcagcaggagcctctgatgttgttctttacaaaattgacgtccctgccaatagatatgatctcctgtgtctggaaggattggttcgaggacttcaggtcttcaaagaaaggataaaggctccagtgtataaacgggtaatgcctgatggaaaaatccagaaattgattatcacagaagagacagctaagatacgtccttttgcggtagcagcagttctccgtaatataaagtttactaaagatcgatatgacagcttcattgaacttcaggagaaattacatcagaatatttgcaggaaaagagcactggttgccattggtacccatgatttggacactttgtcgggcccatttacttatactgcaaagcgtccttcagatatcaaattcaagcctctaaataagaccaaggagtatacagcctgtgaactgatgaacatatacaagactgacaatcacctgaaacattatttacatatcattgaaaacaaacccctgtatccagttatctatgatagcaatggtgtcgtcctttcaatgcctcccatcatcaatggggatcattccagaataacagtaaatactagaaatatttttattgaatgcacgggaactgactttactaaggcaaaaatagttcttgatattattgtcaccatgttcagtgaatattgtgagaatcaatttacggtcgaagctgctgaagtggtttttcctaatggaaaatcacatacctttccagaattagcttaccgaaaggagatggtgagagctgacctaattaacaaaaaagttggaatcagagaaactccagaaaatcttgccaaacttctgaccaggatgtatttaaaatcagaagtcataggtgatgggaatcagattgagattgaaatccctccaaccagagctgacattatccatgcatgtgatattgtagaagatgcagctattgcttatggatataacaacattcagatgactctcccgaaaacttacaccatagctaatcaatttcctcttaataagctcactgaacttctccgacatgacatggcagccgctggcttcactgaagcacttacctttgccctgtgctcccaagaagatattgctgataaactaggtgtggatatctctgcaacaaaggcagtccacataagtaatcctaaaacagctgaatttcaggtggcacgcactacccttcttcctggcctcctgaagaccatagcagcaaatcgtaagatgccccttccactgaaactgtttgaaatctctgacattgtaataaaagattctaatacagatgtaggtgcaaaaaactacagacatctctgtgctgtttattacaacaagaatcctgggtttgagatcattcatgggctgctggacagaattatgcagttgctcgatgtgcctcctggtgaagacaaggggggatatgtgatcaaagcatcagaagggcctgctttcttccccgggcgatgtgcagagatctttgccaggggtcaaagcgtcgggaagcttggggtccttcatcctgacgttatcaccaaatttgagctgaccatgccctgctcctccctagaaatcaatgttggaccctttttgtgaagattggtctctgtggtgtgattctcttcccaggtgtccctttctcctcccctagtgtccttaagtcctcctccacagggaacatctatttgggctttgatgtttaataaagtagaaagcactgtc

SEQ ID NO: 4197 - DNA, 1973 bp, Homo sapiens
  source 1..1973: mol_type = genomic DNA
cggggccgcggcagagccgctcccgaggccccggcgcggcgcgagggcgcggggcgcggcgtccacaggcgccgaggctgcccccgccgccccgcccgcgaagatggcggcggaactctacgctcccgccagcgccgcggccgcggacctagccaacagcaacgccggcgccgccgtgggcaggaaggccgggccgcgcagcccgcccagcgcccccgcgccagcgccgccgccgcccgcgcccgcgccgcccacactcggcaacaaccaccaggagagccccggctggcggtgctgccgccccacgctgcgcgagaggaacgcgctcatgttcaacaacgagctcatggccgacgtgcacttcgtcgtggggcccccgggggcgaccaggacggtgcccgcccacaagtacgtcttggctgtcggcagctccgtcttctatgccatgttctacggagacctggcggaagtcaaatctgaaattcacattccagacgtggagcccgcagcctttctgatcctcttaaagtacatgtacagtgatgagatcgatctggaagccgacacggtgctggccactctgtacgctgctaagaagtacatcgtcccagcattggcaaaagcctgtgtcaactttctggagacaagtttggaagccaagaacgcctgcgtcctgctgtcccagagccggctgtttgaggagcccgagctgacgcagcgctgctgggaggtcattgacgcacaggccgagatggccctacggtccgaaggcttctgtgagatagaccggcagacgctggagatcattgtcactcgggaggccctcaacaccaaagaggcggtggtcttcgaggccgtcctgaactgggccgaggcggagtgcaagaggcaggggctgccaatcaccccacgaaacaagaggcatgttctggggcgagccctctatctggtccgaattccaaccatgaccctagaggagtttgccaacggcgctgcccagtcagacatcctgactctggaggagacccacagcatcttcctgtggtacacggccaccaacaagccccgcctggactttcccctgaccaagaggaagggcctcgccccgcagaggtgccaccgattccagtcttctgcctaccgcagcaaccagtggcggtaccgcgggcgctgcgacagcatccagtttgcagtggacagaagggtatttattgcagggctgggcctgtatggctccagctctgggaaggctgagtacagcgtgaagattgagctcaagcggctcggggtggttctggctcagaacttgaccaagttcatgtcagacggatccagtaacaccttcccggtctggtttgaacacccggtccaggttgaacaagacaccttctacacggccagtgccgtcctggacggcagcgaactcagctactttgggcaggaggggatgacggaagtgcagtgtggaaaggtggccttccagttccagtgctcctcggacagcaccaacgggactggggtccagggtgggcagatccctgagctcattttctatgcctgaggtgcccggggaggctgcagcaggtcagcgagtgagtggaggggaagtcaagatgctaactgcttcttgacaccatgaaaggctgctcttaactttgtctctctttgacatgtagtcagctgaagcttgactgtgtagagacattttccacacagccagaacccagggattggagtcttaggcatctctggtacagtggggtgcacgtctcaggtggaggaagatttacggctcaagacaggccccagatcccctcccagtggcacccatgccacctgctttgaggggttggatcttcctgctaccctcttggattctaagtggttccaagcttaacttgagaccttcccttcaaatctaaaattggcaaaaagtcacttaaaatagtggacttctgtaataaaggttgcct

SEQ ID NO: 4198 - DNA, 583 bp, Homo sapiens
  source 1..583: mol_type = genomic DNA
gaccccgaaatggcgctgctggccgaacacttgctgaagccgctgcccgcggacaagcagatcgagaccgggcccttcctcgaggcggtgtcccacctgccgcccttcttcgattgccttgggtccccagtgtttactcccatcaaggcagacataagcggcaacatcacgatgaggaagctgagactcagaggggttgaaggactcgcttaaggtcacaagcaaaaaatcaaagctgtgtacgacaccaacccagccaagttccggaccctgcagaacatcctggaggtggagaaagaaatgtatggagcagagtggcccaaagtaggggccacactggcgctgatgtggctgaaaagaggcctccgcttcatccaggtcttcctccagagcatctgcgacggggagcgggacgagaaccaccccaacctcatccgtgtcaacgccaccaaggcctacgagatggccctcaagaagtaccatggctggatcgtgcagaagatcttccaggcagcactgtacgcagcaccctataagtctgacttcctgaaagcgctctccaaggggcagaatgttacggagg

SEQ ID NO: 4199 - DNA, 3286 bp, Homo sapiens
  source 1..3286: mol_type = genomic DNA
atttgtgaaagaattcggtcaacagtggatgaaaaagaacaaaaacaacttcttatggatttggatgtagtaatgcggagtagtgattgcccatacattgttcagttttatggtgcactcttcagagagggtgactgttggatctgtatggaactcatgtctacctcgtttgataagttttacaaatatgtatatagtgtattagatgatgttattccagaagaaattttaggcaaaatcactttagcaactgtgaaagcactaaaccacttaaaagaaaacttgaaaattattcacagagatatcaaaccttccaatattcttctggacagaagtggaaatattaagctctgtgacttcggcatcagtggacagcttgtggactctattgccaagacaagagatgctggctgtaggccatacatggcacctgaaagaatagacccaagcgcatcacgacaaggatatgatgtccgctctgatgtctggagtttggggatcacattgtatgagttggccacaggccgatttccttatccaaagtggaatagtgtatttgatcaactaacacaagtcgtgaaaggagatcctccgcagctgagtaattctgaggaaagggaattctccccgagtttcatcaactttgtcaacttgtgccttacgaaggatgaatccaaaaggccaaagtataaagagcttctgaaacatccctttattttgatgtatgaagaacgtgccgttgaggtcgcatgctatgtttgtaaaatcctggatcaaatgccagctactcccagctctcccatgtatgtcgattgatatcgctgctacatcagactctagaaaaaagggctgagaggaagcaagacgtaaagaattttcatcccgtatcacagtgtttttattgctcgcccagacaccatgtgcaataagattggtgttcgtttccatcatgtctgtatactcctgtcacctagaacgtgcatccttgtaatacctgattgatcacacagtgttagtgctggtcagagagacctcatcctgctcttttgtgatgaacatattcatgaaatgtggaagtcagtacgatcaagttgttgactgtgattagatcacatcttaaattcatttctagactcaaaacctggagatgcagctactggaatggtgttttgtcagacttccaaatcctggaaggacacagtgatgaatgtactatgtctgaacatagaaactcgggcttgagtgagaagagcttgcacagccaacgagacacattgccttctggagctgggagacaaaggaggaatttactttcttcaccaagtgcaatagattactgatgtgatattctgttgctttacagttacagttgatgtttggggatcgatgtgctcagccaaatttcctgtttgaaatatcatgttaaattagaatgaatttatctttaccaaaaaccatgttgcgttcaaagaggtgaacattaaaatatagagacaggacagaatgtgttcttttctcctttaccagtcctatttttcaatgggaagactcaggagtctgccacttgtcaaagaaggtgctgatcctaagaatttttcattctcagaattcggtgtgctgccaacttgatgttccacctgccacaaaccaccaggactgaaagaagaaaacagtacagaaggcaaagtttacagatgtttttaattctagtattttatctggaacaacttgtagcagctatatatttccccttggtcccaagcctgatactttagccatcataactcactaacagggagaagtagctagtagcaatgtgccttgattgattagataaagatttctagtaggcagcaaaagaccaaatctcagttgtttgcttcttgccatcactggtccaggtcttcagtttccgaatctctttcccttcccctgtggtctattgtcgctatgtgacttgcgcttaatccaatattttgccttttttctatatcaaaaaacctttacagttagcagggatgttccttaccaaggatttttagccccaaatctctcatattcgctagtgtttaaaaggctaagaatagtggggcccagccgatgtggtaggtgataaagaggcatcttttctagagacacattggaccagatgaggatccgaaacggcagcctttacgttcatcacctgctagaacctctcgtagtccatcaccatttcttggcattggaattctactggaaaaaaatacaaaaagcaaaacaaaaccctcagcactgttacaagaggccatttaagtatcttgtgcttcttcacttacccattagccaggttctcattaggttttgcttgggcctccctggcactgaaccttaggctttgtatgacagtgaagcagcactgtgagtggttcaagcacactggaatataaaacagtcatggcctgagatgcaggtgatgccattacagaaccaaatcgtggcacgtattgctgtgtctcctctcagagtgacagtcataaatactgtcaaacaataaagggagaatggtgctgtttaaagtcacatccctgtaaattgcagaattcaaaagtgattatctctttgatctacttgcctcatttccctatcttctcccccacggtatcctaaactttagacttcccactgttctgaaaggagacattgctctatgtctgccttcgaccacagcaagccatcatcctccattgctcccggggactcaagaggaatctgtttctctgctgtcaacttcccatctggctcagcatagggtcactttgccattatgcaaatggagataaaagcaattctgactgtccaggagctaatctgaccgttctattgtgtggatgaccacataagaaggcaattttagtgtattaatcatagattattataaactataaacttaagggcaaggagtttattacaatgtatctttattaaaacaaaagggtgtatagtgttcacaaactgtgaaaatagtgtaagaactgtacattgtgagctctggttatttttctcttgtaccatagaaaaatgtataaaaattatcaaaaagctaatgtgcagggatattgccttatttgtctgtaaaaaatggagctcagtaacataactgcttcttggagctttggaatattttatcctgtattcttgtttgaattcctcctctatttaagatatatacatggaatcgaagtgtttatgtaatagttctatccttttgcctgcaggtcagttgtaataaatctaggatgtgatg

SEQ ID NO: 4200 - DNA, 528 bp, Homo sapiens
  source 1..528: mol_type = genomic DNA
aagaaacaagatcttgagctgagcaagaacatcccagcatcttcattgactttaaaagtatattctggagtcttccgtggttcactattccagtactacagagtcatttttatctgtgtctttccattgcagattccttatattacatggcaggaggggggtaaactgagggatagtgaagacaacaataaattaatcaagagctttcctcatatctcagaacctatcctctgtaagaatgtcagaaaaggttgactggttacaaagccaaaatggagtatgcaaagttgatgtctattctcctggagacaaccaagcccaggactggaaaatggacacctccacggatcctgtcagagtgctcagctggctccgcagagacctggagaagagtacagcagagttccaagatgttcggttcaaacccggagaatcatttggtggggaaacgtccaactcaggagacccacacaaaggtttctctgtagactattacaacaccaccaccaagggcactccagaaagatt

SEQ ID NO: 4201 - DNA, 886 bp, Homo sapiens
  source 1..886: mol_type = genomic DNA
aacagggcttcgtcttctttgcagagccatgggcagcaggaagaaggaaattgccctgcaggtcaacatcagcacccaagagctttgggaggaaatgctcagttccaaaggactaactgttgttgatgtctatcaaggctggtgtggcccctgcaaacctgtggtgagcctcttccagaagatgaggatcgaggtcggcctggaccttctgcactttgcattagcagaggcagatcgtcttgatgtcctcgaaaagtacagagggaagtgcgagccaacctttctgttttatgcaattaaagatgaggctctttctgatgaagatgaatgtgtttcccatggaaagaataatggtgaagatgaggacatggtttcatcagagaggacctgtaccttggccatcattaaaccagatgcagtggcccatggaaagactgatgagattatcatgaagattcaggaagctgggtttgaaattctaacaaatgaagagagaaccatgacagaggcagaagtgcgacttttctaccaacacaaagctggagaggaggcatttgagaagctggtacatcacatgtgcagtggaccaagccacctcctgatcctcaccaggactgagggcttcgaggacgtggtcactacctggcgaaccgtcatgggcccccgtgaccccaatgtggccaggagggagcagccagaaagtctccgagctcagtacggcacagaaatgcccttcaatgccgtccatggaagccgggacagagaagatgctgacagagaactggcattgctcttccccagtttgaaattttcagacaaagatacagaagcccctcagggtgagtccagtacacagccaaggttgaagatcactgacctagactaa

SEQ ID NO: 4202 - DNA, 2610 bp, Homo sapiens
  source 1..2610: mol_type = genomic DNA
gaacactcatcagtgcgcaggcgcccatcttagttggtcttctagtccggtaaacagagggcctgcccccgacagcttctgcttccgggtcacgccttgacagcggctttcaacccccacctcagcccagcaattcgtttggagcatgtgaacaccttgagccttgatgagttccagtatgtggtatattatgcagagcattcagagcaaatactctctctccgagcgcttaatccgaacaattgctgccatccgttccttcccacatgataatgtagaggacctcatcagagggggagcagatgtgaactgcactcatggcacactgaagcccttgcactgtgcctgtatggtgtcagatgctgactgtgtggagttacttctggaaaaaggagccgaggtgaatgccctggatgggtataaccgaacagccctccactatgcagcagagaaagatgaggcttgtgtggaggtcctattggagtatggtgcaaaccccaatgctttggatggcaacagagataccccacttcactgggcagcctttaagaacaatgctgagtgtgtgcgggctctcctagagagcggggcctctgtcaatgccctggattacaacaatgatacaccgctcagctgggctgccatgaagggaaatcttgagagtgtcagcatccttctggattatggcgcagaggtcagagtcatcaacctaataggccagacacccatctcccgcctggtggctctgctagtcaggggacttggaacagagaaagaggactcttgctttgagctcctccacagagctgttggacactttgaattgaggaaaaatggcaccatgccacgagaggtggccagagacccgcagctatgtgaaaaactgactgttctgtgctcagctccaggaactctaaaaacactcgctcgctatgccgtgcgccgtagcctgggactccagtatctccccgatgcagtgaagggccttccactgccagcttctttgaaggaatacctgttacttttagaatagccggagaagatgtttgcaccatcgtgcaggcagctctgggtgaggttgtccctgcagtactccttgtcacagaaaacagaaaaacagttgttcctgttgtgtggtttatagatttcgaagcaacatgtcacaacaataacctccatagcacctccccttcccaaaccaaacaacccaacaaaaaaaatccctcacttttgttttctgtttattgcttacctggctttttatattgcattttgcaaaagaagaggtctccctcaatcctcccctttagggaaggagtcaacagtgtaactaaatttctctaggaagatggaaagtacttaaataatgtgtgtgtggttttcctttggggacgtggttaacggtccagaagaatcccttctagaaagcattttaggccagccatggtggctcacgtctgtaatcccaggactttgggaggctgaggcaggtggatcacctgaggtcaggagttcgagcccagcctgaccaatatgatgaaaccccgtctctactaaaaatacaaaaattagctgggcatggtggcatgcgcctgtaatcccagctactcaggaggctgagacagaagaatcgcttgaacctgtgaggcagaggttgcagtgagccaagatcgcgccattgcactccagcctggacaacaagagcaaaactgtctcaaaaaaaaaaaaaaaaaaaaaaaaccattttaattgatctgtgaaaaaacttaagaaaatcacaatttcagctaacagcaattgtgtcccaaagatgaagatactataacctcaaatggtgcagatccagaactgggctggatgacatccctactgtgccatgtcctggggcatttggaagggactggacctctttcccctcatcaaaggaaacagcagtctttgcctctttctgttggttgtgcccaagggctacagtagctctgaaataacaagagctctgtaataacagtaataaatagctctgaaataacagtcctaagaactcctaaagtcctgagaacttttcttgtaatgcagctttttctcttcctgagaaacagtgtgttctaatgggattcccaggcagttcctacacctacggtgtgtgttccagcagggaggagttatgggctgggctgccttttcccatgggtcttcattcccaatggaaagttcactctgcttagtttggaattatttttctttcagttgttctggaacctttgctttttattgatttatacaatacaattggtgggagggtggacttgggatgggagtgggaaaagcatgtaagagctccttttgtgatggtccatctacccaaaagagatctgctttagtgaacgatactctttcatttttctaaattagatcaagttgttattgattttagatgacttgtatgcaaatttgaaaaacttttttttttaaagctgattgggaactacaaacaatgaatggaatctactgacacagctaattggaaaacagatgtcttcttctgtcctattgatgctggtgtttaaaaaacatcacttaaaaaaaaagaataaatagttctaaaagcaa

SEQ ID NO: 4203 - DNA, 2403 bp, Homo sapiens
  source 1..2403: mol_type = genomic DNA
aaaaggggcggtggcggcggcggcggcggcggcggcggcggcgacggcgagaaagagcttgccggggggcgagcaggacaggacgaagccggagtgtaggcggcagaggattcgctcccagagcagctgcggccaggtcggaaagaggccggggcggctgggtatatgaatgacctaaaggtacaaataaagacggagagagaacagtgccaactgggagcagggcaagaatgccaattcctcctcccccgccacccccacctggtcctcctccacctcccacatttcatcaggcaaacacagagcagcccaagctgagtagagatgagcagcggggtcgaggcgccctcttacaggacatttgcaaagggaccaagctgaagaaggtgaccaacattaatgatcggagtgctcccatcctcgagactcctccacccccaccacctgtgatccgaaatggtgccagggatgctccccctcccccaccaccataccgaatgcatgggtcagaacccccgagccgaggaaagcccccacctccaccctcaaggacgccagctgggccaccccctcctcctccaccgcccctgaggaatggccacagagattctatcaccactgtccggtctttcttggatgattttgagtcaaagtattccttccatccagtagaagactttcctgctccagaagaatataaacactttcagaggatatatcccagcaaaacaaaccgagctgcccgtggagccccacctctgccacccattctcaggtgaagcctggcttggtcccgttcctcaggaaaaggatggaccttctcttcttctcagatggtcccttccattcccctgaaacctgcatgagagctcctaacatgtttctccaatgcaatcaagccctagactccaaatgtcctcccagctcacctccatctatgcatctcatctctggatttggtgatcagactctatattgacagtaggatctcaaaccctgcatccatccttcctccagcaagccctgctagccacatgaggaacaagtttccgtgtcttctgccttcctcttggggaaaggtgccttgttgtgatgaattaactcactgttagggcagggtggagaatggtactccttccttctcctgtccactgtgggggaagcttggcaggtatattatatttcatcatttaggaggctggcatgaccaggacttatgggtgggaggggagcatttttagtgaagcaagaaaggagtttgccaagaagtgatctgttttaaaggtcatatttggagaaagggcaaggaattgggtctgctttatttttgggggtattttgtttttgttctcacctgctgcccccccaccccaccaccccagggataaattggatataaacactaaatactaatcagttgaacttaacatttaataaaaagaaagggtgaaataaactgaagaccattttagaactagtcagttctctgcagcaaagggaacaggagccatttgaaccctctgggacccctcaccccactgcttcagggtgctaggctgagggatgtttttcctcccccttaccgcccatgcccttgaaagaaaagtcactttttgtggagggcatcattcattcctgattcacaaaccccaaaaacctctggtgggagataggaagatagggcgtgggcctgggccttaacctcaatcttgtgtctgcctcagtcttttctgactggccctgaagttgtcagtggctctttctgtccttcagcccctggaaggtgctccaggataacaaagaagggcaggttgaagcccctcatggaaggagctggctttgtggggctgcaaaggacttttaagtcctgcctgtactgaagttcacagcccacctgactgagcagactcttcctgttcctttctctaccacccttgccttcccaggactgcacggtttaacacagcagagtacagaagggtgaagaagtgagcagaggcttatgaagatattcagatactcttctatgccaggaagcacaaagactttgttgagatttgcctcagttcagtagatcttccttggcagccagccataggttgtttctttgtcttccgggtcctaaagagcacagagaaaatggaggtccccagtctaggtaggaagctgattggatgaggacttctttttttccgacagcaggatggggctcttgggctccacacaccagatgctttggttttctacaactgttgctatgtgtagagggtgctcagagcgtggcatgagagcaaggagaccatggctactctttgaaatggatggggaaaattagcttaaaaatttaatcacgagattgcgccactgcactccagcctgggcgacagagccagactccgtctc

SEQ ID NO: 4204 - DNA, 1032 bp, Homo sapiens
  source 1..1032: mol_type = genomic DNA
ggttgctagtggagaagcaaccttggccatggaccagccggctggcctgcaggtggactacgtcttccggggtgtggagcatgccgtgcgggtgatggtttctgggcaggtgctggagctggaggtggaggaccggatgacggctgaccagtggcggggcgagttcgatgctggcttcattgaagatttgactcacaagacagggaacttcaaacagttcaacatcttctgtcatatgctggagtcagccctcactcagagtagtgagtcagtcaccctggacctgctgacctacacagacctggagtccctgcggaaccgcaagatggggggccgcccaggctccttggcccccaggtcggcccagctcaactccaagcgctacctgatcctcatctactccgtggagtttgacaggattcactacccgctgcccctcccgtaccagggcaagccagaccccgtggttctgcagggcatcatccggtcactgaaggaggaactgggccgcctgcaagggctggatggccagaacactcgggacacccgggagaatgagatctggcatctgcgggagcagcagcagcagcggaaccgcttaggcagtgggggaagcggggacggtccgtccgtctcctggtctcgccagacccagccccctgctgccttgactggccgaggggacgcccctaaccgctcccgaaaccgcagctcctcagtggacagtttccgcagccgctgctcgtctgccagctcctgcagcgatttggaggatttctctgagtcgctctccagagggggtcaccgccgccgtgggaagcctcccagcccaacgccctggagtgggtccaatatgaagtctccccccgtggaacgcagccaccatcagaaatctctggccaactccgggggctgggtccccatcaaagagtacagctcggagcaccaggcggctgacatggccgaaatagacgcacgcctgaaggccttgcaggagtacatgaaccgactggacatgcggtcataacgtgg

SEQ ID NO: 4205 - DNA, 899 bp, Homo sapiens
  source 1..899: mol_type = genomic DNA
gctgctgagcggttttgcagactaccatcttccctgcaactctgaaggatggacttaaccaccaccatgtcgagcaaaagaacaaagaccaagaccaagaagcgccctcagcgtgcaacatccaatgtgtttgctatgtttgaccagtcacagattcaggagttcaaagaggccttcaacatgattgatcagaacagagatggtttcatcgacaaggaagatttgcatgatatgcttgcttcattggggaagaatccaactgatgagtatctagatgccatgatgaatgaggctccaggccccatcaatttcaccatgttcctcaccatgtttggtgagaagttaaatggcacagatcctgaagatgtcatcagaaatgcctttgcttgctttgatgaagaagcaactggcaccatacaggaagattacttgagagagctgctgacaaccatgggggatcggtttacagatgaggaagtggatgagctgtacagagaagcacctattgataaaaaggggaatttcaattacatcgagttcacacgcatcctgaaacatggagccaaagacaaagatgactgaaataacttcaaattccagccaaacgttccttgttgccactttgggtattctgagattttctcttgcatgcccttagctttacagcttttgcatttcctgttgtatttattctcagccattttgggcatatgtatctttataatcagactggaaacgggactttctattaatatcattttcagaataaaaaataggataatttaacctaccagcccttctcccccaataactgtggtctatacagagtcaatatattttttcagagaaagttattcgctcgattttttctgaatcataattaaactttatgataaaat

SEQ ID NO: 4206 - DNA, 2791 bp, Homo sapiens
  source 1..2791: mol_type = genomic DNA
actgcggagcccagagggccagctgcgcggcctgtggacgcgggatggcaggggcgagctccacgccctgtccccgtctaagctaccacctttacttccaccaggctgggaaccagggcttccttggttgtggtcagcaatgagtctggatgacaatttgtcgggcacgagcggtatggaagtggacgaccgcgtgtcggcgctggagcagcggctgcagttacaggaagacgagctggcggtcctaaaggcggcgctggcggatgctctgcgtcgcctgcgggcatgcgaagaacagggagcggcgctacgcgcgcggggcacccccaagggccgggcgcctccgcgcttaggcaccactgcctcggtgtgtcagctcttgaaaggccttcccaccaggacgccccttaatggctcgggacccccgcggcgcgtgggtggctatgccacgtccccatcctctcccaagaaggaggcgacctccgggcgcagcagtgtccgccgctacttgtcaccagagcgcctcgcctcggtgcgccgtgaggacccccgcagccggaccacatcctccagcagcaactgtagcgccaaaaaggaaggcaaaaccaaagaagttatcttcagtgtggaggatggctccgtgaaaatgttcctgaggggccgccctgtgcccatgatgatcccagacgagctggcacccacctacagcctggacacacgctcggagctgccttcttgccggctcaagctggagtgggtctatggctaccgtggccgagactgccgggccaacctttatttgctgcccaccggggagatagtgtactttgtggcctccgtagccgtgctatacagcgtggaggagcagaggcagcgacactacctgggacacaacgatgacatcaaatgcttggccatccacccagatatggtcaccatcgccacgggacaggtggcgggaaccactaaggaagggaagccgctgccgccccacgtgcgcatctgggactcagtttccctctccaccttacacgtgctgggcttgggggtgtttgacagagccgtgtgctgtgtgggcttctccaaatctaatggaggcaacctgctgtgtgcagtggatgaatccaatgatcacatgctctcggtgtgggactgggccaaggagaccaaggtggtggatgtcaagtgctccaatgaggctgtattggtggccaccttccaccccacggaccccactgtgcttatcacctgcgggaaatctcacatctacttctggaccttggaggggggcagcttgagcaagcggcaaggcctctttgagaaacatgagaaaccgaagtatgtgctgtgtgtgacctttttggaaggtggcgacgtggtcacgggggactctggggggaacctctatgtttggggcaaaggtgggaaccgtatcacacaggcggtgctgggcgcccacgacggcggcgtgtttgggctctgcgccctgcgggacgggacgctggtgtctggagggggccgtgatcggcgggtggtcctctggggttctgactacagcaagctgcaggaagtggaggtccctgaggactttggccctgtgcgcaccgtggcagagggccacggagacacactgtacgtggggaccacccgcaattccatcctgcagggctccgtgcacacaggcttctcactgctggtccagggccatgtggaagagctgtggggcctggccacacaccccagtcgggcccagtttgtgacctgcgggcaggataagctggtgcatctatggagctcagattcccaccagcccctgtggagcaggatcatcgaggaccctgcccgctcagccggcttccaccccagtggctctgtcctggctgtgggtacagtgactggcagatggctgctgctggacacggagacccatgacctggtggctatccacacagacggcaatgaacagatctcagtggtcagcttctccccagacggggcgtacctggccgtgggctcccacgacaacttggtgtacgtgtacacggtggaccagggcggccgcaaggtcagccgcctgggcaagtgctcgggccattccagttttatcacccacctggattgggcccaggacagcagctgctttgtcaccaactccggggactatgagattctgtactgggacccggctacctgtaagcagatcaccagtgcggatgctgtgaggaacatggaatgggccacagctacttgtgtcctagggtttggggtgtttgggatctggtctgagggggcggacggcactgatatcaacgctgtggcccgctctcatgatgggaagttgctggcttcagctgatgactttggcaaagttcacctgtttagctacccctgctgtcagcctcgagccctcagccacaagtacggtggacacagcagccatgtgacaaatgtggccttcttgtgggatgacagcatggccctgaccacagggggcaaggacaccagtgtgctacagtggcgggtggtctgatgcggccagggaagagtcaggtgtcagggcaggaattctattttcgggagatgtctattgccgagtagagtaatatatacccagagtatgtctatagcagagggggttatgggggcgggagggtagactgacatacagaagtctctatttatccgggtgggaagagggagtcacatcgctttggggatccattggtgtttggtttggggtgttttttaagttttttcttttatatcatccagaaataaagacacgtacact

SEQ ID NO: 4207 - DNA, 1296 bp, Homo sapiens
  source 1..1296: mol_type = genomic DNA
gtgtgttgcgcgactggccttgagggagagctggggcctgctcccggagagatacggctatgtcgatcgaaatcgaatcttcggagcatacccagatggaagtagcaaagaaaagagaagagcagcaattgcccaggccttagctggcgaagtcagtgtggtgcctccatctcgtctcatggcattgctgggacaggcactgaagtggcagcagcatcagggattgcttcctcctggtatgaccatagatttgtttcgaggcaaggcagctgtcaaagatgtggaagaagaaaagtttcctacacaactgagcaggcatattaagtttggtcagaaatcacatgtggagtgtgctcgattttctccagatggtcagtatttggtcactgggtctgttgatggattcattgaagtatggaactttactactggaaaaatcagaaaggatcttaagtaccaggcccaagataactttatgatgatggatgatgctgtcctctgcatgtgtttcagcagagatacagaaatgttagcaactggggcccaagatggaaaaatcaaggtgtggaagattcagagtggacaatgtttaaggagatttgagagggcacacagtaagggtgtcacctgtctaagcttttctaaggatagcagtcagatccttagtgcttcttttgaccagacaattagaattcatggtttaaaatctgggaaaaccctgaaggaatttcgtggccattcctcctttgttaacgaagcaacatttacacaagatggacattacattattagtgcatcctctgatggcactgtaaagatctggaatatgaagaccacagaatgttcaaatacctttaaatccctgggcagcaccgcagggacagatattaccgtcaacagtgtgattctacttcctaaaaaccctgagcactttgtggtgtgcaacagatcaaacacggtggtcatcatgaacatgcaggggcagattgtcagaagcttcagttctggtaaaagagaaggtggggactttgtttgctgtgccctctctccccgtggtgaatggatctactgtgtaggggaggactttgtgctctactgtttcagtacagtcactggcaaactggagagaactttgacagtgcacgagaaggatgtgattggtattgcacatcaccctcatcagaacctgattgctacctacagtgaagatggactcctaaagctctggaaaccataattcaacttttctttttaaatcagctcgaaagcatgtacttaaatgaagcatattcatgt

SEQ ID NO: 4208 - DNA, 2526 bp, Homo sapiens
  source 1..2526: mol_type = genomic DNA
acagacggcgggtgaacatggcgtcctcgacttggtctgagacgtgataggcctgccttctggttgaagatgtggcgagtgaaaaaactgagcctcagcctgtcgccttcgccccagacgggaaaaccatctatgagaactcctctccgtgaacttaccctgcagcccggtgccctcaccaactctggaaaaagatcccccgcttgctcctcgctgaccccatcactgtgcaagctggggctgcaggaaggcagcaacaactcatctccagtggattttgtaaataacaagaggacagacttatcttcagaacatttcagtcattcctcaaagtggctagaaacttgtcagcatgaatcagatgagcagcctctagatccaattccccaaattagctctactcctaaaacgtctgaggaagcagtagacccactgggcaattatatggttaaaaccatcgtccttgtaccatctccactggggcagcaacaagacatgatatttgaggcccgtttagataccatggcagagacaaacagcatatctttaaatggacctttgagaacagacgatctggtgagagaggaggtggcaccctgcatgggagacaggttttcagaagttgctgctgtatctgagaaacctatctttcaggaatctccgtcccatctcttagaggagtctccaccaaatccctgttctgaacaactacattgctccaaggaaagcctgagcagtagaactgaggctgtgcgtgaggacttagtaccttctgaaagtaacgccttcttgccttcctctgttctctggctttccccttcaactgccttggcagcagatttccgtgtcaatcatgtggacccagaggaggaaattgtagagcatggagctatggaggaaagagaaatgaggtttcccacacatcctaaggagtctgaaacagaagatcaagcacttgtctcaagtgtggaagatattctgtccacatgcctgacaccaaatctagtagaaatggaatcccaagaagctccaggcccagcagtagaagatgttggtaggattcttggctctgatacagagtcttggatgtccccactggcctggctggaaaaaggtgtaaatacctccgtcatgctggaaaatctccgccaaagcttatcccttccctcgatgcttcgggatgctgcaattggcactacccctttctctacttgctcggtggggacttggtttactccttcagcaccacaggaaaagagtacaaacacatcccagacaggcctggttggcaccaagcacagtacttctgagacagagcagctcctgtgtggccggcctccagatctgactgccttgtctcgacatgacttggaagataacctgctgagctctcttgtcattctggaggttctctcccgccagcttcgggactggaagagccagctggctgtccctcacccagaaacccaggacagtagcacacagactgacacatctcacagtgggataactaataaacttcagcatcttaaggagagccatgagatgggacaggccctacagcaggccagaaatgtcatgcaatcatgggtgcttatctctaaagagctgatatccttgcttcacctatccctgttgcatttagaagaagataagactactgtgagtcaggagtctcggcgtgcagaaacattggtctgttgctgttttgatttgctgaagaaattgagggcaaagctccagagcctcaaagcagaaagggaggaggcaaggcacagagaggaaatggctctcagaggcaaggatgcggcagagatagtgttggaggctttctgtgcacacgccagccagcgcatcagccagctggaacaggacctagcatccatgcgggaattcagaggccttctgaaggatgcccagacccaactggtagggcttcatgccaagcaagaagagctggttcagcagacagtgagtcttacttctaccttgcaacaagactggaggtccatgcaactggattatacaacatggacagctttgctgagtcggtcccgacaactcacagagaaactcacagtcaagagccagcaagccctgcaggaacgtgatgtggcaattgaggaaaagcaggaggtttctagggtgctggaacaagtctctgcccagttagaggagtgcaaaggccaaacagaacaactggagttggaaaacagtcgtctagcaacagatctccgggctcagttgcagattctggccaacatggacagccagctaaaagagctacagagtcagcatacccattgtgcccaggacctggctatgaaggatgagttactctgccagcttacccagagcaatgaggagcaggctgctcaatggcaaaaggaagagatggcactaaaacacatgcaggcagaactgcagcagcaacaagctgtcctggccaaagaggtgcgggacctgaaagagaccttggagtttgcagaccaggagaatcaggttgctcacctggagctggcctgg

SEQ ID NO: 4209 - DNA, 1065 bp, Homo sapiens
  source 1..1065: mol_type = genomic DNA
caagggaggcgcgtcggtctgggaagtcgcgcgcactcgctgctcctgggaccgacgtttaactcttgccaagtctcgtcgcagccgccgcggctggcgggccttgggcttcccctgaagcatgagccctctcgcccgcagccaccctcaccgcgtggcccgcggacagtgcgcgccggggtcccgggtgcacagcctcaggataccccgtgcccgcagctcgggcgcccgcggcaggcgatcagtgggtgaccgcggctgcgagggactttgtcatccgtcctccaggatctggggagaaagagccccatcccttctctctctgccaccatttcggacaccccgcagggactcgttttgggattcgcactgacttcaaggaaggacgcgaacccttctctgaccccagctcgggcggccacctgtctttgccgcggtgacccttctctcatgaccctgcggtgccttgagccctccgggaatggcggggaagggacgcggagccagtgggggaccgcggggtcggcggaggagccatccccgcaggcggcgcgtctggcgaaggccctgcgggagctcggtcagacaggatggtactggggaagtatgactgttaatgaagccaaagagaaattaaaagaggcaccagaaggaactttcttgattagagatagctcgcattcagactacctactaacaatatctgttaaaacatcagctggaccaactaatcttcgaatcgaataccaagacggaaaattcagattggactctatcatatgtgtcaaatccaagcttaaacaatttgacagtgtggttcatctgatcgactactatgttcagatgtgcaaggataagcggacaggtccagaagccccccggaacggcactgttcacctttatctgaccaaaccgctctacacgtcagcaccatctctgcagcatctctgtaggctcaccattaacaaatgtaccggtgccatctggggactgcctttaccaacaagactaaaagattacttggaagaatataaattccaggtataaatgtttctctttttttaa

SEQ ID NO: 4210 - DNA, 1202 bp, Homo sapiens
  source 1..1202: mol_type = genomic DNA
gtttccggttcgcctccggagccatggcggcggcactgaagtgtctactgacattaggaagatggtgccccggccttggagtggctccccaggcccgggtgagtgcctacattccctgctgtcggagagactctggatctgcagagacatctccgcgcagaggaggagcgctcctggcagcccccgccctagcgattgccagcaactttcctttctgccaggaaatcaacctacctttctctgcctgcaggcgctcgccgccttagtacccggagtgacccaggtagataacaagtccggtttcctgcagaagaggcctcatcgccagcaccctggcatcctaaagctgccgcacgtgcggctgccacaggcactggctaacggtgcccagttattgctacttgggagcgctgggcccactatggagaatcaggtgcaaacactgaccagttatctctggagcagacatttgcctgtagagccagaggagttgcaaagacgggctaggcatcttgagaaaaaattcctggaaaacccaggtcctgacttccagtccttgttctcaccacagacttatctcagacagaggagaaacttcgtggagcagtgctacacgcactacgtaaaactacctaccattggcaagaactgagctacactgagggactgagcctggtgtatatggcagcaagactggatggtggctttgcagcagtctccagagcattccatgagatccgggctcgaaatccagcatttcagccacaaactttgatggactttggctcaggtactggttctgtcacctggtgagtaactttcttcagccctatcttggtcaattttagctctagaaagccatacttacaccactccaaaattaacagactggaaaaccagagggagaataggcaagttgggaatctataatgtttcttccatcagattaggcaaggcagaagaaggtatatggattggggccagaacttaaaagaaatgtcaagtaaaaaaaggcgcatgtgtagaaaaattaaaaagaaaaggaattatcaatcaaagttgtttttgcctacaaatagtattttgagtctaccttttttttttcttaggagttgtaaataaaacaagaaaataacactattagttattttattactaactatacaactactttaacataacactctcttttcccaggggtg

SEQ ID NO: 4211 - DNA, 1882 bp, Homo sapiens
  source 1..1882: mol_type = genomic DNA
attcccgggaggggggagcggcgttggaggccaccgtttccagcatcaacaacagcaacttgtgattggcggtgaccggatattcagttgcacatccccacatcaatgcactgccaatggattttctcattcagcatttacctttggtatagaaagccatatcagtcagtccaatataaatggtgccctcgtcccacccgctgcattgatttctatcatccagaaaggtctacagtatgtagaagcagaagttagtattaatgaggatggtaccttgtttgatggtcgaccaatagagtctctgtccctgatagatgccgtaatgcctgatgtagtacaaacaagacaacaagcttatagagataagcttgcacagcaacaggcagcagctgctgcagctgccgcagctgcagccagccaacaaggatctgcaaaaaatggagaaaacacagcaaatggggaggagaatggagcacatactatagcaagaatatggaatcttagtgagaacagcaccagtggctctacacagttagtacttagacattgtatacgagaaggagggcaagatgttccaagcaacaaggatgtcacatctctagattggaatagtgaaggtacacttctagcaactggttcctatgatgggtttgccagaatatggactaaagatggtaaccttgctagcaccttagggcagcataaaggccctatatttgcattaaaatggaataagaaaggaaatttcatcctaagtgctggagtagacaagactacaattatttgggacgcacatactggtgaagccaagcaacagtttccttttcattcagcaccagcattggatgttgattggcagagcaacaacacctttgcttcttgtagtacagatatgtgcattcatgtctgtaaattaggacaagacagacctattaaaacattccaaggacatacgaatgaagtaaatgctatcaaatgggacccaactggcaatctcttggcctcctgttctgacgacatgactttaaagatatggagtatgaaacaagacaattgtgtccatgatttgcaagcacataataaagaaatttatactatcaaatggagtccaacaggaccagggactaataatccaaatgccaaccttatgttagcaagtgcatcctttgattctactgttaggttatgggatgtagaccgagggatatgcatccataccttgacaaaacaccaagagcctgtgtacagtgtagctttcagtcctgatggcaggtatctggcaagtggttcttttgacaaatgtgtacacatctggaacacgcagacaggtgctctagttcacagctataggggaacaggtggaatatttgaagtttgctggaatgcagcaggagacaaagttggagccagtgcatcagatggttcagtttgtgtattagaccttcggaaatagcgctactagttggaagccatggaccgactatgaatgtgtacatagccaaaatgactgtccctgacccatgtactgctatagtcccacttgaaccatggccagtccactacagccaaatctaaaagaaatatatacatacagtgtatataaacaaaattgcaccctgaagatgacagagttttgtcacagcttgtgaattctgttcaccaagtgctggaatctaatctgctgtgcccctaaaatagcatttagaagttttggatatgaaaaacagaagagagaaaaatatacattataaaagcagaacatacatgtaccagtttttggatactaaatgacagccttgtttctcccctttgaatcagcagacaccatggattatattctttttttcccttcagtagtgagcagtttgtatgtacagagaaa

SEQ ID NO: 4212 - DNA, 5677 bp, Homo sapiens
  source 1..5677: mol_type = genomic DNA
ggggcgcggggcgcgggggctgtagggagggggaccagtggcagagggaccttaggtgatccttagaaataaaggctagcttctgttcgaccttggagtagggcgaagaggtgtagacaggcctggagaagcgaggtaaaagcctgagtaaaagcaagaagttggagaatatgagatacatctcatctctagtaaatacttaaatgacttcccctcctcccggagtcaagcacaattcggggatgcaatgacggacgtaggtgaagacactgcgggaacttacagacaaaactggtttgtggcctgtttgattcctgtcagaggtttgctgacccaagacagtatcgaaaatgcatattaagtcaattattctagagggattcaagtcctatgctcagaggaccgaagtcaatggttttgaccccctcttcaatgctatcactggcttaaatggtagtgggaaatccaacatattggactccatctgctttttgctgggcatctccaacctgtctcaggttcgggcttctaatttacaagatttagtttacaaaaatgggcaggctggtattaccaaagcctctgtgtcaatcacttttgataattctgacaaaaagcaaagtcctttaggatttgaggttcatgatgaaatcacagtaacaaggcaggtggttattggtggtagaaataaatatttaatcaatggagtcaatgccaacaacaccagagtacaggatctcttctgttctgttggccttaatgttaacaaccctcactttctcatcatgcagggccgaattacaaaagtattgaatatgaaacctccagagattttatccatgatagaagaagcagctggaaccaggatgtatgaatacaaaaaaatagctgcacagaaaactatagaaaaaaaggaggctaagctgaaagaaattaagacgatacttgaagaagagattactccaaccattcaaaaattaaaagaggaaagatcgtcctacttggagtaccaaaaagtaatgagagaaatagaacatttgagtcgtttatatattgcttatcagtttttgctggctgaagataccaaagtacgctcagctgaggaattaaaagaaatgcaagataaagttataaagcttcaggaagaattgtctgagaatgataaaaaaataaaagcacttaatcatgaaatagaagaattggaaaaaagaaaagataaggaaactggaggtatacttcgatctttagaagatgctcttgcagaggctcagcgagttaatactaaatctcaaagcgcatttgatctcaagaagaaaaatctggcatgtgaggaaagcaaacgcaaagagctggaaaaaaatatggttgaggactcaaaaactttagcagcaaaggaaaaagagaaaataaagaggaaagccttttggaaaagcgcaggcagctgtctcgtgatattggtagattgaaagaaacatatgaagctctattagccagatttcccaatcttcgatttgcatacaaggatccagagaagaactggaatagaaattgtgtgaaaggacttgtggcttctctgattagtgtgaaagacacttctgcaaccacagctttagaattagtggctggagaacgactctacaatgttgtagtagacacagaagttactggtaaaaagctactagaaaggggggaactgaaacgtcgatacactataattccactcaataaaatttcagccagatgtattgcaccagaaactctgagagttgctcagaatcttgttggccctgacaacgttcatgtggctctttccttggttgaatataaaccagaacttcagaaagcaatggagtttgtctttggaacaacatttgtttgtgacaatatggataatgccaaaaaagtggcctttgataagaggataatgactagaactgtaactctcggaggtgatgtgtttgatcctcatgggacattgagtggaggtgctcgatcccaggcagcttccattttaaccaagtttcaagaactcaaagatgttcaggatgaactgagaatcaaagagaatgagctgcgggctctagaagaggaattagcaggtcttaaaaacactgctgaaaagtatcgccaactaaaacagcagtgggagatgaaaactgaagaggcagatttattacaaaccaagctccagcaaagctcatatcacaagcaacaagaagaattagatgcccttaaaaaaaccattgaggaaagtgaggagactttgaaaaacactaaagaaatccaaagaaaagcagaagaaaaatatgaagtattggaaaataaaatgaaaaatgcagaagctgaaagagagcgagaactgaaagatgctcagaaaaaactggattgtgccaaaacaaaggcagatgcatctagcaagaagatgaaagaaaaacaacaggaagttgaagctatcactctggaactggaagagctcaagagagagcatacatcttacaaacaacagcttgaagctgtaaatgaagctatcaaatcctatgaaagtcagattgaagtaatggcagctgaggtggctaaaaataaggagtcagtaaataaagctcaagaagaggtgaccaagcaaaaagaggtgataacagcccaagacactgtaattaaagctaaatatgcagaagtggcaaaacacaaggagcaaaacaatgattctcagcttaaaattaaggaattagaccacaacatcagcaaacataaacgggaggctgaagatggtgctgcaaaggtatccaaaatgttgaaagattatgactggattaatgcagagagacacctctttggccaacccaatagtgcctatgatttcaaaactaacaaccctaaagaagctggtcagagacttcagaagttgcaagaaatgaaggagaaactaggaagaaatgtcaatatgagagctatgaatgtattgacagaagctgaagagcgatacaatgacttgatgaagaagaagagaattgtagaaaatgacaaatccaaaattcttacaactatagaagaccttgaccagaagaaaaaccaagccctaaatattgcatggcaaaaggtgaacaaggactttgggtctattttttctactcttttgcctggtgctaatgctatgcttgcaccaccagagggtcaaactgttttggatggtctggagttcaaggttgccttgggaaatacctggaaagaaaacctaactgaacttagtggtggtcagaggtctttagtggccttgtcattaatactgtccatgcttctcttcaaacctgctccaatttatatccttgatgaggtagatgcagccttggatctttctcatacccaaaacattggacagatgctgcgtactcatttcacacattctcagttcattgtggtgtcactaaaagaaggtatgttcaacaatgcaaacgttcttttcaaaaccaagtttgtggatggtgtttctacagtagccagatttactcaatgtcaaaatggaaagatttcaaaggaagcaaaatccaaggcaaaaccacccaaaggagcacatgtggaagtttaaactacaaagttatttcttcatcttgacctgtttttttaaatgtaaacttttaaggacttgagataactaatttgtttatatacaaaaattaatgttactgtgttacttaacccatgttttctctttatataatcacttatcgcttacaaatgagcatatattcctcatctcttaactagtctaattatggtccaattattgtggttgtgattttatgcatatcatcaaatgtttttttcttatgcgggtcttttatatattagggatcctgagatacccgattctatatgtaaaagctaatatacaaaaaagcagattaaattacatgataaatgtagctgatcatcagtgtttaattgatttaattcctaaggcaatattaatgtgttttctaaagtcattcaggtaaggaagaattataaatcaggtaactggaccaacaaagggaacacatataaagctattatgcatgcatggagccgtttgaggctagttttttaaggccacaactccagacccctgatttagactgagataggaaacagatcttgaaagaatccttattttaatgatacatgaatatcatgttcctatacgcttaataattggtctctacgttttaatgatacatgaatatcatgttcctatacgcttaataattggtctctacgactttaatgtttttgtttttttaagctgtgtaagtatttttaaatcaaagcttaggaggtgtgttgcgtggtactatctgctgcaaatttatctgaagtttgttaatattttccaagatttttgtcagccttttcataatccagtcattaacaacctattggtaaacaagaatgtaggtgccagtagactaaaccaaatttatttttccctgagtctgatatatatatgtataaatataaataactcaatccatctgttccaccaaaataactcaaaagttggatgattatttgtcttccgctttccagttcaaagggatgaaattcctttagaacttgaaagatgacactagcgaacaccatgagaatactgtctacagtttttggtacgtcatcactagaacagtgaccccaaactgaatcatgaaaggtctgacatgatgtaatctgatcttccatgtgttattttggccccacatctcttcttgattttttagtcttatttccttagtgttattatcatacttcccctgatatatggccgtacttcctggccctgggcttgacatttcccacccttcattctccatacatatgagatgtcagaaaacatgcagtaattgatattatgggacacattggaaaggattgaatctggaattagttctgtccactgtggaggggagaggaaataatgctgtaaatgttgagttacagaaagtccaatgtcaaatatagtttttttgtttcctttcaaatgtattacagactgtgccaaaacagttaccaattcacactgtcaatattaaagtataccatagtatacaaattagtcagtacttgctgttaattttaatatttctgatttaacagttagttattaagtggtacttcattgctgttttagccaacgttttaaaaataatttgggagtttgactattttggcttacgtactcatttccttttctctgctaaaaatgttttgcttgtgtgcgttcctgatttttgtcttgtataatcttgatctttgaaaaccctcaaacatgtattaaattgttgtaactttttttcattagagggaagacattaaggggattggggacatttgtttcacacatctgcagtaatatgagttaactaatatttaacaagctctttctttacattagctgctgttctcatttgtatgtattgtcatatttaatcctcagagtaacctagtgaggtaaatactgttgttgtcagcatggtgtaatcgaggaattgagtgagttgagcagaaaagttaggaaacttgctcagggtgataatacagttaggagtgtcagggcccatggacaaatcttgtcagtctccagaacctaagatatactacgtcactgacagcttgaacatttgtatttattgtacagaataaattt

SEQ ID NO: 4213 - DNA, 2539 bp, Homo sapiens
  source 1..2539: mol_type = genomic DNA
cacaagctccaaagtggaattggccggctgattctgaaggaagaaatgaaggcccggtcgagctcctatgcagatccctggacccctccccggagctccaccagcagccgggaagccctgcacacagctggctatgagatgtccctcaatggctcccctcggtcgcactacctggctgacagtgatcctctcatctccaaatctgcctccctgcctgcctaccgaagaaatgggctgcacaggacacccagcgcagacctcttccactacgacagcatgaacgcagtcaactggggcatgcgagagtacaagatctacccttatgaactgctgctggtgactacaagaggaagaaaccgactgcccaaggatgtagacaggacccgtttagagcgccacctgtcccaggaagagttctaccaagtctttggcatgaccatctctgagtttgaccggctggccctctggaagaggaatgaactgaagaagcaagcccggctgttctaggcagaggctctataaatatatatgcatttatataaagatatatgtaaaatctctctactgaagctcggtataatcctctcttgtgtaatgggacacactgcctgccatgagacttgcttttctgtactgtcaggcaagcccacgtcatcgagatatttttatgctccttactttctcttttctaagtgctgtgggatctgggaagggatttgaggggactctgtccttttattggggatcctttttatactgaaacatctgtcctaacttgagtgccccaaggtccaactctctttcctaaagaaggtgcctgaagaagtctctcttctctctgcttcgtggcccctttcttaaatttctagggctgatgctgaccatgtggtttccacaccttattggccccagaggggccctcccatgggaagatctgcagcagtctccccaaatcagtgagcacctttgagcgcccacgaagaactttctcaacacccccaattaggagctcagtgctctcttggggcaatgcagttaaaagggtgagcctcaaatctagtcattacaccagtcaacagaagtggacagggcctaggcctctcctcagctccttaaccctcctccttctgccctggattgtaacctctcccttgtccaaatctaggattcctggtaggaaaaggaaaaggcccttcccttccctccaccacttccaactggcccctttgcctgacctggacttggagaaccagaggaaaagagagggagcggaagtgggagatggagcagggcacctgttagaatcagagctgcaggatttcttgggaccctcctctctccctcactgctcccagcacctcctgacccttccctctttcaaggagaagcccatgattgcagcttgtattctttagccttattacaatctatgtgcctgacaactcaacacaccgcagggctaatgttcccaccagagctccaactgaacaaccagacagacaactctcatcatcctccagagagaaaataggccgtgtctcaaagaaaggttcttggtctatgcctctggtctgtgggctggcagggcaaccataccatacccccgccagtcctcggctcctgctgcaaagttggccatgtttcacagggaaacttttggaagagtggctgcttatgagattccaaaatgaagtgttggccaacaccgctcatggccatcctggattttcccagtggcttcccttcctgctcgcctccctgaacaggggagaaagcttaacctctcttctcctctccaaacctttcaccttgaatgggtaatgtttggtgggggctgttccttcttggagaagccttgagtcggaccattttgagatcatggaggaaggatgaagaagtgaaaatgacaataatgactctcaagaggctggcgatgtgacatggcaaatgtagaactgacttaaattgaacaaaccctcactgagcacctctgatgttgagcacctgctgaatactgagcactgaatgggggagggggaggggagcacggggtgagtcaacctgggactcggtctcagggatatgcctaccaatagcgggtatcgtaaggcatgtacccaaacataacggatgtaaggcagaaagtgatcggagaaggaatgagaaagtgtgcgtgatgttaatgaaaagtcatatgcagctagagcagacccaggaaagctttctggaagagattgcatctgaggaaattcaggaaggatctttgtagattggggggagattctaaattgaaggggtgatggggtgaggggccagagggaagtctgctgtgttctcatgtaggatgtcagccctccctgcaacttctctttttggccaatgtcttttcactttcctgaccctttagaatcatccccagccagacgcaatcatggaagttgccttattgtcactggttaagaacttggcgagattgaagggcttttgttattgttgttggatatttttgtttcccataaaagcacatcatttcaaccct

SEQ ID NO: 4214 - DNA, 3498 bp, Homo sapiens
  source 1..3498: mol_type = genomic DNA
gtggagagccggccgacgggagccgcggcggagcctgttgagctcgcgcgggctgccgggagtggtctctgaggcggcggcggcggcggggatcgtctccggcactgacgcaccatgtcggtcagtgtccatgagacccgcaagtcgcggagcagcacggggtccatgaacgtcaccctcttccacaaggcctcccacccggactgtgtgctggcccacctcaacacgcttcgcaagcactgcatgttcaccgacgtcacactctgggcgggcgaccgtgccttcccctgtcaccgtgccgtgctggccgcctctagccgctattttgaggccatgttcagccatggccttcgggagagccgggatgacactgtcaacttccaggacaacctgcacccggaggtgctggagctgctgctggactttgcctactcctcacgcatcgccatcaacgaggagaacgctgagtcactgctggaggcaggcgacatgctgcagttccacgatgtgcgggatgctgccgccgagttcctggagaagaaccttttcccctccaactgcctgggcatgatgctgctctcggacgcccaccagtgccgccggctgtatgagttctcctggcgcatgtgcctggtgcactttgagacggtgaggcagagcgaggacttcaacagcctgtccaaggacacactgctggacctcatctcgagtgatgagctggagaccgaggacgagcgggtggtcttcgaggccatcctccagtgggtgaagcacgacctggagccacggaaggtccacttgcccgagctcctccgcagcgtgcgtctggccttgctgccgtccgactgcctgcaggaggccgtctccagcgaggccctcctcatggcagacgagcgcaccaagcttatcatggatgaggccctgcgctgcaagaccaggatcctgcagaatgatggcgtggtcaccagcccctgtgcccggccacgcaaggcgggccacacgctactcatcctggggggccagaccttcatgtgtgacaagatctaccaggtggaccacaaggccaaggagatcatccccaaggccgacctgcccagcccccggaaggagttcagcgcctcagcgatcggctgcaaggtctatgtgacggggggcaggggctccgagaacggggtctccaaggatgtctgggtgtacgacaccgtacatgaggaatggtccaaggcggcgcccatgctgattgcccgctttggccatggctcagctgagctggagaactgcctctatgtggtggggggacacacatccctggcaggggtcttcccggcctcgccttctgtctccctgaaacaagtggagaaatacgaccctggggccaacaagtggatgatggtggcccccttgcgggatggcgtcagcaatgccgcagtggtgagtgccaagctgaagctctttgttttcggaggaaccagcatccaccgggacatggtgtccaaggtccagtgctatgacccctcggagaacaggtggacgatcaaggccgagtgcccccagccttggcggtacacagccgctgccgtcctgggcagccagatcttcatcatgggaggtgacacggaattcacagccgcctcggcctaccgctttgactgtgagaccaaccagtggacgcggattggggacatgactgccaagcgcatgtcctgccatgccctggcttccggcaacaagctctatgtggtcgggggctactttgggacccagaggtgtaagactctggactgctatgaccccacttcagatacatggaactgcatcaccacagtgccctactcacttatccccacggcctttgtcagcacctggaagcacctgcccgcgtgaggagcacctgctgagcccagccagaccgcggccttcagtgtcacagcgtggccttgcttgtctgccacagcgggagctaagccggccctgggccagcactccgagaggtggaaggggccctgccagctctggggagcagcagccttgggctgttctgagctttaggcaagagaagagaagcatctcttgcatccgtgcccctgggggcctcttcagctttgcagtggtttgtgggaagacatacctcccagaggggcatggactgccaccaggactgaccctggcgtcggggagaaggacacttgcagagccttgagatcacctgtttggcaggtcctggactggggccgggcaggcaggggcagggaggcgccccgggtgggctttggggctgcggcactgccacacatcctttccctcctggcctgccctgctggggctctactgccatctatagatggtgtcctgggcctgggaaactaggttcccaggggttgagaccagaaaggtgaccaagacagattttttaaggtgcagaaactgcaggggggcctcagtgacatccatgaggccttattagcaaaggacacccagacctccaaggtttgtgggccccttccacaaagctgtaagtcccagcccacctactcagggccttgctcagtgctgtggcccggtggggacacagttgctcgtggccactcagtggagctgggcctgcagcagactcaaggctccgagtgccctgggggtcacccctcccctcccctcctcagagcccaccctgagaggcagcagtgacccccatggcacacacctgccaacagcactgggggcttctccccaggagaccacgctgccctccaagaccaggagcagctgtgagctggagacagcagagggaccccagggtgtcccctgcagatcccaccagggccgcatccatctcagtgtggaggacagtgacgggaccctcaccatcctcttgcgttttggcccccatttgctccctgagctccaagataagaatggccccgagagaactgctgaacatttgttcattgctgtcacctcctgagtcactggggtccctcaccagcacctccctgacacctgggctatggagaggttggcgcctgtcagtgaccatcctaatgcctctcgctcactcccaagccaccatttgagagggaggggtgttggtgccctgacagggactgggcagggtgtccaaacttggggcttcccaggcacctgcagtgtgaacactgcttggctggctcaagattagggccgcggagggggctgtgcacataccagttacttaagcagccacgagtgtcccccatgccttggtgcgggtcctggaggcctcttgggggtgggacctttgggcagggtttgcccactgacacgcccgccatggggcactggctgcatggggctccttggaccctgtagacccagcaggagcctggccgcggggactgcagggagggtgcctggacccgtggggttgcttcattgagataaagcacacttatcacatagcacaaaggacgtgccatggtgctttccccaaaagttgtgttgcttttatcagttttctaactt

SEQ ID NO: 4215 - DNA, 2000 bp, Homo sapiens
  source 1..2000: mol_type = genomic DNA
gtagctgggactacacgcacgcaccaccatgcccagctaatttttgtattagtagagacggggtttcaccatgttggccagggttgtctctatctcttgacctcatgatcagcctgccttggcctcccaaagtactgcgattacaggcgtgagccaccacgcctggcggggatgcttaaatgtagcccaatcctccagtaaagaatactaagaaaaagtgtttggaaccgaaccaaaataaaaacttgcgtaccagaagtttgcaggtaatacagatatgcgtacatgactggtgttcagctatttaggtggacttgcttgtctctgcttacctgtgttgctgatgctggtcagcagtggagaaaactgagattagatgctgctaatctcagatgggaggataatttcttaggaggaaggacatttcttgagtcatcagctccagattcctttaaagtggtgaggcttcagcccagagggcgactaacatgagaattcctgtttgtgaggtcattgtcatgacctcatagccaggctgttcaaaatgtttgcccagcttctggcaggatatgagctgatgcctgccccgattctacagacaccatgagatttaatccagagactgacttcactatagaacccacagttgtatcaatggttggggaaagatagtggcaacaggcaaaggagaaacagctctgacatacaaagaaaatgagtatgctaaagccaagtgggcttaaggcccccaccaagatcctgaagcctggaagcacagctctgaagacacctacggctgttgtagctccagtagaaaaaaccatatccagtgaaaaagcatcaagcactccatcatctgagactcaggaggaatttgtggatgactttcgagttggggagcgagtttgggtgaatggaaataagcctggatttatccagtttcttggagaaacccagtttgcaccaggccagtgggctggaattgttttagatgaacccataggcaagaacgatggttcggtggcaggagttcggtatttccagtgtgaacctttaaagggcatatttacccgaccttcaaagttaacaaggaaggtgcaagcagaagatgaagctaatggcctgcagacaacgcccgcctcccgagctacttcaccgctgtgcacttctacggccagcatggtgtcttcctccccctccaccccttcaaacatccctcagaaaccatcacagccagcagcaaaggaaccttcagctacgcctccgatcagcaaccttacaaaaactgccagtgaatctatctccaacctttcagaggctggctcaatcaagaaaggagaaagagagctcaaaatcggagacagagtattggttggtggcactaaggctggtgtagtccggtttcttggggagaccgactttgccaagggggagtggtgtggcgtggagttagatgagccacttgggaagaatgatggcgctgttgctggaacaaggtattttcagtgtcaacccaaatatggcttgttcgctcctgtccacaaagttaccaagattggcttcccttccactacaccagccaaagccaaggccaacgcagtgaggcgagtgatggcgaccacgtccgccagcctgaagcgcagcccttctgcctcttccctcagctccatgagctcagtggcctcctctgtgagcagcaggcccagtcggacaggactacatgtcctggaattggaagccaaaatggaccagctgcgaacaatggtggaagctgctgacagggagaaggtggagcttctcaaccagcttgaagaggagaaaaggaaggttgaggaccttcagttccgggttgaagaagaatcaattaccaaaggtgatcttgagcaaaagagccagatttctgaagatcctgagaatgtaagagggcacttaactgtgtggatatttcccttgttaacaaagattgatcacagattaaaatgcttattgatatactcaaa

SEQ ID NO: 4216 - DNA, 4102 bp, Homo sapiens
  source 1..4102: mol_type = genomic DNA
ctactgtgtgctaggtacacggcgttagaggggggtagggatggatgtggatagaatattgacgtatagaagcctgtctttgtctcaagatacacacccatttcaggagcagtgagttttcaatgcctgaagaaacaagggctccaggattcagagcccctttaccctagggaagaaagaagaggttttcttccctcccctcttttacatccagttcccctgctccatttcaaagcgttggcggtaaagaatgcatgttgagtatcaatattccgtaaagcgaaagagcgtaaagttattttatgaaactggtgaagcatgtttcagcggtcgaaccaagatttaaagttaggtccctaccgcaaattcagcgctctttcttatggtggttactctgggtcctggacctgactgcctcattctggaggcttccagacagccacagttagtgcccaaacctgagaggatggcttcagatggagcatctgcattgccgggaccggatatgagcatgaaacctagtgccgccccgtctccatcccctgcacttccctttctcccaccaacttctgacccaccagaccacccacccagggagccacctccacagcccatcatgccttcagtattctctccagacaaccctctgatgctctctgctttccccagctcactgttggtgacaggggatgggggcccttgcctcagtggggctggggctggcaaggtcattgtcaaagtcaagacagaaggggggtcagctgagccctctcaaactcagaactttatccttactcagactgccctcaattcgactgccccgggcactccctgtggaggccttgagggtcctgcacctccatttgtgacagcatctaatgtgaagaccattctgccctctaaggctgttggtgtcagccaggagggtcctccaggccttccgcctcagcctccaccaccagttgctcaactggtccccattgtgcccctggaaaaagcttggccagggccacatgggacaaccggggaaggaggtcctgtggccactctatccaagccttccctaggtgaccgctccaaaatttccaaggacgtttatgagaacttccgtcagtggcagcgttacaaagccttggcccggaggcacctatcccagagtcctgacacagaagctctttcctgttttcttatcccagtgcttcgttccctggcccggctgaagcccactatgaccctggaggagggactgccattggctgtgcaggagtgggagcacaccagcaactttgaccggatgatcttttatgagatggcagaaaggttcatggagtttgaggctgaggagatgcagattcagaacacacagctgatgaatgggtctcagggcctgtctcctgcaacccctttgaaacttgatcctctagggcccctggcctctgaggtttgccagcagccagtgtacattccgaagaaggcagcctccaagacacgggccccccgccggcgtcagcgtaaagcccagagacctcctgctcctgaggcacccaaggagatcccaccagaagctgtgaaggagtatgttgacatcatggaatggctggtggggactcacttggccactggggagtcagatggaaaacaagaggaagaagggcagcagcaggaggaggaagggatgtatccagatccaggtctcctgagctacatcaatgagctgtgttctcagaaggtctttgtctccaaggtggaggctgtcattcaccctcaatttctggcagatctgctgtccccagaaaaacagagagatcccttggccttaattgaggagctagagcaagaagaaggactcactcttgcccagctggtccagaagcgactcatggccttggaagaggaggaagatgcagaggcgcctccaagtttcagtggcgctcagttggactcaagtccttctggttctgttgaggatgaagatggggatgggcggcttcggccctcacctgggcttcagggggctgggggcgccgcttgccttggaaaggtttcttcttcaggaaaacgggcaagagaagtgcatggtgggcaggagcaagccctagatagccccagagggatgcacagggatgggaacactctgccatcccccagcagctgggacctgcagccagaacttgcagctccacagggaactccgggacccttgggtgtggagaggagagggtctgggaaggttataaaccaggtatctctacatcaggatggccatctaggaggcgctgggcctcctgggcactgcctggtggctgataggacttcagaggctctgcccctttgttggcagggaggcttccagcctgagagcactcccagtttggatgctggacttgcagagctggctcctctgcaaggacaagggttagaaaagcaagtcctgggattgcagaaaggacaacaaacagggggtcgtggagtgcttcctcaagggaaggagcctttagcagtgccctgggaaggctcttcaggagccatgtggggagatgacagaggtacccccatggctcagagttatgatcagaatccttcccctagagcagctggggagagggacgatgtctgtctcagcccaggagtttggctgagcagtgagatggatgctgtaggcttggagctgcctgtacaaatagaggaggtcatagagagcttccaagttgagaagtgtgtaactgagtatcaggaaggctgccagggactgggctccaggggcaacatttccctgggtcctggagaaaccctagtacctggggatacggagagcagtgtgattccctgtggaggcacagttgcggcagctgccctagaaaagagaaactattgcagcttgccaggacctttgagggccaacagcccacccttgaggtccaaagaaaatcaagaacagagctgtgaaaccgtagggcatcccagtgatctgtgggcagaaggttgcttcccattgctagaaagtggtgattccacactggggtcttccaaagaaacccttccacccacatgccaaggcaatctccttatcatggggactgaggatgcctcctccttgcctgaagccagtcaagaggcagggagcagaggcaattccttttctcctctgttggaaaccatagaacctgtcaacatactagatgttaaagatgactgtggcctccaactaagggtcagcgaggacacctgcccactgaatgttcattcttatgacccccaaggagaaggcagggtggatcctgatctgtccaagcctaaaaaccttgctcctttacaagagagtcaggagtcttacacaactgggactcccaaagcaacatcttctcaccagggccttggaagcactttgcctagaaggggaaccaggaatgccatagttccgagagaaacttctgttagtaaaacacacaggtcagcagacagggccaaaggaaaggagaaaaagaaaaaggaagcagaggaagaggatgaggaactctccaactttgcttacctcttggcctctaaacttagcctctcaccaagggagcatcccctcagtcctcaccatgcctcaggaggtcagggcagccagagagcatcccacctgctccctgctggagcaaaaggccccagcaaacttccatatcctgttgccaagtctgggaagcgagctctagctggaggtccagcccctactgaaaagacaccccactcaggagctcaacttggggtccccagggagaaacccctagctctgggagtagttcgaccctcacagcctcgtaaaaggcggtgtgacagttttgtcacgggcagaaggaagaaacgacgtcgtagccagtagggagcagcgggaccatctgaccccacttgccagtccctaaaggtgggtgccccagagtagattccacccctgctgcccaccaatggagaatcccaatgttgaatctcatcccaatgttgttttgttgttctgcaaaagtggcaagcatggagagagaggtcagactggctaggctgcagggggaattacctttggaaggagctatatagaaaaaaaatgaataaagtgttttgttgg

SEQ ID NO: 4217 - DNA, 1677 bp, Homo sapiens
  source 1..1677: mol_type = genomic DNA
ctcaatagccaatgtagaaataaaaacccttttgcagcggggcctcgacctccccatcatcagtttttccagaggcctcaaatacagcctcctagagctaccatcccgaacagcagtccttccattcgtcctggtgcacagacacccactgcagtgtaccaggctaatcagcacatcatgatggttaaccatctgcccatgccgtacccagtgccccaggggcctcagtactgtataccacagtaccgtcatagtggccctccttatgttgggcccccccaacaatatccagttcaaccaccggggccaggtcctttttatcctggaccaggacctggggacttccccaatgcttatggaacgcctttttacccaagtcagccggtgtatcagtcagcacctatcatagtgcctacgcagcaacagccgcctccagccaagagagagaaaaaaactataagaattcgggatccaaaccagggaggtaaagacataacagaggagattatgtctggaggtggcagcagaaatcctactccacccataggaagacccacgtccacacctactcctcctcagcagctgcccagccaggtccccgagcacagccctgtggtttatgggactgtggagagcgctcatcttgctgccagcacccctgtcactgcagctagcgaccagaagcaagaggagaagccaaaaccagatccagtgttaaagtctccttccccagtccttaggctagtcctcagtggagagaagaaagaacaagaaggccagacatctgaaactactgcaatagtatccatagcagagcttcctctgcctccatcacctaccactgtttcttctgttgctcgaagtacaattgcagcccccacctcttctgctcttagtagccaaccaatattcaccactgctatagatgacagatgtgaactctcatccccaagagaagacacaattcctatacccagcctcacatcttgcacagaaacatcagaccctttaccaacaaatgaaaatgatgatgatatatgcaagaaaccctgtagtgtagcacctaatgatattccactggtttctagtactaacctaattaatgaaataaatggagttagcgaaaaattatcagccacggagagcattgtggaaatagtaaaacaggaagtattgccattgactcttgaattggagattctcgaaaatcccccagaagaaatgaaactggagtgtatcccagctcccatcaccccttccacagttccttcctttcctccaactcctccaactcctccagcttctcctcctcacactccagtcattgttcctgctgctgccactactgttagttctccgagtgctgccatcacagtccagagagtcctagaggaggacgagagcataagaacttgccttagtgaagatgcaaaagagattcagaacaaaatagaggtagaagcagatgggcaaacagaagagattttggattctcaaaacttaaattcaagaaggagccctgtcccagaaacatcgaatgaatgctgaaattcctagtctggtttcttcagtggtgtgtttgtgttttagtacaacctgcaaaagagttactccattgtctaaaaatgcaaatgagaatttccaaatatacaaaatgcctccaaggtatatgtcacg

SEQ ID NO: 4218 - DNA, 791 bp, Homo sapiens
  source 1..791: mol_type = genomic DNA
cgaaatggcgctgctggccgaacacttgctgaagccgctgcccgcggacaagcagatcgagaccgggcccttcctcgaggcggtgtcccacctgccgcccttcttcgattgccttgggtccccagtgtttactcccatcaaggcagacataagcggcaacatcacgatgaggaagctgagactcagaggggttgaaggactcgcttaaggtcacaagcaagtacgtggcaaagctgggattcagacccaggcctacctggctccatctcagaggccttcgttcctggacttcttggaatcctcggaacctatttccacttgtccaccaaagcaaaacttcagatacttggtgtctgaggcagtgtcagtagtggctggagaacatgaactctgtaccaactgtgtgaccttgggcaagtccgtgctcctctgtgagcctcagtgtctctgcctgtaaaatgggataatgacagcaacatcaggtttgccaccaggatcatataagaaaatcaaagctgtgtacgacaccaacccagccaagttccggaccctgcagaacatcctggaggtggagaaagaaatgtatggagcagagtggcccaaagtaggggccacactggcgctgatgtggctgaaaagaggcctccgcttcatccaggtcttcctccagagcatctgcgacggggagcgggacgagaaccaccccaacctcatccgtgtcaacgccaccaaggcctacgagatggccctcaagaagtaccatggctggatcgtgcagaagatcttccagg

SEQ ID NO: 4219 - DNA, 2716 bp, Homo sapiens
  source 1..2716: mol_type = genomic DNA
gcttccttggattccgcgcttggcaacggctcggcgtcgcgctttggccaaccgctgcgtcgtccctgggcccgaataactgtcgcccgcttccctcagcgtgaggtacaaatgatgcaaaatgtgcacctggctccagagacagatgaagatgatctttattccggctataatgactacaatccaatctatgatatcgaggaattggagaatgatgcagcttttcagcaagctgtgaggactagtcatggcagaagacctccatccaagacatctctggcatcatcaataggaagaccaatgacaggggctattcaggatggagttactagacccatgacagcagtgagagcagctggttttaccaaagcagctttgagaggctctgcatttgacccccttagtcagtcaaggggccctgcttcccctttggaagccaagaaaaaagatagcccagaggaaaaaataaagcaattagagaaggaagtaaatgagttggtagaagaaagctgtattgccaatagttgtggagacttaaaattggccttagaaaaggcaaaagatgcaggaagaaaagagagagtcctggtgagacagcgagaacaagttacaactccagaaaatatcaatttggatttaacttactcagttcttttcaatttggccagtcagtattcagttaatgaaatgtatgccgaagcacttaacacttatcaagttatagtcaaaaataagatgtttagcaatgcaggaatattgaaaatgaatatgggaaatatctatttaaagcaaagaaattattccaaagccattaaattctaccgaatggcattagaccaagttccaagtgtcaataagcaaatgaggattaaaataatgcagaatattggagttacatttattcaggctggtcagtattcagatgctattaattcatatgagcacataatgagcatggcaccaaatctgaaggcaggctacaacctaactatctgttattttgctattggagaccgagaaaaaatgaagaaggcattccaaaaattgattactgttccattagaaattgatgaagataaatatatttcaccaagtgatgatcctcatactaacttagtaactgaagctataaaaaatgatcacctcaggcaaatggaacgtgaaaggaaagccatggcagaaaaatatattatgacatctgcaaaactcattgctcctgtaattgaaacatcttttgctgcaggttatgattggtgcgtggaagtggtgaaagcttctcaatatgtagagctagccaatgatctggaaataaacaaagcagttacatacttgagacaaaaagactataaccaagctgtagagatcttaaaagtgttggaaaaaaaggacagtagagtgaaaagtgcagctgcaaccaatctctcagccctgtattatatgggaaaggattttgcacaagccagcagctatgcagatatagctgtgaactctgatagatataatccagcagctcttactaataaagggaatacagtttttgcaaatggtgattatgagaaggccgctgaattctataaagaggctctaagaaatgattcttcttgtactgaagcactttataatattggccttacctatgagaaactaaatcggctagatgaggctttggactgtttcctgaaacttcacgcaatcctacgaaacagtgccgaagttctttaccagatagcaaatatatatgaattaatggaaaatcccagtcaagctattgaatggctaatgcaggtggtcagtgttattccaaccgatcctcaagttttatctaagctaggagaattatatgatcgtgaaggagataaatctcaagcatttcaatattactatgagtcatataggtattttccttgtaatattgaagtcattgagtggcttggagcctattacattgacacccaattttgggaaaaagctattcagtactttgaaagagcttctcttatacagcctacacaagtgaaatggcagctgatggtagctagttgtttcagaagaagtggtaactaccaaaaagcattagatacttacaaagatactcacagaaaatttccagaaaatgtcgaatgtctgcgtttcttagttcgtctctgcacagatcttggattaaaagatgctcaagaatatgccagaaaactgaagaggttggaaaaaatgaaagaaataagggaacagcgcataaagtcaggcagagatggcagtgggggctcccgtggcaaaagagaaggaagtgctagcggtgatagtggccagaactatagtgccagtagtaaaggtgaacgactaagtgccagactcagagctttacctgggacaaatgaaccttatgaaagtagcagtaacaaagaaatagatgcctcctatgtggacccacttggccctcaaatagaacgaccaaaaactgcagccaagaaaaggatcgatgaggatgattttgctgatgaagaattaggagatgatttgcttccagaataatattcactttaatatttattaaaggaaagaaattgccttatgagatcatcctcatgttaaaccttggattaaatatctaacctgtaattattttttttcactgtcaaaacttaagtaagtgtattctattctgtatgtatgcatttaagttgtttttttcttttaaggaataaaaacaggtaaaact

SEQ ID NO: 4220 - DNA, 1450 bp, Homo sapiens
  source 1..1450: mol_type = genomic DNA
aacttgtttctggtggagcggaaggcgcgagctgcggaccctcacgcagagatttgttggtgttaacgcatctgacatcaactattcagcaggccgctatgacccctcagttaagcctccctttgacataggtttcgaaggcattggggaggtggtggccctaggcctctctgctagtgccagatacacagttggccaagctgtggcttacatggcacctggttcttttgctgagtacacagttgtgcctgccagcattgcaactccagtgccctcagtgaaacccgagtatcttaccctgctggtaagtggcaccaccgcatacatcagcctgaaagagctcggaggactgtcggaagggaaaaaagttttggtgacagcagcagctgggggaacgggccagtttgccatgcagctttcaaagaaggcaaagtgccatgtaattggaacctgctcttctgatgaaaagtctgcttttctgaaatctcttggctgtgatcgtcctatcaactataaaactgaacccgtaggtaccgtccttaagcaggagtaccctgaaggtgtcgatgtggtctatgaatctgttgggggagccatgtttgacttggctgtagacgccctggctacgaaagggcgcttgatagtaatagggtttatctctggctaccaaactcctactggcctttcgcctgtgaaagcaggaacattgccagccaaactgctcaagaaatctgccagcgtacagggcttcttcctgaaccattacctttctaagtatcaagcagccatgagccacttgctcgagatgtgtgtgagcggagacctggtttgtgaggtggaccttggagatctgtctccagagggcaggtttactggcctggagtccatattccgtgctgtcaattatatgtacatgggaaaaaacactggaaaaattgtagttgaattacctcactctgtcaacagtaagctgtaaaaacagaacaatgacataaatcaagggagaaagaaaatgggcactttatgtctcagaattactcaaatcaatttatttttagttggtaatggatataatatttcttaaaacaaaagtaaggtgttaatgaataggtctctccttctcctcctcctcctcctcttcccttgggggaaaaaaaaaaatgtgctaataaaacttccctccatggctaagagggaaaacgcttacattcaattctttagtcatggatggtctcgttccagatgttattgttccagggaactaaattcattcctgatgccagatctgatcgagtcagtatgtcttcagcttgatcagattttaaaatcagttttgaaagtggttcccgacttctttgctttgggagaatttggtcttatgctcataagcagttcatgagtgacaagtgtagcaaaagccagccatatattttcagaatctatatcctca

SEQ ID NO: 4221 - DNA, 1406 bp, Homo sapiens
  source 1..1406: mol_type = genomic DNA
agaccaaccagacccagatgccattaagatgtttgtcggacagatcccccggtcatggtcggaaaaggagctgaaagaactttttgagccttacggagccgtctaccagatcaacgtcctccgggaccggagtcagaaccctccgcagagtaaagatgcatcatcccattcagatgaaacctgcagatagtgaaaagtccaacgctgtggaagacagaaaattgttcataggaatggtatcgaagaaatgtaatgagaacgacatcagggtgatgttctctccatttggccagatagaagaatgccggatcctccggggacctgatgggctgagtcgaggctgtgcgtttgtcacattttctacaagggcaatggcacagaatgcaatcaaagccatgcatcagtctcagaccatggagggctgctcttcacctatcgtggtgaagtttgctgacactcagaaggacaaagagcaaaggcgcctccagcagcagctcgctcagcagatgcagcagctcaacactgccacctgggggaacctgacagggctgggcggactgaccccacagtatctggcgctcctgcagcaggccacctcctccagcaacctgggtgcgttcagcggcattcaacaaatggcaggcatgaatgctttacagttgcagaacctggcgacgctggctgctgctgcagctgcggcccagacctcagccaccagcaccaatgcaaaccctctctctaccacgagcagcgccctgggagccctcacgagtcccgtggctgcttcaacccccaactccactgctggtgcagccatgaactccttgacctctctcgggactctgcaaggactggctggagccactgttggactgaataatattaatgcactagcagttgctcaaatgctctcaggtatggcggctctgaatggaggacttggcgccacaggcttgacgaatggcacggctggcaccatggacgccctcacccaggcctactcaggaattcaacagtacgcagccgccgcgctgcccactctgtacagccagagcctgctgcagcagcagagcgctgcaggcagccagaaggaaggtccagagggggcaaacctctttatttaccaccttccacaggaatttggagaccaggacattctgcagatgttcatgccttttggaaatgttatctctgctaaagtcttcattgacaaacagaccaatctgagcaagtgctttggttttgttagctacgacaatccagtctctgcacaagctgctatccaagctatgaatggctttcagatcggcatgaaacgcttgaaggtgcagctgaagcgttccaaaaacgacagcaaaccttactgatcctaaccccagaggctccctgctctcattttagctttc

SEQ ID NO: 4222 - DNA, 1696 bp, Homo sapiens
  source 1..1696: mol_type = genomic DNA
ttgtgggttgctgggcggcccggtctcggagaagaggggagagtggcgggccgctgaataagcttccaaaatgatgcccacaccagttatcctattgaaagaggggactgatagctcccaaggcatcccccagcttgtgagtaacatcagtgcctgccaggtgattgctgaggctgtaagaactaccctgggtccccgtggcatggacaagcttattgtagatggcagagtttctgaagcaggtgaaaccctatgtggaggaaggtttacacccccagatcatcattcgagctttccgcacagccacccagctggcagttaacaagatcaaagagattgctgtgaccgtgaagaaggcagataaagtggagcagaggaagctgctggaaaagtgtgccatgaccgctctgagctccaagctgatctcccagcagaaagctttctttgctaagatggtggtggatgcagtgatgatgctcgatgatttgctgcagcttaaaatgattggaatcaagaaggtacagggtggagccctcgaggattctcagctggtagctggtgttgcattcaagaagactttctcttacgctgggtttgaaatgcaacccaaaaagtaccacaatcccaagattgcccttttgaatgtcgagctcgagttgaaagctgagaaagacaatgctgagataagagtccacacagttgaggattatcaggcaattgttgatgctgagtggaacattctctatgacaagttagagaagatccatcattctggagccaaagttgtcttgtccaaactccccattggggatgtggccacccagtactttgctgacagggacatgttctgtgctggccgagtacctgaggaggatctgaagaggacaatgatggcctgtggaggctcaatccagaccagtgtgaatgctctgtcagcagatgtgctgggtcgatgccaggtgtttgaagagacccagattggaggcgagaggtacaatttttttactggctgccccaaggccaagacatgcaccttcattctccgtggcggcgccgagcagtttatggaggagacagagcggtccctgcatgatgccatcatgatcgtcaggagggccatcaagaatgattcagtggtggctggtggcggggccattgagatggaactctccaagtacctgcgggattactcaaggactattccaggaaaacagcagctgttgattggggcatatgccaaggccttggagattatcccacgccagctgtgtgacaatgctggctttgatgccacaaacattctcaacaagctgcgggctcggcatgcccaggggggtacatggtatggagtagacatcaacaacgaggacattgctgacaactttgaagctttcgtgtgggagccagctatggtgcggatcaatgcgctgacagcagcctctgaggctgcgtgcctgatcgtgtctgtagatgaaaccatcaagaacccccgctcgactgtggatgctcccacagcagcaggccggggccgtggtcgtggccgcccccactgagaggcaccccacccatcacatggctggctggctgctgggtgcacttaccctccttggcttggttacttcattttacaaggaaggggtagtaattggcccactctcttcttactggaggctatttaaataaaatgtaagacttc

SEQ ID NO: 4223 - DNA, 3652 bp, Homo sapiens
  source 1..3652: mol_type = genomic DNA
gccgtaaagcgctccgaggcggagccgccgccgcgcggccggggcttctcactctgacgggcccgcgcgcacgatggccggcgccgcgccgcgggtccgctacctggcgggcttctgctgccctctcgggggcctggcggcgggcaagccccgcgtgctgtgccatgaggcagaggtcttcctgtccaccgggagcgagctcgtctacgtgtacgaccaggagggcgggctgctgaccgcggcgttccggttccccgaccaggtgtggcacctggagctgctggcgccgcgcaggttgctgtacgcgctgtgcgcccggaggggcctctactgcctgtcgctggaccacccgggcaggagcaggtctacgagccaggatgacagggacagcgaggacggtgaccagccttcccccgtgatccctgtggaccccgatgcctgcatccttcccgatgctgcgctgtgcgcgttcaccttgctggacagtgtgctggtcaccctggtgcagggccctgcccgatggaagatgcagctgtttgagcagccctgtcctggggaggacccccggccaggaggccagatcggtgaggtggagctgtcctcctacacgcccccagccggggtcccaggaaagcctgcagccccccacttccttccagtgctgtgctctgtgtcaccatcaggctccagggtcccgcacgacctcctcgggggctccgggggcttcacgctggaggacgccctcttcgggctcctctttggagctgatgccaccctcctgcagtcacctgtggtcctctgtggtctccctgatggccagctctgctgtgtgatcctgaaggccctggtcacctccaggtcagcccctggtgacccaaatgcccttgtcaagatcctccatcacctggaggagcccgtcatcttcataggggccttgaagacagagccacaggctgcagaagctgcagagaattttctgcctgacgaggatgtgcactgtgactgcctggtggcctttggtcaccacggccggatgctggccatcaaggccagctgggatgagtccgggaagctggtgcccgagctgcgggagtactgcctcccaggccctgtgctctgcgctgcctgtggcgggggtggccgcgtgtaccacagcaccccttctgacctctgtgtggtggatctgtctcggggaagcaccccgctgggccctgagcagcccgaagaaggcccgggaggcctgccccccatgctgtgcccagccagcctgaacatctgcagtgtcgtctcgctgtccgcgtctcccaggacgcatgaaggtggcaccaagctcctggccctgtccgccaaaggccgcctgatgacctgcagcctggacctggactctgagatgcctggcccagccaggatgaccacagagagtgcaggtcagaaaataaaggagctgctgtctggaattggcaacatctctgagagagtgtcttttctaaagaaggcggttgaccagcggaacaaggcactgacaagcctcaacgaggccatgaacgtgagctgtgcactgctgtcaagcggcacgggccccagacccatctcctgcaccaccagcaccacctggagccgcctgcagacacaggatgtgctcatggccacctgcgtgctagagaacagcagcagcttcagcctggaccaggggtggaccctgtgcatccaggtgctcaccagctcctgtgctctcgacctggactcggcctgctccgccatcacctacaccatccccgtggaccagctcggccccggtgctcggcgggaggtgacgctacccctgggccctggtgagaacggcgggctcgacctgcccgtgaccgtgtcctgcacgctgttctacagtctcagggaggtggtgggcggggcccttgccccctcagactctgaggacccctttctggatgagtgcccctccgacgtcctgcccgagcaagagggtgtttgcctgcccctgagcaggcacacagtggacatgctgcagtgtctgcgcttccctggcctggccccgccacacacacgggccccctccccactcggccccacccgagaccctgtggccacttttctggaaacttgtcgggagcctggcagccagccagcaggacccgcctccctgcgggccgagtacctgcccccatctgtggcttccatcaaggtgtcggcggagctgctcagagctgccttgaaggacggccactcaggcgtgcccctgtgctgtgccaccctgcagtggctccttgctgagaatgctgctgtggacgtcgtgagggcccgagcactatcttccatccagggagtggcccctgatggcgccaacgttcacctcatcgtccgagaggtggccatgactgacctgtgcccagcagggcccatccaggccgtggagattcaagtggaaagctcctctctggccgacatttgcagggcgcaccatgccgttgtcgggcgcatgcagacgatggtgacagagcaggccacccagggctccagcgctcctgatctccgtgtgcagtacctccgccagatccacgccaaccacgagacactgctgcgggaggtgcagaccctgcgcgaccggctctgcacggaggatgaggccagctcctgtgccaccgcccagaggctgctacaggtgtaccggcagctgcgccaccccagcctcatcctgctgtgaccaggcgggcctgcccctgggctctggccacgcttccagcctctgtcacagcccccccaggcctcatgggttagagggaaaccgagctggcctggccagagccgtcagggaaggtaggacctggccacgtaggagcagaacgctcatgaaagtgcttggaggccgtggagcacaaagcagattctgattgggagcaaccgaggcgggctctgaacctggccggtccagcttcgcgtcctctgctggtgtctctccttctctgaccgcggccgcagcccctgcactcgccttcctcactgctgggcagccttcccaccaccgcagcagcccctgaggccaggaggcagtgcagggcattctggacccggagggccagagaaacaggatttctggggtttggacttggggtgagtttgtaactgttgctgccacaccaccaggagcaccggctgcccctctgggtggcactaccaggtgccccacggtacccttgtcacactgttcacacctgcccggctgcccactctgggaccccgaggtaggagggtgctccctgagaccaaagcacaaaacagcatgcagggagctcctgcaagtgcccgtggtctcgtgccacaccaaggaagggccagcgggtggcctgtggccggaatgctcaacaactaggtgcctccagccggggcagtacccagcactgtgcactattttcagggccactcagggtggcgctgtggcccgggggggggccctgagccccagcccccagcctcctccctcagcctgggctacggcccacctcctggtgctggtgttttcatctggggagggtgctcgcgccgctcccgctgcaggcactgtccgcgatgagtgcgggtaggagccgtgaggtgcttctctgctgtgacaaacgaccctgtctgtccgtgaaccttc

SEQ ID NO: 4224 - DNA, 5229 bp, Homo sapiens
  source 1..5229: mol_type = genomic DNA
gtcacgctctcccccgccccgagccgacgagccgggaggcgggaggcggcggccgcggcggctgctgctgctgcagtgggacaggtggcggcgaccggcggcgtccgaggagatttaatccagagactgacttcactatagaacccacagttgtatcaatggttggggaaagatagtggcaacaggcaaaggagaaacagctctgacatacaaagaaaatgagtatgctaaagccaagtgggcttaaggcccccaccaagatcctgaagcctggaagcacagctctgaagacacctacggctgttgtagctccagtagaaaaaaccatatccagtgaaaaagcatcaagcactccatcatctgagactcaggaggaatttgtggatgactttcgagttggggagcgagtttgggtgaatggaaataagcctggatttatccagtttcttggagaaacccagtttgcaccaggccagtgggctggaattgttttagatgaacccataggcaagaacgatggttcggtggcaggagttcggtatttccagtgtgaacctttaaagggcatatttacccgaccttcaaagttaacaaggaaggtgcaagcagaagatgaagctaatggcctgcagacaacgcccgcctcccgagctacttcaccgctgtgcacttctacggccagcatggtgtcttcctccccctccaccccttcaaacatccctcagaaaccatcacagccagcagcaaaggaaccttcagctacgcctccgatcagcaaccttacaaaaactgccagtgaatctatctccaacctttcagaggctggctcaatcaagaaaggagaaagagagctcaaaatcggagacagagtattggttggtggcactaaggctggtgtagtccggtttcttggggagaccgactttgccaagggggagtggtgtggcgtggagttagatgagccacttgggaagaatgatggcgctgttgctggaacaaggtattttcagtgtcaacccaaatatggcttgttcgctcctgtccacaaagttaccaagattggcttcccttccactacaccagccaaagccaaggccaacgcagtgaggcgagtgatggcgaccacgtccgccagcctgaagcgcagcccttctgcctcttccctcagctccatgagctcagtggcctcctctgtgagcagcaggcccagtcggacaggactattgactgaaacctcctcccgttacgccaggaagatctccggtaccactgccctccaggaggccctgaaggagaagcagcagcacattgagcagctgctggcggaacgggatctggagagggcggaggtggccaaggccacgagccacgtgggggagatagagcaggagctagctctggcccgggacggacatgaccagcatgtcctggaattggaagccaaaatggaccagctgcgaacaatggtggaagctgctgacagggagaaggtggagcttctcaaccagcttgaagaggagaaaaggaaggttgaggaccttcagttccgggttgaagaagaatcaattaccaaaggtgatcttgaggtggctacagtttcagaaaagtcacgtataatggaactggagaaagacctagcattgagagtacaggaagtagctgagctccgaagaaggctagagtccaataagcctgctggggatgtggacatgtcactttcccttttgcaagagataagctctttgcaagaaaagttagaagtcacccgtactgaccaccagagagaaataacttctctgaaggagcattttggagcccgggaagaaactcatcagaaggagataaaggctctgtataccgccacggaaaagctttccaaagagaacgagtcattgaaaagcaagctggagcatgccaacaaagagaactcagatgtgatagctctatggaagtccaaactggagactgccatcgcatcccaccagcaggcgatggaagaactgaaggtatctttcagcaaagggcttggaacagagacggcagaatttgctgaactaaaaacacaaatagagaaaatgagactagattaccaacacgaaatagaaaatttgcagaatcaacaagactctgaacgggctgcccatgctaaagagatggaagccttgagggctaaactgatgaaagttattaaagaaaaggaaaacagtctggaagccatcaggtcgaaactggacaaagcagaagaccagcatctcgtagaaatggaagacacgttaaacaaattacaggaagctgaaataaaggtaaaggagctagaggtactgcaagccaaatgcaatgaacaaaccaaggttattgataattttacatcacagctcaaggctactgaagaaaagctcttggatcttgatgcacttcggaaagccagttccgaaggtaaatcggaaatgaagaaacttagacagcagcttgaggcagctgagaaacagattaaacatttagagattgaaaagaatgctgaaagtagcaaggctagtagcattaccagagagctccaggggagagagctaaagcttactaaccttcaggaaaatttgagtgaagtcagtcaagtgaaagagactttggaaaaagaacttcagattttgaaagaaaagtttgctgaagcttcagaggaggcagtctctgttcagagaagtatgcaagaaactgtaaataagttacaccaaaaggaggaacagtttaacatgctgtcttctgacttggagaagctgagagaaaacttagcagatatggaggcaaaatttagagagaaagatgagagagaagagcagctgataaaggcaaaggaaaaactggaaaatgacattgcagaaataatgaagatgtcaggagataactcttctcagctgacaaaaatgaacgatgaattacgtctgaaagaaagagatgtagaagaattacagctaaaacttacaaaggctaatgaaaatgcaagttttctgcaaaaaagtattgaggacatgactgtcaaagctgaacagagccagcaagaagcagctaaaaagcatgaggaagaaaagaaagaattggagaggaaattgtcggacctggaaaagaaaatggaaacaagccacaaccagtgtcaggagctgaaagccaggtatgagagagccacttctgagacaaaaaccaagcatgaagaaatcctacagaacctccagaagacgctgctggacacagaggacaagctgaagggcgcacgggaggagaacagtggcttgctgcaggagctggaggagctgagaaagcaagccgacaaagccaaagctgctcaaacagcggaagatgccatgcagataatggaacagatgaccaaagagaagactgagactctggcctccttggaggacaccaagcaaacaaatgcaaaactacagaatgaattggacacacttaaagaaaacaacttgaaaaatgtggaagagctgaacaaatcaaaagaactcctgactgtagagaatcaaaaaatggaagaatttaggaaagaaatagaaaccctaaagcaggcagcagctcagaagtcccagcagctttcagcgttgcaagaagagaacgttaaacttgctgaggagctggggagaagcagggacgaagtcacaagtcatcaaaagctggaagaagaaagatctgtgctcaataatcagttgttagaaatgaaaaaaagagaatccaagttcataaaagacgcagatgaagagaaagcttccttgcagaaatccatcagtataactagtgccttactcacagaaaaggatgccgagctggagaaactgagaaatgaggtcacagtgctcaggggagaaaacgcctctgccaagtccttgcattcagttgttcagactctagagtctgataaggtgaagctcgagctcaaggtaaagaacttggagcttcaactcaaagaaaacaagaggcagctcagcagctcctcaggtaatacagacactcaggcagacgaggatgaaagagcccaggagagtcagattgatttcctaaattcagtaatagtggaccttcaaaggaagaatcaagacctcaagatgaaggtggagatgatgtcagaagcagccctgaatgggaacggggatgacctaaacaattatgacagtgatgatcaggagaaacagtccaagaagaaacctcgcctcttctgtgacatttgtgactgctttgatctccacgacacagaggattgtcctacccaggcacagatgtcagaggaccctccccattccacacaccatggcagtcggggtgaggaacgcccatactgtgaaatctgtgagatgtttggacactgggccaccaactgcaatgacgacgaaaccttctgatgaagcctccagtggagaactgggcttgctcagacgcactcgcattgacacaacgtaacaccagcattgtgtgtgcagacttcaggagaactcatgttattttttaaccccgtcaacaaatctaggaaaatattttgatcttcaacaaattgccctttagtctccccgtatgagttagaataataaatatttagtaggtgagttttcacctcgaattttgttttcttgatttttacgtttgaagacattgcaccagatgccattacatttattggccccccgaccttgtagaaaaacccctaccctcacaataccttatttaagtaactttaaattatgccgttacttttcatatttgcactaagatatttccaggctgcatttgtatatttagattttttggttaagctttgacactggaatgagttgaaaaaatgtgccattttgcattttcatctactcatttaaagtattttattcttattcaaagaaatatctgagctctttgcactacctgttatcagtagtgcctttacttcaggcttgataatacttaggtgtgattataaaatcatgaagcaggtaaagggaggggcaagcccccaaactgctgtggggacattttataatctatatgctgcacccacttaatctactgtggtgttttgtttattagttttgcataatttcagcttctatatattgtatgtatatattttttaaaaatctatattttgggaaaaaaacatacacaatgtgtctttctttttggacatttacctttttgaaaaagaaaacacttaaaatgatcattaggacataacagactagg

SEQ ID NO: 4225 - DNA, 735 bp, Homo sapiens
  source 1..735: mol_type = genomic DNA
caacggaccctacctcttgtagtgattctcggggccacgggcaccggcaaatccacgctggcgttgcagctaggccagcggctcggcggtgagatcgtcagcgctgactccatgcagttctagatgagcgcttggataagagggtggatgacatgcttgctgctgggctcttggaggaactaagagattttcacagacgctataatcagaagaatgtttcggaaaataggtattgaggctctgaaacaagtaactaagagatatgcccggaaacaaaaccgatgggttaaaaaccgttttttgagcagacctggtcccattgtcccccctgtctatggcttagaggtatctgatgtctcgaagtgggaagagtctgttcttgaacctgctcttgaaatcgtgcaaagtttcatccagggccacaagcctacagccactccaataaagatgccatacaatgaagctgagaacaagagaagttatcacctgtgtgacctctgtgatcgaatcatcattggggatcgcgaatgggcagcgcacataaaatccaaatcccacttgaaccaactgaagaaaagaagaagattggactcagatgctgtcaacaccatagaaagtcagagtgtttccccagaccataacaaagaacctaaagagaagggatccccagggcagaatgatcaagagctgaaatgcagcgtttaagagacatgtccagtggcctttggaaaggtg

SEQ ID NO: 4226 - DNA, 2299 bp, Homo sapiens
  source 1..2299: mol_type = genomic DNA
agttttgggccgagctagggcccgtgctggaagcagtcctttggtgctggtttcggggacaccttggcacgcctggagccccccacatggtggcctcgggcaggagcccacgtgttcctgggaggtagaaaggggcctactctctgtcctgcgcccagactggggctgggggacgggctcccggcggcaggcctgggcggcgctaagagaccatggcgagcccagggaaagacaattatcgaatgaagagctataagaacaatgctctaaaccctgaagaaatgagacgaagaagagaggaagagggcattcagctccggaagcagaagcgagagcaacaactttttaaacggagaaatgtggagctgattaatgaagaagctgccatgttcgatagtcttctcatggactcttatgtgagctctaccactggggagagtgtgatcacaagagagatggtggagatgctcttttctgatgattctgacctgcagttagcaaccacacagaaattccggaaactgctctccaaagagcctagtcctccaatagatgaagttatcaacactccaagagtggtggatcggttcgtggagtttctgaagaggaatgagaattgtacattacagtttgaagctgcctgggctctaacgaatattgcctctggaacctctcagcagaccaaaattgtcattgaagcaggggctgtccccatttttatagagctgcttaattcagactttgaggatgttcaggaacaggcagtctgggcactgggaaacatagctggagatagctctgtttgccgagattacgtcttgaactgttccatccttaatcctttgttaacactccttaccaagtccacacgactgacgatgacacggaatgcagtctgggccctgtcaaatctctgccgagggaaaaacccacccccagagtttgcaaaggtctctccttgtttgcctgtactgtctcgcctactcttcagcagcgactcggacttgctggcagatgcttgctgggccctttcttatctgtctgatggccccaatgagaagatccaggcagtcatagactccggagtctgccggagattggtagagctgctgatgcacaatgattacaaagtggcttctcctgccctgagagccgtgggtaacatcgtcactggggatgacatccagacccaggtcattcttaactgttcagccctaccttgccttctccacttgttgagcagtcccaaggagtcaatccggaaggaagcttgctggactatttcaaatattactgctggcaacagggctcaaatacaggctgttatagatgcaaatatcttccctgtgttgatcgaaatccttcagaaagcagagtttcgtacaaggaaagaggcagcctgggccatcaccaatgccacatcaggaggaacccctgagcagatcaggtacctggtctcactgggctgcatcaaacccctatgtgacttgctgactgtaatggattcgaagattgtgcaagtggccctcaatggactggagaacatcctgcggcttggagagcaagagggcaagcgcagtggctcaggggtcaatccttattgtggcctcatagaggaagcctatggcttggataaaattgagtttctccagagccacgagaaccaggagatctaccagaaggccttcgacctcattgagcactactttggtgtagaagacgatgatagcagcctggctccccaagtcgatgaaacgcaacagcagttcatcttccagcagcctgaggcccccatggagggcttccagctataatatctgcctccagggaggggaggggatgggaagcaccaccagccagcggaagagcagccctctggtgggcgggaaaccagtgtccccaccatcagccaccacacacctctgctgccctggagactgtgctcttgacctgctccgcccccttccctggagggagcaccctctggacagacagaaccatctgaggctcacctttgggttttgtgacaagaaggggacgtgttgggtttttcttccttacactatattttggctgcacacatgtctttaacccaggagcccaggggtagacaaaggaggactaaggtaatcaatttgcacctttttttatttttattttttttctttttttcttcagtggtgacttccttccctttatcttttttcattcttcccggtcctctgccctgatctgtgtaactcttatcttgggtacttgagcagacggtatattccagaggtgggaggtgggaggggaa

SEQ ID NO: 4227 - DNA, 1521 bp, Homo sapiens
  source 1..1521: mol_type = genomic DNA
ggcgacggggcgctctcgggctgccggcggggccgagcgccgcgcgtcccgagcatggcaggctccctgcctccctgcgtggtggactgtggcaccgggtataccaagcttggctacgcaggcaacactgagccccagttcattattccttcattggccgatacgacatggaatcattgaagactgggatcttatggaaaggttcatggagcaagtggtttttaaatatcttcgagctgaacctgaggaccattattttttaatgacagaacctccactcaatacaccagaaaacagagagtatcttgcagaaattatgtttgaatcatttaacgtaccaggactctacattgcagttcaggcagtgctggccttggcggcatcttggacatctcgacaagtgggtgaacgtacgttaacggggatagtcattgacagcggagatggagtcacccatgttatcccagtggcagaaggttatgtaattggaagctgcatcaaacacatcccgattgcaggtagagatattacgtatttcattcaacagctgctaagggagagggaggtgggaatccctcctgagcagtcactggagaccgcaaaagccattaaggagaaatactgttacatttgccccgatatagtcaaggaatttgccaagtatgatgtggatccccggaagtggatcaaacagtacacgggtatcaatgcgatcaaccagaagaagtttgttatagacgttggttacgaaagattcctgggacctgaaatattctttcacccggagtttgccaacccagactttatggagtccatctcagatgttgttgatgaagtaatacagaactgccccatcgatgtgcggcgcccgctgtataagaatgtcgtactctcaggaggctccaccatgttcagggatttcggacgccgactgcagagggatttgaagagagtggtggatgctaggctgaggctcagcgaggagctcagcggcgggaggatcaagccgaagcctgtggaggtccaggtggtcacgcatcacatgcagcgctacgccgtgtggttcggaggctccatgctggcctcgactcccgagttctttcaggtctgccacaccaagaaggactatgaagagtacgggcccagcatctgccgccacaaccccgtctttggagtcatgtcctagtgtctgcctgaacgcgtcgttcgatggtgtcacgttggggaacaagtgtccttcagaacccagagaaggccgccgttctgtaaatagcgacgtcggtgttgctgcccagcagcgtgcttgcattgccggtgcatgaggcgcggcgcgggcccttcagtaaaagccatttatccgtgtgccgaccgctgtctgccagcctcctccttctcccgccctcctcaccctcgctctccctcctcctcctcctccgagctgctagctgacaaatacaattctgaaggaatccaaatgtgactttgaaaattgttagagaaaacaacattagaaaatggcgc

SEQ ID NO: 4228 - DNA, 1096 bp, Homo sapiens
  source 1..1096: mol_type = genomic DNA
atgagccgggagcggggatccaggagcgaggagccgggagcggggaacagggagtcggggagccgggaaccagggctggcagcggccgccatgagcacggtggaccttgctcgcgtgggcgcgtgcatcctgaagcatgcggtgaccggggaggccgtggagctgcggagcctgtggcgggagcacgcgtgcgtggtggccgggctgcggcgcttcgggtgcgtggtgtgccgctggatcgcccaggacctcagcagccttgctgggctcctggaccaacacggcgtgcgcctggtgggcgtagggcccgaggccctgggtctgcaggagttcctggacggcgactacttcgcgggagagctctacctggatgagagcaagcagctttacaaggagctaggcttcaagcggtacaacagcctgagcatcctcccagcagctctggggaagcccgtgcgtgatgtggctgccaagtccccaggcgactacgtccccaaggagcacatcctgcaggtcctgggcatctctgcggaggtctgtgccagcgacccgcctcagtgtgacagagaggtgtgagggaggcgaaggccctggcctccgaggatctgggtggcgtctgctgccctaggtgtgctggaagtccacttggaagaactgttccggaggcgctgggtcgggatgccgaacctctcctgatccgccggcagcaacgagccattaaaactgcagttcctgaccacgcactgcttcgcaggctccgagccctgcatcctccacagcccccgccttgctcactgttgggccctcagggcgggcagggtggctgtgagtcccaggtgtcatcttcctgctctgcgactttctctggagaccttgggcctttggcctgtggggcactggggatggtaacctcactgccccgtcactcccttcaaaggcgacagacccaagcccacgtcaggagaggagcgtggggtcagctccagcagggtcggggtcagtgcctgtgtctggtgggggccactcaggagagttgggttttcagggcagagatgggcttgattccacctggtggggtgggtggaccctggagact

SEQ ID NO: 4229 - DNA, 1047 bp, Homo sapiens
  source 1..1047: mol_type = genomic DNA
aacacgattcatgatgtgttggatgtggaagcagctgttgtgaacttggataattctgtggttgacctggagacccttcaagctctctatgagaatagagcacagtcagacgaactcgaaaaaatagaaaagcatggccgatcttccaaagacaaggaaaatgccaagtctctggacaaacctgaacagttcctttatgaactgtcactaatccccaacttttcagagcgagtcttttgcatcctgttccagtccacattttcagaaagcatttgctcaattcgtcgcaaactggaattactacagaaattgtgtgagacattaaaaaatggcccaggggttatgcaggttctaggtttggttcttgcctttggcaactacatgaatggaggaaataagactcgaggacaggcagatggctttggattagacattcttccaaaactgaaagatgtcaagagcagtgacaatagcagaagccttttgtcatatattgtttcgtattatctccgaaattttgatgaggatgctggaaaagaacagtgcctctttccactgccagaaccccaggacctttttcaggcctcacagatgaagtttgaagattttcaaaaagatctcagaaaactgaagaaagacttgaaagcctgtgaagttgaagcagggaaagtataccaggtctcctcaaaagagcatatgcagcctttcaaggaaaacatggaacaatttattattcaagccaaaattgaccaagaggcagaggaaaattcactgacagagactcataaatgctttttggagaccacggcatatttcttcatgaaaccaaaacttggagagaaggaggtgtccccaaatgctttcttcagtatctggcatgaattcagctctgactttaaagacttctggaagaaagagaacaaacttcttctacaagagagagtaaaagaagccgaagaggtgtgtagacagaagaaaggaaaatcactttataaaataaaaccaagacatgactctggaattaaaaacaataatagcatgcacacc

SEQ ID NO: 4230 - DNA, 878 bp, Homo sapiens
  source 1..878: mol_type = genomic DNA
gtggccgatagctggtcctctttctccaacacctagcctgagacttggcggcgcggctgctatcctgaactagcttggtaagtgttgtgtcccgaaccagcgtagagagacctcggaccagccgccttgatgacagcatccgcgtcctccttttcatcatctcagggtgtccagcagccctccatctacagcttctcccaaataaccagaagcttgtttctcagcaatggtgtggccgccaacgacaaactccttctgtccagcaatcgcatcaccgccattgtcaatgcctcggtggaaggtcaacgtattcttcgagggattcagtacataaaggtgcctgttaccgatgctcgtgactcgcgtctctacgacttttttgaccccattgctgatcttatccacaccatcgatatgaggcagggccgtacgctgctgcactgcatggctggagtgagccgttccgcctcactgtgccttgcgtacctcatgaaataccactccatgtcgctgctggacgcccatacatggaccaagtcgcgccgccccatcatccggcccaacaacggcttttgggaacagctcatcaattacgaattcaagctgtttaataacaacaccgtgcgcatgatcaactcgccggtaggtaacatccctgacatctatgagaaggacctacgtatgatgatatcaatgtaagccatcccggccagcccctgacatctgccatcgatcttgcaccaagactgaacttgaacactgacattttgttagtaaagaaaaccggatggtgccttgttaaagggcaagaaaaaagggagggggttggagttttgaacgtagtaagccttaccttaatagaattaaattcatgaaac

SEQ ID NO: 4231 - DNA, 892 bp, Homo sapiens
  source 1..892: mol_type = genomic DNA
cctatcgagccctggctctccgggcagctggaggggtcgcgctgcgcctgttggggctgcacctcggaccagggcttctgctgcatctgcagccatgtcgggccgctcagtgccacatgcccacccggccaccgccgagtacgaatttgccaacccgagccgcctgggtgagcagcgcttcggagaaggcctcctgccagaagagatcctgacccccacactctaccatggctactatgtccggcctcgggccgccccagctggggagggcagcagggcaggggcctccgagcttaggctcagtgagggcaagttccaggcatttctggatgtgagccactttaccccagacgaggtgactgtgaggactgtggataacctgctggaggtgtctgcccggcacccccagcgcctggaccgccacggcttcgtgtcccgagagttctgccgcacctatgtcctgcctgctgatgtcgacccctggcgagtccgagctgctctctcccatgatggcatcttaaacctggaagcacctcggggtggccgacatttggacacagaggtcaatgaggtctacatctccctgctccctgcgcctcctgatccagaggaagaggaggaggcagccatagttgagccctgattgccacagacccagcacccagcaaatccctctctacctcccaaggtgatatgggcagctgcccaccactccagaggtttctttttattgaagcttgaagctcaagttcatggcttcatcaaaagacgcttcaaatcctgaagttgagatagctctcacctggagcccgtgtgttgttctaccctttggctgggaacacagtcacctgggaatcattccagcaggtggcttcaaaagtccaacctgcta

SEQ ID NO: 4232 - DNA, 967 bp, Homo sapiens
  source 1..967: mol_type = genomic DNA
cttctcgcctaacgccgccaacatggtgttcaggcgcttcgtggaggttggccgggtggcctatgtctcctttggacctcatgccggaaaattggtcgcgattgtagatgttattgatcagaacagggctttggtcgatggaccttgcactcaagtgaggagacaggccatgcctttcaagtgcatgcagctcactgatttcatcctcaagtttccgcacagtgcccaccagaagtatgtccgacaagcctggcagaaggcagacatcaatacaaaatgggcagccacacgatgggccaagaagattgaagccagagaaaggaaagccaagatgacagattttgatcgttttaaagttatgaaggcaaagaaaatgaggaacagaataatcaagaatgacacgagataggaaataaacgaactgatagtgtagaggactggctcgggaccacatcaaggaagtaggttagtggttagatcgtgtaggggaacacgggaagctactgagggttttttaaaatggcgtgatatctcagatttagatcattgaactgttaagactgaatcttatgggatcaagactgggaatgctcgggttggcagtatgaagtttggcagtaatccaaggaagtgacagtggtaatgccatttaggtggtcttgatcatgcattggactgcagaaataagggagaaaacaatgtgtcagggtttctggtttgtacctctggttcattggttgtgagggaacatgaggcagggtaaagtttatctaggtaaaatgagttagttttcatgtagactatctgggtgtatatgcaaagactgcagacaatctatactaaaatcctggctctgcctcttgaaagctatgtagtttaggcacatagtcaaaatccagtttcctcatctatgtggtacgcttcagagtagttaatcatgatatgtagtccagtgactggttccctt

SEQ ID NO: 4233 - DNA, 874 bp, Homo sapiens
  source 1..874: mol_type = genomic DNA
caacggaccctacctcttgtagtgattctcggggccacgggcaccggcaaatccacgctggcgttgcagctaggccagcggctcggcggtgagatcgtcagcgctgactccatgcaggagcttgcaagtttttgaagaaacaggaatctctcatagtgaatttctccatcgtcaacatacggaagaaggtggtggtccccttggaggtcctctgaagttctctaacccttgcatcctttggcttcatgctgaccagttctagatgagcgcttggataagagggtggatgacatgcttgctgctgggctcttggaggaactaagagattttcacagacgctataatcagaagaatgtttcggaaaataggtattgaggctctgaaacaagtaactaagagatatgcccggaaacaaaaccgatgggttaaaaaccgttttttgagcagacctggtcccattgtcccccctgtctatggcttagaggtatctgatgtctcgaagtgggaagagtctgttcttgaacctgctcttgaaatcgtgcaaagtttcatccagggccacaagcctacagccactccaataaagatgccatacaatgaagctgagaacaagagaagttatcacctgtgtgacctctgtgatcgaatcatcattggggatcgcgaatgggcagcgcacataaaatccaaatcccacttgaaccaactgaagaaaagaagaagattggactcagatgctgtcaacaccatagaaagtcagagtgtttccccagaccataacaaagaacctaaagagaagggatccccagggcagaatgatcaagagctgaaatgcagcgtttaagagacatgtccagtggcctttggaaaggtg

SEQ ID NO: 4234 - DNA, 1335 bp, Homo sapiens
  source 1..1335: mol_type = genomic DNA
gtgacgcaccggcgccgcggcggagccgctcccgaggccccggcgcggcgcgagggcgcggggcgcggcgtccacaggcgccgaggctgcccccgccgccccgcccgcgaagatggcggcggaactctacgctcccgccagcgccgcggccgcggacctagccaacagcaacgccggcgccgccgtgggcaggaaggccgggccgcgcagcccgcccagcgcccccgcgccagcgccgccgccgcccgcgcccgcgccgcccacactcggcaacaaccaccaggagagccccggctggcggtgctgccgccccacgctgcgcgagaggaacgcgctcatgttcaacaacgagctcatggccgacgtgcacttcgtcgtggggcccccgggggcgaccaggacggtgcccgcccacaagtacgtcttggctgtcggcagctccgtcttctatgccatgttctacggagacctggcggaagtcaaatctgaaattcacattccagacgtggagcccgcagcctttctgatcctcttaaagtacatgtacagtgatgagatcgatctggaagccgacacggtgctggccactctgtacgctgctaagaagtacatcgtcccagcattggcaaaagcctgtgtcaactttctggagacaagtttggaagccaagaacgcctgcgtcctgctgtcccagagccggctgtttgaggagcccgagctgacgcagcgctgctgggaggtcattgacgcacaggccgagatggccctacggtccgaaggcttctgtgagatagaccggcagacgctggagatcattgtcactcgggaggccctcaacaccaaagaggcggtggtcttcgaggccgtcctgaactgggccgaggcggagtgcaagaggcaggggctgccaatcaccccacgaaacaagaggcatgttctggggcgagccctctatctggtccgaattccaaccatgaccctagaggagtttgccaacggcgctgcccagtcagacatcctgactctggaggagacccacagcatcttcctgtggtacacggccaccaacaagccccgcctggactttcccctgaccaagaggaagggcctcgccccgcagaggtgccaccgattccagtcttctgcctaccgcagcaaccagtggcggtaccgcgggcgctgcgacagcatccagtttgcagtggacagaagggtatttattgcagggctgggcctgtatggctccagctctgggaaggctgagtacagcgtgaagattgagctcaagcggctcggggtggttctggctcagaacttgaccaagttcatgtcaga

SEQ ID NO: 4235 - DNA, 1037 bp, Homo sapiens
  source 1..1037: mol_type = genomic DNA
cttctcgtcggtgttcccggctgctatagagccgggtgagagagcgagcgcccgtcggcgggtgtcgagggcgggttgcctcgcgctgacccttcccgccctccttctcgtcacacaccaggtccccgcggaagccgcggtgtcggcgccatggcggagctgacggctcttgagagtctcatcgagatgggcttccccaggggacgcgcggagaaggctctggccctcacagggaaccagggcatcgaggctgcgatggactgtttgtttgtaggatctggttctgctgccggagaaggcaaacccgctttgagtgaagaggaaagacaggaacaaactaagaggatgttggagctggtggcccagaagcagcgggagcgtgaagaaagagaggaacgggaggcattggaacgggaacggcagcgcaggagacaagggcaagagttgtcagcagcacgacagcggctacaggaagatgagatgcgccgggctgctgaggagaggcggagggaaaaggccgaggagttagcagccagacaaagagttagagaaaagatcgagagggacaaagcagagagagccaagaagtatggtggcagtgtgggctctcagccacccccagtggcaccagagccaggtcctgttccctcttctcccagccaggagcctcccaccaagcgggagtatgaccagtgtcgcatacaggtcaggctgccagatgggacctcactgacccagacgttccgggcccgggaacagctggcagctgtgaggctctatgtggagctccaccgtggggaggaactaggtgggggccaggaccctgtgcaattgctcagtggcttccccagacgggccttctcagaagctgacatggagcggcctctgcaggagctgggactcgtgccttctgctgttctcattgtggccaagaaatgtcccagctgagggcctttgtcccattgtccctctgtgaccccttcatctttgataaagcactgacatctccttcctaataaatagaccctgagttctgt

SEQ ID NO: 4236 - DNA, 3768 bp, Homo sapiens
  source 1..3768: mol_type = genomic DNA
agggtccgccagctcggggccagcgcatggggctgctgagaccgctccggacgtgcgaagcgttcgcggtgcggtggagaagaccaagctttcttcctccgaggagttccctcagactctgagccttcccagaacaacaactatttgctcaggacatgatgctgataccgaagatgatccatccctagcagatttgccccaggcactggacctcagccagcagcctcacagctcaggtctctcttgcctgtcacagtggaagtccgtgctgagcccaggttccgcagctcagccttccagctgcagcatctctgcttcctccacaggcagcagtctccagggtcaccaggagagggcggagcctcgtggtggttctctggccaaggtctcctcctccctggagccggtcgtcccccaggaaccttcctctgtggtggggctaggacctcggccccagtggtcaccacagcctgtgttctctgggggtgatgcttctgggctaggcaggagacgcctctccttccaggctgagtactgggcctgtgtgctgccagattccctgcctccatcacccgaccgccactcccctctctggaacccaaataaagagtatgaagatctgcttgactatacttacccactgaggcccgggcctcagctcccaaagcaccttgatagccgtgtgccagctgaccctgtcctgcaggactccggggtagacctggatagcttctctgtctctccagcaagcaccctcaaatcacctactaatgtctcccccaactgcccaccagcagaggccactgccctgccattttctgggcccagagagccaagccttaagcagtggccctccagagtaccccagaaacagggtggcatgggcttggcatcttggagccaacttgcatctacccccagagccccaggcagtagggatgctcgttgggagcgcagagagccagccctgaggggtgcgaaggaccggctgactataggcaagcaccttgatatgggctctccccagctaaggacacgggacagagggtggccctcgcccaggccagagagggagaagaggaccagccagagtgcccggcgccctacctgcacagagtctaggtggaaatcagaagaggaagtggaaagtgatgacgagtatcttgccctccccgctcggctgacacaggtttctagcctggtttcgtatctaggatccatttctaccttggttaccctgcccactggggatatcaaagggcagagccccttggaagtgtcagacagtgatgggccagcttccttcccttcaagctccagccaaagccagcttccccctggagctgccctccaaggatctggggatcctgagggccagaatccctgtttcctgcgctccttcgtccgtgcccacgactccgcaggggaaggcagtctggggagcagccaggccctcggggtctcctctggactgctgaaaacacgcccctccttgccagctaggttggaccggtggccattctcagacccagatgttgaagggcagcttcccaggaaaggaggagaacagggaaaagaatcactggtgcaatgtgtgaaggtaatgacactcaacgttaggaagctttgtgtacaggtgtcttgtctcttcccccaatccactaacatcataataaaacatgttcatgttgaccaggcactttttatgtgccaggcattgtgctgtaccttatcttattcagtcctcacaacttttaccaggtaagcactgttctcattttactttttggaggaaagagcagagagaggttaggtaacgtgcccacttataattagcaagggcttgagccaagaatgagacccaggtagactatttgcagaggctgagctcttagccactacccttggctgcttcctaactcagaggtattctgaacaaaaaaggttttgtgcacagatgcctttaggaaacactgggctaaacaaaggtaagtggctttcttgactgcaggacttctagagcttcatttgccacagtggtttaagtgcaaagttaggggcattggatgtactgttgcctagactttgtggccaccggaccatcttgtgaaccaaatgacttaatatctggaggtataaagaacactgcgtggaatagggttatcggtgtcaggcatctgaatttgaaacatggcactgctgtctttggaatgttggctcagcctcttgagtttgctcatttgtaaaatgtggagccctgccttcttaggatgttgtgtgcattaaataattcatgttgagggcttcggtgcattcccagacatgttgaaggttcaggaatgtgcctgtccaggaacgtgtcctagcgcttgcggggggctttcaccttcccaggaggtgacgtggttattttgtcttgtgaggtaggtaggacacgttatcatggacccctctttactgataaaagattgagatgccatgaggtaaagttgttcttcgctatagcttcaggttagtcatgattttagtcatttattttacgttcacttttccagagaaacatggacgtatctggctccaagatgctgattctagttagtaatggtgctgatccaagaattggtttccatggcaggcacgcctcttctgggctgctccattcctacctgcaaggctgggttttctcagcctgtcatttttgatgtcacaccaggctgtggttttcattgctttggcagagggaggtacagagtcgtggagtcgggacaggtgagcaaggaggagagaggaaactgaagacattttgctgtcagctggaagagctgatctgctggctgtataatgttgcagatgttactgaccacgggactgcagccaggtccaatcttacaagtctcaagtcttctctgcagctttaccgggtaatatgcggtcctggctctggcttgttccctcacaagagtgtggctaaattactcgattacaaagtaaaatctcaaataaccaatgtctggtatgttatagctcagttgactattatacctgaaatctaattagagcttcacattcttaaagcggaacgctttgtaaaatgcatgaattatttcccaggccaaatggagcttgaagatacaatatatttatctcaaatcaaaaatactttaggttttgggctggcaggtgcagtgggacaagtcttttatcccagctactctggaagctgagacaggaagattgcttgagcccaggagttcgagtacagcctgagcaacatagcaagacccccccccctcaaaaaaaagttttttcttaattaaaaacaaaaatactttagggtgatttgcaatataattttccaaatgtctcagggattataaatacagacttgcactattatgacgcctctagttatgtatggctattgaagtaaaattaaagactcagatttttttatttgcactagccacattctgcatgttcaaccatcacatttgtctagtggctaccacgtagaacagtgcagatgtagaacacttccatcaccacataaagtcctattggactgcaccactatttaaagatctgagctgaaattgtactgactccagaatctacaatagggcattttgatggtatttaaatagaaatctaggccaggcaccttggctcacactattaatcccagcactttgggatgctgaggctggaggatcgcttgagcccgggagttccagaccagcctgggcaatatagtgagacctcgtctct

SEQ ID NO: 4237 - DNA, 4391 bp, Homo sapiens
  source 1..4391: mol_type = genomic DNA
aagcgcgcatgcgcgcttcgtcacaagggtgcgaggaaagtcagtgagcaaatcgcggaccaccggggctgccagctcgcctgactcccggcctcttgcgctcctaggggcggagaagggtgcgggctcttcgccctttgtgtcctccttctttcactaacttctggactttccagctcttccgaagttcgttcttgcgcaaagcccaaaggctggaaaaccgtccacgatgaccagcatgactcagtctctgcgggaggtgataaaggccatgaccaaggctcgcaattttgagagagttttgggaaagtaacacgtggaggaacatacgttgggaatatcaactgacacgcactgtgctaggatctagaaataccatgtggactccaacacacatagaaataaggaagtggaattccaaaggaaggcaaagtgtaaagtcatctttatggaaatgagtgatgaaggtgaatacctgaatgagatgtcaagaggaggaacacactggagagaagcagtaaagatttaggactgaaccttaaagacatacaggcttgagagaaagaaagcatgtaaagaagacagaaatggttagaaagattactcttgtctctgctgctcctgggaaagtgatttgtgaaatgaaagtagaagaagagcataccaatgcaataggcactctccacggcggtttgacagccacgttagtagataacatatcaacaatggctctgctatgcacggaaaggggagcacccggagtcagtgtcgatatgaacataacgtacatgtcacctgcaaaattaggagaagatatagtgattacagcacatgttctgaagcaaggaaaaacacttgcatttacctctgtggatctgaccaacaaggccacaggaaaattaatagcacaaggaagacacacaaaacacctgggaaactgagagaacagcagaatgacctaaagaaacccaacaatgaatatcaagtatagatttgactcaaacaattgtaatttttgaaataaactagcaaaaccagaagcagctagaaatattcttggaggaaaaggacctggatatcaagtagggtaaaggtgggggtgtcttttttcactttaagcatcttgttttctaatcatgtgtgataattgggtgaaaaattcttagctcaaagtgttttaaaaacaggtaaagcaaagaaactagcaggaccactctcagttaagattaaaactaaagtccagtgttaagctaaaggagaaatagaaattaatggttctaattctgtttgggctgctaggaacaacagaaatttttcatggttctagaagctggaaagtcctgggtcaaggcccagcagatcctgttaggtgagggcccgcttcctggctcatagatggtgccttctcactgtgtggtggaaggggcaagtgagccctctgggttctcgtttttgaaatggagtctcgctctgttgcccaggctggagtacagcagcacgatctcggctcactgcaatctctgccccctgggttcaagtgattctcctgcctcagcctcccaagtagctgggactataggcatgtgccatcacacctagctaatttttgtagttttttgtagaaacagggttcaccatgttggccaggctggtctcgaactcgtgacctcaggtgatccgcctgccttggccccccaaagtgctgggattacaggtgtgagccaatgtgcccagcctgggttctcttttgtaagggcacttactccaatcttgagggttctgccctcgtgatctaataacttcccaaagacccccacctgctaatatcaccttgggggttgggattttaacatacaaatttaggggaaacacatggagaccacagcaatggccaatccttagcgaatcttaggtccttcccagatctaaaatgccaagctacacttgcatttcctttttttaagattatgaaacttcaaaatatatgaactacagcccatattgaaaaataaaatagattgagccatatgcctaaaaaagacctcaagaaaagtttgaggctaagcatgttagtgttacaggaaatggtccaatagagggggaagaaaaaaagcatgctactagccccttttcttgtaccgagaataaaaccatgcagatctcaaacctccaagtctatagtattgaaaagaccaagttcacttctcagaagtctccaagttcagttgactgtggcactctgagacagcttctgtcactcaggctggagtgatacaatcacagcttcccatagcctcaaaatcccaggctcaagacattcttccacctcagtctcctgagtagctggaactacaggcgtgtgccaccacgcctaattttatttttgtagaaacaaggtctcactgttgcccagcctcgtctcaaactcctaggctcaagcaatcctcctgccttggccccccaagtactggacttacaggtgtgaaccactgcacccagctgactcttacttgatttctgtcagggaatcttaatgaacatttcatgactaaagactaaaaaggatgcagctttaagtaaatttaagtcaagttaacagttaaagacaaatcctttccctacattagatcgcctgctgatctgtccactgtgaaagggcagaagactccacagtagcaatagcagcagtgagcatacaggagtcccagatgtttacttctagtatttcccactaaaaggaagctgggctccttggagaaacagctgactccagggcttgaggctgggacagaaaggttacagtatcttatgcatgaaaggagatgctcaaaataataaaggcatgcaaattatgatttggagggaaaaaatatgaggccatagtgtttaggtagataataaatggcagagatagaacactctcttacaacaaatgctgtaaatggacaaagcattagatttggaaaatcactattttgtaaccatcatagttaaagactggtttgggttttagtctggaaagaatcgccaagggagctcctgataaaggaacagggtatttgcacattgcttcccagagattgctagtagtaagtaccacacatagggcaaaaccaggacaccttgaccaggcgctcaaaagtaacatcaatgaagagcagatggagagtatacttgagaagggcgttaagcatgaataaacaattcaaatgcaaaatgagtaacaatttacaagaaaaattgccctgtactccaaaaaacatagaggtcatggaacacataaaggctaaggaactgttccacattaaagacaactgagaacaactaaattcaatgatcctgtactctagagggggggatctaaaacaagctaccaaggatactgggacaacaaaacgaatatggatgataaagagtatcaacattccctgagtttggtaattttactctagttatatgaaatattcttgtacttggaacatatgccgaagtactaaggaaggggtaaggaagcacaaagtgtgcaacaaactcaaatagctcacaggtataagtgtacagagaaaatgaaaaaaatgtggcaaaataataaaaatgagggtaaagattacacaacagctttcatattactctggtaacttttctaaattattccaaaataaaaacgtaaacaatggctgccaaaatgcctaacttggtgaacataagtgtaattcaatatggtaaattaattcaacatggtaaattaagagcataggccttaagagccagccagcctggttttaaatcctccactacttatgatctgagcttgagcaagttacttaacctctgcatctatttccaccaaaggttgagaggttaagacaagagcttagaagagtacctggttataataaacattcaaaatgttatttcaaatagattctaatttttaaataagaggacacatgaaagcattttgaaatttaagaatggccctttcccatgaagcaaggcataaggccaggttgctaactgttgaaagctgacagtatgttcttgattcctgttcttgttgaagttacacactcaattgccaggtatttttcttctgaatttactatttagccacagactatgaaataattctctaaggtgaccagtaacatcagtgaaatggaaagaaaaagttaacacttcaaactttgtgtattcacctgaatagtcagggaactttcacctattttatttaggttttctttttctttttttctttttttttcaaattccaaccagaagctaaatacaattggaaactggtaagcactagttttactccaaaggagtaggatcattcagatttactccaataaaagtatgcaacccttaagcaaagcttttcttcattt

SEQ ID NO: 4238 - DNA, 1569 bp, Homo sapiens
  source 1..1569: mol_type = genomic DNA
cagacgcgcgagcgcaagcagcgggttagtggtcgcgcgcccgacctccgcagtcccagccgaggttgattgcactgccaacactaacacctgtaataaatatggagtcagtggatatccaaccctgaagatatttagagatggtgaagaagcaggtgcttatgatggacctaggactgctgatggaattgtcagccacttgaagaagcaggcaggaccagcttcagtgcctctcaggactgaggaagaatttaagaaattcattagtgataaagatgcctctatagtaggttttttcgatgattcattcagtgaggctcactccgagttcctaaaagcagccagcaacttgagggataactaccgatttgcacatacgaatgttgagtctctggtgaacgagtatgatgataatggagagggtatcatcttatttcgtccttcacatctcactaacaagtttgaggacaagactgtggcatatacagagcaaaaaatgaccagtggcaaaattaaaaagtttatccaggaaaacatttttggtatctgccctcacatgacagaagacaataaagatttgatacagggcaaggacttacttattgcttactatgatgtggactatgaaaagaacgctaaaggttccaactactggagaaacagggtaatgatggtggcaaagaaattcctggatgctgggcacaaactcaactttgctgtagctagccgcaaaacctttagccatgaactttctgattttggcttggagagcactgctggagagattcctgttgttgctatcagaactgctaaaggagagaagtttgtcatgcaggaggagttctcgcgtgatgggaaggctctggagaggttcctgcaggattactttgatggcaatctgaagagatacctgaagtctgaacctatcccagagagcaatgatgggcctgtgaaggtagtggtagcagagaattttgatgaaatagtgaataatgaaaataaagatgtgctgattgaattttatgccccttggtgtggtcactgtaagaacctggagcccaagtataaagaacttggcgagaagctcagcaaagacccaaatatcgtcatagccaagatggatgccacagccaatgatgtgccttctccatatgaagtcagaggttttcctaccatatacttctctccagccaacaagaagctaaatccaaagaaatatgaaggtggccgtgaattaagtgattttattagctatctacaaagagaagctacaaacccccctgtaattcaagaagaaaaacccaagaagaagaagaaggcacaggaggatctctaaagcagtagccaaacaccactttgtaaaaggactcttccatcagagatgggaaaaccattggggaggactaggacccatatgggaattattacctctcagggccgagaggacagaatggatataatctgaatcctgttaaattttctctaaactgtttcttagctgcactgtttatggaaataccaggaccagtttatgtttgtggttttgggaaaaattatttgtgttggggg

SEQ ID NO: 4239 - DNA, 3870 bp, Homo sapiens
  source 1..3870: mol_type = genomic DNA
aaagtacttgaatctgaacaagataaaatgagccaggggtttcatcctgaaagagacccctctgacctaaaaaaagtgaaagctgtggaagaaaatggagaagaagctgagccagtacgtaatggtgctgagagtgtttctgagggtgaaggaatagatgctaattcaggctccacagatagttctggtgatggggttacatttccatttaaaccagaatcctggaagcctactgatactgaaggtaagaagcagtatgacagggagtttctgctggacttccagttcatgcctgcctgtatacaaaaaccagagggcctgcctcctatcagtgatgtggttcttgacaagatcaaccaacccaaattgccaatgcgaactctggatcctcgaattttgcctcgaggaccagactttacaccagcctttgctgattttggaaggcagacacctggtggaagaggcgtacctatttgcaaagtgcagagcaggcatggattgccaattctggaacagagcaaagccccaacttgccctccactggtgatgtcacacccacccatgaagagcctgcctctagggttgttgaatgttgggtcacgaagatctcaacctggccaaagaagagaacccagaaagatcatcacagtttctgtaaaagaagatgtacacctgaaaaaggcagaaaatgcctggaagccaagccaaaaacgagacagccaagccgatgatcccgaaaacattaaaacccaggagctttttagaaaagttcgaagtatcttaaataaattgacaccacagatgttcaatcaactgatgaagcaagtgtcaggacttactgttgacacagaggagcggctgaaaggagttattgacctggtctttgagaaggctattgatgaacccagtttctctgtggcttacgcaaacatgtgtcgatgtctagtaacgctgaaagtacccatggcagacaagcctggtaacacagtgaatttccggaagctgctactgaaccgttgccagaaggagtttgaaaaagataaagcagatgatgatgtctttgagaagaagcagaaagaacttgaggctgccagtgctccagaggagaggacaaggcttcatgatgaactggaagaagccaaggacaaagcccggcggagatccattggcaacatcaagtttattggagaactctttaaactcaaaatgctgactgaagccatcatgcatgactgtgtggtgaagctgctaaagaaccatgatgaagaatccctggagtgcctgtgtcgcctgctcaccaccattggcaaagacttggactttgaaaaagcaaagccacgtatggaccagtactttaatcagatggagaaaattgtgaaagaaagaaaaacctcatctaggattcggttcatgcttcaagatgttatagacctaaggctgtgcaattgggtatctcgaagagcagatcaagggcctaaaactatcgaacagattcacaaagaggctaaaatagaagaacaagaagagcaaaggaaggtccagcaactcatgaccaaagagaagagaagaccaggtgtccagagagtggacgaaggtgggtggaacactgtacaaggggccaagaacagtcgggtactggacccctcaaaattcctaaaaatcactaagcctacaattgatgaaaaaattcagctggtacctaaagcacagctaggcagctggggaaaaggcagcagtggtggagcaaaggcaagtgagactgatgccttacggtcaagtgcttccagtttaaacagattctctgccctgcaacctccagcaccctcagggtccacgccatccacgcctgtagagtttgattcccgaaggaccttaactagtcgtggaagtatgggcagggagaagaatgacaagccccttccatctgcaacagctcggccaaatactttcatgaggggtggcagcagtaaagacctgctagacaatcagtctcaagaagagcagcggagagagatgctggagaccgtgaagcagctcacaggaggtgtggatgtggagaggaacagcactgaggctgagcgaaataaaacaagggagtcagcaaaaccagaaatttcagcaatgtcagctcatgacaaggctgcattatcagaagaggaactggagaggaagtcgaaatctatcattgatgaatttctacacattaatgattttaaggaagccatgcagtgtgtggaagagctgaatgcccagggcctactacatgtttttgtgagagtgggagtggagtccaccctggaaaggagccagatcaccagggatcacatgggccaattactctatcagctggtacagtcagaaaaactcagcaaacaggactttttcaaaggtttttcagaaactttggaattggcagatgacatggccattgatattccccatatttggttgtaccttgctgaactggtgacccccatgttaaaagaaggtggaatctccatgagagaacttaccatagaatttagcaaacctttacttcctgttggaagagctggggtcttgctatctgaaatattgcacctactatgcaaacaaatgagccataagaaagtgggagccttatggagggaggctgacctcagctggaaggactttttaccagaaggagaagatgtacataattttcttttggagcagaagttggacttcatagagtctgacagtccctgttcctctgaagcactttcaaagaaagaactgtctgccgaagagctgtataagcgactcgagaaactcattattgaggacaaagcgaatgatgaacagatctttgactgggtagaggctaatctagacgaaatccagatgagttcacctacattccttagagctttaatgactgctgtttgtaaagcagctattatagccgactcttctaccttcagagtggacactgctgttatcaagcagagagtgccgatcttactcaagtacctagactcagatacagagaaggaactgcaagcactttatgcactacaagcatcgatagtaaaacttgatcaacctgccaatttgctgcggatgttttttgattgtctatatgacgaggaggtgatctccgaggatgccttctacaaatgggagagcagcaaggaccctgcagagcagaatgggaagggcgtggctctgaaatctgtcacggcattcttcacgtggctgcgggaagcagaagaggagtctgaggataactaaaacttcaaatacacaaaatgaaacaaaagaaacaatttaagtatttttttaaaaagtttcacgtcttcgccaatcacagtgcagcaaggccaattctcgcagaaacccccacgtgtgcacgagtgggagaggggaaagagaaaaaaaggtgatcatggaggaaaaaggtactggataaaagtaaacttcaaaccttagggcgggagcactaaaaccaaaatacatgtattatttatagaaaatattttctgttttaatcttttctttttaaacaaggactcatacttaaaaaaatgtttagcaaaaaaaaaaaaagttgagaacttttaatttattttaaggactgcaaatgccagtgtaattttttaatttgcagtttctgtaaacaacttgtataatagaaaagcagagaaataaatttccctccccttcaagatgcacctcatgtttgttttaaggtatagcatttagtccagatttgagaaagtttggggtgaacaaggtaagaaagatttttttttttttggcatcaaatctttctgcctgcctctcagcttgcttcagaaaatttaaaaaatcacaatagtaatcaaaacatacataacattgaaacag

SEQ ID NO: 4240 - DNA, 2038 bp, Homo sapiens
  source 1..2038: mol_type = genomic DNA
tgttttcccaaatctttttatcgttttcttgaggtttttttttttttacacattctgaagtcacgtttggttaaaatgtcgtatcaggaggaggccgaatacagggatttttccccatggtcttacacagcatatttcaaggccagagaatggcaggggaacagaaaccctcaagtaatctcctggagcagtttattttactagccaaaggtaccagtggctcagccctcactgctctcataagccaggtcttagaggctcccggagtgtatgtctttggagaacttctggagctggccaacgtgcaggagcttgcggaaggagctaatgctgcttatttgcagttgttgaacctgtttgcctatgggacatacccagattacatagtgggtgggactgagcagccaacaaggagagcctgccagaactgagcacagctcagcagaacaagctgaagcatcttaccatcgtgagcttggcatcaagaatgaagtgtatcccctactccgtgttgctgaaagacctggagatgcggaatctccgggaactagaagaccttatcattgaggctgtctacactgacatcatccagggcaagctggaccagcgaaaccagctgctggaagtggatttctgcattggccgtgacatccgaaagaaggatatcaataatattgtcaagaccctgcatgaatggtgtgatggctgtgaagcagttctactgggcatcgagcagcaagttctgagagccaaccagtacaaagagaaccacaaccgaactcagcagcaggtagaagcagaggttaccaacatcaagaagacactcaaagccaccgcatcctcctcggctcaggagatggagcagcagctggctgaacgggagtgtccccctcacgctgagcagaggcagcccaccaagaagatgtccaaagtgaaaggtctggtctccagccgccactagggccggctggggcagctggcactcaccaggcctgggtcaggtggggaggggacaccaagggcccatttcctcccctctctacctgcagtgagttccagacctgcccgtcccctcaccagcgcctccccaccctgttggtactgttccagaaaaactgttactccccctcacccactccctccttccccagttgttcccttcagactcaggggctccaccaatgccatcccaaaacagggtcagacactgcccagcttccctccaggaggttcttgtctctgtgtaagggcttgtctccctcccagtttttcttttgctccacgtcattttgtcaggctggttataagccggaggcagctttaaccagcccccagggatgattgtgaaggaggcccctccccttgtgaggagggggcactcctctccagcccctggtaccacagtcctcacgatggtgcagtgatttctagccaggcgtcaagatgcgctgctttccctctcctgcctcatcccttgttggcagctccagttcaggccgtggagggacgtgatgctgggctgtgtttactaaacccacgggttttcagcctcttaagcccagctccgatctccaattagttgagagcgctgggttgactaacctctggtatctgagcacagacagagggtgctgtgggtctgctgggtggcagaaatggttccttccggcttggcgttctctcctggccactcttcctgctgcctctgactactcagccttgttttcggtgtgtaggccccagctgcccactggaactgccggctaatgcttgctctcccaagatctttaactcctcctggctgcacctgggtagggatggtggcatcgatgcccctctgtctgctgaaggacctgttgctgcttctgtcttttcacccctccttggctgatgacccagagccctctgatgatggcattctcctggcaagagaaaaagacttaactagacttctgaacttgaacagtttcaggttatattttaatttttttttttttgtacaggttctgattctaatacatttcaacatgcttttgtc

SEQ ID NO: 4241 - DNA, 1159 bp, Homo sapiens
  source 1..1159: mol_type = genomic DNA
gcccttctttgttgactgaggaaagctcgctccctgcccaggtttttcattgttgatcgaaattaacaccaggtggtgaatagagcccctcctaaggttgctcaggataaatcatttattaaataggtctgcttatcaggaggggcgtgaaggctcccaaaaggaaatgctggcacctgggcccagaagccagggcctctaactcctggggttgatttcttcagtgaagttgcaccctacaaagggaatatggccaaagcggcactcaactgaaggctgatatcaggcgattagacagccatgcattctgcgtttgtctggaatggattgtagagagatggacttatatgaggactaccagtccccgtttgattttgatgcaggagtgaacaaaagctatctctacttgtctcctagtggaaattcatctccacccggatcacctactcttcagaaatttggtctgctgagaacagacccagtccctgaggaaggagaagatgttgctgccacgatcagtgccacagagaccctctcggaagaggagcaggaagagctaagaagagaacttgcaaaggtagaagaagaaatccagactctgtctcaagtgttagcagcaaaagagaagcatctagcagagatcaagcggaaacttggaatcaattctctacaggaactaaaacagaacattgccaaagggtggcaagacgtgacagcaacatctgcttacaagaagacatctgaaaccttatcccaggctggacagaaggcctcagctgctttttcgtctgttggctcagtcatcaccaaaaagctggaagatgtaaaaaactccccaacttttaaatcatttgaagaaaaggtcgaaaacttaaagggttctccaaaaaatgtggaatcctttgcatctatgctgagacattctcctcttacacagatgggacctgcaaaggataaactggtcattggacggatctttcatattgtggagaatgatctgtacatagattttggtggaaagtttcattgtgtatgtagaagaccagaagtggatggagagagtcccatttcgtggtatgctgtttggaggagattttcacaagtgatgataacctgtttttcttccaactctgactttggaaaacatcgtaaaagataa

SEQ ID NO: 4242 - DNA, 3507 bp, Homo sapiens
  source 1..3507: mol_type = genomic DNA
agtgctcagcaacgattacgccccgagggccaatcacagggctgcggccgagagagaagccttattagagctttctcaacctgcagccctcatctccgccggcgagtagggccaggtgttgggagctcccacgtgggacaagatggtgtcttcggcgcagatgggcttcaacctgcaggctctcctggagcagctcagccaggatgagttgagcaagttcaagtatctgatcacgaccttctccctggcacacgagctccagaagatcccccacaaggaggtagacaaggctgatgggaagcaactggtagaaatcctcaccacccattgtgacagctactgggtggagatggcgagcctccaggtctttgaaaagatgcaccgaatggatctgtctgagagagcaaaggatgaagtcagagaagcagctttgaaatcctttaataaaaggaagcctctatcattagggataacacggaaagaacgaccacctctagacgtggacgaaatgctggagcgcttcaaaacagaagcacaagacaaagacaataggtgcaggtatatattgaagacgaagttccgggagatgtggaagagctggcctggagatagcaaagaggtccaggttatggctgagagatacaagatgctgatcccattcagcaaccccagggtgcttcccgggcccttctcatacacggtggtgctgtatggtcctgcaggccttgggaaaaccacgctggcccagaaactaatgctagactgggcagaggacaacctcatccacaaattcaaatatgcgttctacctcagctgcagggagctcagccgcctgggcccgtgcagttttgcagagctggtcttcagggactggcctgaattgcaggatgacattccacacatcctagcccaagcacggaaaatcttgttcgtgattgacggctttgatgagctgggagccgcacctggggcgctgatcgaggacatctgcggggactgggagaagaagaagccggtgcccgtcctcctggggagtttgctgaacagggtgatgttacccaaggccgccctgctggtcaccacgcggcccagggccctgagggacctccggatcctggcggaggagccgatctacataagggtggagggcttcctggaggaggacaggagggcctatttcctgagacactttggagacgaggaccaagccatgcgtgcctttgagctaatgaggagcaacgcggccctgttccagctgggctcggcccccgcggtgtgctggatcgtgtgcacgactctgaagctgcagatggagaagggggaggacccggtccccacctgcctcacccgcacggggctgttcctgcgtttcctctgcagccggttcccgcagggcgcacagctgcggggcgcgctgcggacgctgagcctcctggccgcgcagggcctgtgggcgcagacgtccgtgcttcaccgagaggatctggaaaggctcggggtgcaggagtccgacctccgtctgttcctggacggagacatcctccgccaggacagagtctccaaaggctgctactccttcatccacctcagcttccagcagtttctcactgccctgttctacaccctggagaaggaggaggaagaggatagggacggccacacctgggacattggggacgtacagaagctgctttccggagtagaaagactcaggaaccccgacctgatccaagcaggctactactcctttggcctcgctaacgagaagagagccaaggagttggaggccacttttggctgccggatgtcaccggacatcaaacaggaattgctgcgatgcgacataagttgtaagggtggacattcaacggtgacagacctgcaggagctcctcggctgtctgtacgagtctcaggaggaggagctggtgaaggaggtgatggctcagttcaaagaaatatccctgcacttaaatgcagtagacgttgtgccatcttcattctgcgtcaagcactgtcgaaacctgcagaaaatgtcactgcaggtaataaaggagaatctcccggagaatgtcactgcgtctgaatcagacgccgaggttgagagatcccaggatgatcagcacatgcttcctttctggacggacctttgttccatatttggatcaaataaggatctgatgggtctagcaatcaatgatagctttctcagtgcctccctagtaaggatcctgtgtgaacaaatagcctctgacacctgtcatctccagagagtggtgttcaaaaacatttccccagctgatgctcatcggaacctctgcctagctcttcgaggtcacaagactgtaacgtatctgacccttcaaggcaatgaccaggatgatatgtttcccgcattgtgtgaggtcttgagacatccagaatgtaacctgcgatatctcgggttggtgtcttgttccgctaccactcagcagtgggctgatctctccttggcccttgaagtcaaccagtccctgacgtgcgtaaacctctccgacaatgagcttctggatgagggtgctaagttgctgtacacaactttgagacaccccaagtgctttctgcagaggttgtcgttggaaaactgtcaccttacagaagccaattgcaaggaccttgctgctgtgttggttgtcagccgggagctgacacacctgtgcttggccaagaaccccattgggaatacaggggtgaagtttctgtgtgagggcttgaggtaccccgagtgtaaactgcagaccttggtgctttggaactgcgacataactagcgatggctgctgcgatctcacaaagcttctccaagaaaaatcaagcctgttgtgtttggatctggggctgaatcacataggagttaagggaatgaagttcctgtgtgaggctttgaggaaaccactgtgcaacttgagatgtctgtggttgtggggatgttccatccctccgttcagttgtgaagacctctgctctgccctcagctgcaaccagagcctcgtcactctggacctgggtcagaatcccttggggtctagtggagtgaagatgctgtttgaaaccttgacatgttccagtggcaccctccggacactcaggttgaaaatcgatgactttaatgatgaactcaataagctgctggaagaaatagaagaaaaaaacccacaactgattattgatactgagaaacatcatccctgggcagaaaggccttcttctcatgacttcatgatctgaatccccccgagtcattcattctccatgaagtcatcgattttccaggtgttggtgaactgcctgtgactcctctcctccccggcccctacccctcagggataatgagttcattgctgggctagatgttttagccatgattctgcctctgttttatacctgcacacatccttatctttgttacatatgaaatatctgtatcacgggtatattgagagaaataaaggtgagagcattcacaaatg

SEQ ID NO: 4243 - DNA, 2249 bp, Homo sapiens
  source 1..2249: mol_type = genomic DNA
gagagaggaagtgatcgctcccggaggagcgcgagccgagcggccggcgcagcgtgagacagcacatcctgcccgcgccggccccgccaccttcgggagccgcctgcaccaacgctgccgccgcccaggagccgccgccggctcggggagcccagttccgccgctgccgagcgcgtccaggaaaccaacatgtctgacaaaagtgacttaaaagctgagctagagcgcaaaaagcagcgcttagcacagataagagaagagaagaaacggaaggaagaggagaggaaaaagaaagaggctgatatgcagcagaagaaagaacccgttcaggacgactctgatctggatcgcaaacgacgagagacagaggctttgctgcaaagcattggtatctcaccggagccgcctctagtcccaacccctatgtctccctcctcgaaatcagtgagcactcccagtgaagctggaagccaagactcaggcgatctggggccattaacaagaagaagactgcataaactgggcgtgtcaaaggtcacccaagtggatttcctgccaagggaagtagtgtcctactcaaaggagacccagactcctcttgccacgcatcagtctgaagaggatgaggaagatgaggaaatggtggaatctaaagttggccaggactcagaactggaaaatcaggacaaaaaacaggaagtgaaggaagcccctccaagagagttgacagaggaagaaaaacagcagatccttcattcagaggaatttctcatcttttttgaccggacaatacgggtaattgaaagagccctggctgaagattccgacatcttttttgactacagcggccgagagttagaggaaaaagatggggatgttcaggctggagccaatctttctttcaatcgtcagttctatgatgaacattggtccaagcatcgagtggtcacttgtatggactggtccctccagtaccctgagctgatggtggcttcttacaacaacaatgaagatgctccccatgaaccagatggagtggccttggtttggaacatgaagtttaagaaaaccacaccagaatacgtcttccactgtcagtcctctgtgatgtcggtctgcttcgcccgtttccatcctaacttggtggttggtgggacttactcgggccagattgtcctctgggacaatcgcagtcatcgaaggactccagtgcagcggacacccttatcagctgctgcacacacgcatcccgtgtactgtgtaaatgttgttgggacccagaatgctcataacctcatcactgtctccactgatggcaaaatgtgttcctggagcctggacatgctctcaactccacaggagagcatggagctggtgtacaataagtccaagcctgtcgctgttaccggaatggctttcccaacgggagacgtcaataacttcgtggttggcagtgaggaaggtacagtctacacggcttgtcgtcatggaagcaaagcaggtattggtgaggtctttgaaggtcaccaagggccagtgacaggaattaactgccacatggcagtgggcccaatcgacttttctcacctgtttgtcacatcatcatttgactggactgtcaaactgtggaccaccaagcacaacaagccgctctactcctttgaagacaatgcagactatgtgtacgatgtcatgtggtcccccgtgcatcctgcgctttttgcctgcgtggacgggatggggcgcttggacctctggaacctcaacaatgacaccgaggttccaacagcaagtgtggccattgagggggcatccgccctaaaccgtgttcgttgggcccaagctggcaaagaagttgctgttggggactcggaaggccgtatttgggtctatgacgttggagagggtcttgctatgttgccaggctggtctcaaaattcctggactcaagcaatcctcctatgttggcctcccaaagtgctgggattacagacatgagccactgtgcccagctatgcctgcttgttatatcagctactgagagatgagtaccaaaatctggaagtataattgtggatatcttttagttctttcagttctatcagcttttgttttctgtatccaaagctttgttattaggtgcctacatattgaggatttcatgtgtttgcgatgaactgacccttttatcaatatgaaatgttgctgtttattcctagtaataatcctttttcttaaatctactttga

SEQ ID NO: 4244 - DNA, 9312 bp, Homo sapiens
  source 1..9312: mol_type = genomic DNA
gtgctgtggcggcggcggcggcggtagtggcggcggcggcggtgcctgggcggcagcagcagcagtagcggcagccctgaggacggtgagacggccgcggcggcggcgacagcgcggaagtcgcgcgggacccagagcttcccccctgtcgctagtgctgaggctttcgcctttcctacccagcttcttgctcacggcccgggctgggctgggcagggcaacgcgcccccggggaggggcggagctgtagatatggtgtaagatacttcttcaagattggacagctggggaccttcttctgattaaccttaaaccaacttgtagccatagagacacctcacaaggttcccatttttgttgttgttgttgttgattttctgctcacacctttcctgaccttgcaaccatgtatggaagtgcccgctctgttgggaaggtggagccgagcagccagagccctgggcgttcacccaggcttccacgttcccctcgcttgggtcaccgtcgaaccaacagtacgggagggagttcgggaagcagtgttggaggtggcagtgggaaaaccctttcaatggaaaatatacaatctttaaatgctgcctatgccacctctggccctatgtatctaagtgaccatgaaaatgtgggttcagaaacacctaaaagcaccatgacacttggccgttctgggggacgtctgccttacggtgttcggatgactgctatgggtagtagccccaatatagctagcagtggggttgctagtgacaccatagcatttggagagcatcacctccctcctgtgagtatggcatccactgtacctcactcccttcgtcaggcgagagataacacaatcatggatctgcagacacagctgaaggaagtattaagagaaaatgatctcttgcggaaggatgtggaagtaaaggagagcaaattgagttcttcaatgaatagcatcaagaccttctggagcccagagctgaagaaggaacgagccctgagaaaagatgaagcttccaaaatcaccatttggaaggaacagtacagagttgtacaggaggaaaaccagcacatgcagatgacaatccaggctctccaggatgaattgcggatccagagggacctgaatcagctgtttcagcaggatagtagcagcaggactggcgaaccttgtgtagcagagctgacagaggagaactttcagaggcttcatgctgagcatgagcggcaggccaaagagctgtttcttcttcgaaagacattggaggaaatggagctgcgtattgagactcaaaagcagaccctaaatgctcgggatgaatccattaagaagcttctggaaatgttgcagagcaaaggactttctgccaaggctaccgaggaagaccatgagagaacaagacgactggcagaggcagagatgcacgttcatcacctagaaagccttttggagcagaaggaaaaagagaacagtatgttgagagaggagatgcatcgaaggtttgagaatgctcctgattctgccaaaacaaaagctctgcaaactgttattgagatgaaggattcaaaaatttcctctatggagcgtgggcttcgagacctggaagaggaaattcagatgctgaaatcgaatggtgctttgagtactgaggaaagggaagaagaaatgaagcaaatggaagtgtatcggagccattctaaatttatgaaaaataagattggccaggtgaaacaggagctgtccagaaaggacacagaactactcgccctgcagacaaagctagaaacactcacaaaccagttctcagatagtaaacagcacattgaagtgttgaaggagtccttgactgctaaggagcagagggctgccatcctgcagactgaggtggatgctctccgattgcgtttggaagagaaggaaaccatgttgaataaaaagacaaaacaaattcaggatatggctgaagagaaggggacacaagctggagagatacatgacctcaaggacatgttggatgtgaaggagcggaaggttaatgttcttcagaagaagattgaaaatcttcaagagcagcttagagacaaggaaaagcagatgagcagcttgaaagaacgggtcaaatccttgcaggctgacaccaccaacactgacactgccttgacaactttggaggaggcccttgcagagaaagagcggacaattgaacgcttaaaggagcagagggacagagatgagcgagagaagcaagaggaaattgataactacaaaaaagatcttaaagacttgaaggaaaaagtcagcctgttgcaaggcgacctttcagagaaagaggcttcacttttggatctgaaagagcatgcttcttctctggcatcctcaggactgaaaaaggactcacggcttaagacactagagattgctttggagcagaagaaggaggagtgtctgaaaatggaatcacaattgaaaaaggcacatgaggcagcattggaagccagagccagtccagagatgagtgaccgaatacagcacttggagagagagatcaccaggtacaaagatgaatctagcaaggcccaggcagaagttgatcgactcttagaaatcttgaaggaggtggaaaatgagaagaatgacaaagataagaagatagctgagttggaaagccttttttctaggcaagtgaaagaccagaataagaaggtagcaaatctgaagcacaaggaacaggtggaaaaaaagaagagtgcacaaatgttagaggaggcgcgacgacgggaggacaatctcaacgacagctctcagcagctacaggtggaggagttactgatggccatggagaaggtaaagcaggaactagaatccatgaaagcaaagctgtcctccacccagcagtctctggcagaaaaggaaactcacttgactaatcttcgggcagagagaaggaaacacttagaggaagttctggagatgaagcaagaagctcttctggctgccattagtgaaaaagacgccaatatagctctcttggagctttcgtcctctaagaagaagacccaagaggaagtggctgccctgaagcgggagaaggatcgtctggtacagcagcttaagcagcagacgcaaaatcgaatgaagctaatggccgacaactacgaggatgaccacttcaaatcctcccattccaatcaaacaaatcacaagccctccccagaccaggatgaggaggagggtatatgggcatagccaatcagaggcttagttcagccattttgttcagaacgatcatccagcccctcttagaacttgaccaaaatagaagtaaattaaagttgtacattggacacctgacaaccctctgccatgaccgagaccccctgatcctccgtggactcactccaccagcttcctataacttggacgatgaccaggcggcttgggagaatgagctgcagaagatgacccgggggcagcttcaggatgagttagagaaaggtgaacgggacaatgcagaactgcaggagtttgccaacgccattcttcagcagatagcagaccattgtcccgacatcctagagcaagtggtcaacgccctggaagagtcctcttgaccctgctttatggggaagcctgaggtagtcaacccaggagccaagaaaagagaactacgaggaacaggtgcccggaaccttcttggcaccaaacactacaaacttcatcccaacttgctcacttgaagaagtgtgattccagcaccgtttctacatctgccatcttactctgcctttctgctttggatgtggtctctacactaaccttcttgatgtccagggtagataaagggtcgaatctctctgaagaactgccacctggtcatcagcagtggagaactgtgggagctggtggctctgccctgacagagagccatggagcagaggagcctctcacctcctgtcctctgacatgagaatgaaaccaggaatggacttggagttcaacaggctgagaggatgcctccaatggaccagagagctgagtgttctaatatcacaataggtgctttctcctaaaagggcaaaaaacaatctcaaaaagattagaaaaagagaaggggggaagggaagagaaaatcgactcttctttttactgtctcttctgcttactttccacatgagatgctttgtaccggggagctgtgagcaggcctcacgatggcttgggagcactcgttctcccaaggtctgagtcttcatccagccctgcctgtctgtcgcagccttcctcactctgttcctcggccagttaacaagaagatggtgtgaggtgttctccaccagtctctcctgtttgagactgttgacgttatcatactgaggtgttagatcaaatatctctaattgaagaacatgtgaggttgaaagagcaccagccagggcaacatagcgtgaccctgtctctacaaaaaattaaaaagagaacatacaaagttgacatatgagaccctgttgtccccgcctgcagctttgccccagtaacagatgcccgttgctcttgggctggtttcccctgaacacctccaagaggctgcctgccttgccagcacccgtgtcctgagctcctgcagcccagtggctgctgaagttgtgatccctcactcaccctgctagctttgcccttgactcgtcttctctgaacctcagcctcgtgcattgcctggaaccttcttctagcataaatgaaggtttttcctcctacacacattccttcctcggttatttcattcagagaatatttatgaaatgcctactgtgtgcaagtcatccatccttgaaaaggccacttctcagtgagggagagatgtagtggattctgtgagacatacctgctggagttgaagcagtaaatagcatgtccttcccctccccgatcttaaggtgtgttttctagaaaagttccctaatggaattcatgagtttgggggtctcagtcacccgcttgcctgtaggattccatttgatgattctggatttttgctgtttgttattgcccttagaggggctctgagtatctacttgtgggtggccatttcctgacatctgcatgtacctcgtggaattcagccagcttcatgttgcaaatcagaaagctgaccccaagactgcaaatcaatgaaggtattggcattgttaaggacgtagcgtagacaacagcagtcataaataattaggcaggaacttaacccaaatctagttctttgaccacctctaccaccagaacccagcagacactcacatctcctgataagagttgctggactcgatgtttttgttttgcattttctcctctccttccccacttactcagagaatttaaagtctgtagagtcagcacagccccatcagtccaggaacttcccaccaccagcccttgactgtcccattaactgacatggtcagatttccagctccccctactccctgctgtgaaacaatccctctccctgtgagaggaaactgtggagcgtttcttatcgaaggttaaatggactctgctcataaacctcttactgagatgcttcctgatagccaggctggccagagaggggtgcaggggttagatagtaagtggtggtcgtttgtggtcagttacctcaattctgttcattgcagtgcccgtaaaccatgtagaaagctcccagcactgaaaggcaggagtgttagcatctcgctttatccaccataacgtaaagaactgcggtgtgataacagccttcacggggccacggtggaaccaagacagcaggcgaggccatgcctaaacaagtggtctggcacgggcactggccagctgctctctccaagcaggtggcccagatcccacccacgtggactttctcatcaggtgcagcgcctgccactctcagccactgggtgtgtcactctcctcttcatctcagcattctccatcacttcccctccagaaaaacggatggaaggaagccctctgtgacactgcttctgagaagaagcatttccgggaccgatatcatctgtctggtctctgtgaacagcaaggaatcttcttgaccgttcttgggcactggaggctggctaggagttcagtaataaacgtggccttcgtgctgtagggcagagtggatgcagtttgtagctttcagagtgtctcattgagtctagatcattgaaccaacacttaaccaaatgtcccactcccatcacactaggacttgtcattccatgcccctctcctagtggtcatggtttcatatgggcatacaactgctactgaagttatatagccttgaaaactcagtgcaggttgcccttaattttccccaaacccctccatcggcaagtctagttgccctttagcacctaaagatctgcaccccaaaccaatgtcaccataaagagggcacgaagaagagtgggtgtgatcccaacggggttttgtaactgaagaagcccagtgtgagcttctcatcttttcatatacctctaacccccggtactcattgaatcattgatgaggtatctcaattgagatttgcaaggactttgataccatttgaaatggaaaaattttgaacgggctttaacatgtttaagaaatatggatggggccggccacagtggctcacgcctgtaatcccagaactctggaaggctgaggcaggcggatcacctgagatcaggagttcgaggccagcctggccaagatggcaaaaaccccgactctactaaaaatacaaaattagccaggcgtggtggcgtacgcctgtaatcccagctactcaggaggcaggagaatcgcttgagcctgggaggcagaggctgcggtgagccgagatcgtgtcactgcactccagcctgggtgacagagactccatttaaaaaaaaaaaaaaaaaatatatatatatatatatatatatatatatggatgggaatcaccaaattcatctcagctctaaccttttaacctttgtccttgcactttacaatctaaagatctacctgtggctctcagacttcctcacacttgggttttagaaataacttgtaaagcagactggacccaaggccgccttcagtgtcaagaagggcattgtgacttgcccctcaatttctgtccattgaagtctggttttccatgaggaacttgcgggctcacccacccccagagtgagagaagaggaaggcgaagtcatcacagacacggtcttagccacctgctgaactaatccctccgctattgagggtcagggttgtgaggcaaccatcatgtgtcaccccaaaatataaatgtttctgagccgcccatccactggcatttggatttgctgccagagtcctgttcctcccagaaccatcccgccctcctgttgaccatgttacttgagtgtaggcccggtgtcaagaccctcagagtctttgaggaaagagccaagcagagaagaccgctgcgtggagtgtgacaccacatggcatttctcaagcccagcggaccctgtgtcagcaaataccagtaatttaacatctgctcctggcctcctcttcacctgcctgggttcggaactgaggaggaaggatgagaagagactgcaatgcagcaggcaccctctgcagagtgaggccgcccgtccatcactgccagccctgggctgctcaggaggggacgtgaaccactcaaaggaatgtcttaaagaggatctggagtttcccccatgcaaattagggaagaattaggcaagaaaagacatacattacagggaaatccttctgaacaaaatggctgtcttcacctactcttcttgcaagaaaagacatacattacagggaaatccttctgaacaaaatggctatcttcacctactcttcagcaaaaaccgtctccagactttttagtgtcaaaaatgtaaccaactgtctcctgattttttccaatgtgtttggcaagtgctgtggccctgttgtaggtacttctcctgactcttgggggagaagtggttttagggattgatttgggggagcgggtttttgtcccatcccacctcctctcttctttctctgcttgtcgatattgtctgtgtgattcagagaattggggcagttacattgtgtctgttgttgagattattaaaagattaaaacgtagttgtagaaatgaaaaattaaacagctgtgttttaaaaatgcaaaccaatatcttgttaataaaggaattcaagctatggggcagccacactcccctcctcccaggctggcataggtggccctgggctggcggcttaggaagcatggagcacacttagggtagtgcctgcctgggcaagagacacctgccgagcaaaaggaacgagaatctggggctcagagcctcgcagttgtgccaggattttcctatacatgttcaggacctctgggtagaggtttcacagtttgtgaccccataaccaccctcacccgacgtgggttctagctcagtgtgcctaatactgcatggtaacctgggcttgaccctgaagcccctgcctggcaggccacaggacctctcctgcccacttggtgctatctcttccagtgaccacccagcacgggtgagcactggccagcctggagcctgcaatccaggtggaacagactgtcctccatgtcagttccttctggcttcaggccctcaattatttccctttgagcttttttagaccctagatctcctaggcccaggctctctcttgaccccagagaagccactgtcaggaaaggaagtgaaccctactgaagccagagaattcaccccggccaaagcaggccctctgggtccagcccctcattccacaccacgccagtattgcatccatctactgcagctacacatcctgagggcagcaccacccactctggcctgctggcccatcgcaggactagcccaggcacctgccgggcattgcaggatatccagtggggcctgtgactgctccctgatgcgtcagaagagaagtgttgcactttagtggaggagctgaggagcacctgcccccttgtagcttgagttccttttggtaacagtagcagcctccatggtggtgtctgggatgcacgtgcacccgctgccttcagctgtatgtgtgtgttcctgctggagttgtgttactgacaggataatgacattacaaagaaattgtgttatattcaactttgccttgataattattgtaaacactttgttcattttttcttttttattcacaaactaaatccaccaggaaattataaagttattt

SEQ ID NO: 4245 - DNA, 2847 bp, Homo sapiens
  source 1..2847: mol_type = genomic DNA
ggtttgcgactgggagaggaaatctgtgtcctggacaagattggattatggaagtgggaagtgaagaagaaaaatgggagaagctggatgcagaatttgatcactttgtggttgatatgaagccctttgttctaaaattacctcataggacagaacggcagaggtgtgctctttggattagaaagctgtgcgaaccttcaggaacaggtgcaggaataatggggaggaagaatcggaacctgtatgcaaaattgttattgcatatgcttaaacgaggtgcgcttgaaggcccttttacacaccgacctgaacccgggacactaaaaattctaccttcatacatgtccatctattttgatgaaccaaatccagcacgagcaaaaggttcaagcccagagggattaccagcctgggtactgggtgagctggagacaagtgaacacaaattaaatgaatcatggaaactctcttctggagaagataacactttagtacagtcgccaactgatgtctacagcagggaacagtacactgggaagctccgagtgagatcacactccttgagtccaactcacagagaagatggacaaaatattaccccaaagatttgtgaagtttattcgaaaaaatctcctgtttctttggatgatagtgacattgaagctcgccttaatagttggaatcttgggctggacatgaaaacaaaaatgatggaagctaaatttcatgaagaaaagcttaaactgcaacagaaacatgatgctgatgttcagaagattttagaaagaaagaataatgaaatagaagaactgaaaactttatacaggagtaaacaacatgaaactgaagagactattagaaagcttgaaaagaaagttcagacactgatacgtgactgtcaagttatcagagagactaaagaagaccagattgcagagctgaaaaagatatgtgaacaaagtacggaatctctaaataatgactgggaaaaaaagcttcacaatgctgtagcagaaatggaacaggaaaagtttgatcttcaaaagcaacacactgaaaacattcaagaattgcttgaggatacaaatgtgcgtctgaataaaatggagagtgaatacatggcgcaaacacagtccacaaaccacatgatcaaagaactggaggcccgtgtccagcagctgactggagaagcagagaacagtaatttacagaggcagaaattaattcaagaaaaagcagaacttgaaagatgttaccagataacgtgtagtgaattacaagaagtaaaggcaaggcgtaacacactgcataaagagaaggaccatcttgtaaatgattatgagcaaaacatgaaactgttacaaaccaaatatgatgctgatataaaccttctaaaacaagaacatgctctttcagcttctaaggcatctagtatgattgaagaattagagcagaatgtctgtcaattaaaacagcagttacaggaatcagaacttcaaagaaagcaacaactaagggatcaagaaaataagtttcagatggagaaaagtcatttaaaacacatctatgaaaaaaaggctcatgacttgcagagtgaacttgataaaggaaaagaagatactcaaaagaaaattcataaatttgaggaagctttgaaggaaaaagaggagcagctaactcgtgtgactgaagttcagaggttgcaggcccagcaggcagatgccgctctggaagagtttaagcggcaggtggaactgaactcagagaaagtctatgctgaaatgaaagagcagatggaaaaagtggaggcagatctaactagatccaaatctcttcgtgagaaacaatcaaaggagtttttatggcaactggaggacatcagacagcggtatgaacaacagatagtagagctgaagctggagcatgaacaggagaagacgcacctattacagcagcataacgcagagaaggatagcctagtccgagaccatgaacgggaaattgaaaacctggaaaaacagcttcgcgctgccaatatggagcacgaaaatcaaattcaggagttcaagaaacgagatgcacaggttattgccgacatggaggcccaggttcacaagttgagagaagaattgatcaatgtgaactcacagcggaaacagcagctggtagagcttggtcttcttcgtgaagaggaaaagcaaagggctacaagggaacatgagattgtcgtcaataaactgaaggctgaatcagaaaagatgaaaatagagctgaaaaagactcatgctgctgagacagagatgacactggaaaaggccaacagcaagctgaagcagattgagaaggaatacactcagaagcttgccaaatcttcacagatcatagcagaacttcagacaaccatttcctctctgaaagaagagaacagccagcagcagcttgctgcagaaaggcggctccaggatgttagacaaaagtttgaagatgagaagaagcagctgattagagataatgaccaagcaatcaaggttttacaagatgaattagaaaaccgttctaatcaggtgcgatgtgcagagaaaaaattacaacacaaagaattggagtcacaggaacagataacttacatacgacaagaatatgaaacaaaattgaaaggattgatgccagcatccctaagacaagaacttgaagacaccatttcctccctaaaatcacaggttaattttctgcaaaagagagcttccatccttcaggaagaactgactacatatcaaggcagaaggtaactgcacgagagaatgcaacggatgcaatttccaggctgtgctgtggacttcttccagc

SEQ ID NO: 4246 - DNA, 1049 bp, Homo sapiens
  source 1..1049: mol_type = genomic DNA
gctactgtcacatttcagtgatgtcacagctgcaggtggtacagagccagcaccaccatctgatgcccagcctgagtgctggctgaactgagaggaacagggttggtgcctggcactggtgttgctccattcatctctgaggtctcacagccccagcatgagtccatcagcaaagaagaggcccaagaacagcagggtttccaagatgcaagatgagaaactgcgggacgagacagagcagcctgtgagcaaagtaattgagcggaaccgtctgagaacggtgttaaaaaacttgtcgctcttgaagctactcaagagctcaaaccgccggatccaagaactgcataagctggccaaaaggtgttggcattcactgctcagtgttccaaagattctccgcatctcctctggggaaaacagtgcctgcaataaaacaaaacaaaataatgaagagttccaggagatcgggtgctccgagaaggaactcaagtccaagaaattagagtccacaggggaccctaagaaaaaagagtacaaggagtggaagtcccaggtgcagtcagggatgaggaacaaggagaaaacgtcattggcggcaatgccacggaaagaaaagcatatagagcctgaggttccaaggacatcgagggatgatagcttgaaccctggagtccaggggaggcaaccactcaccgagggcccccgagtcatcttcattaagccctaccgcaatagaactcccatggggcacatgaagcagctggatgtagccgaccagtggatctggtttgaggggctgcccacacgaatccacctcccggcgcccagggtgatgtgcagatcctccaccctgcgttgggtcaagcgccgctgcacccgcttctgctccgcatcacttgaaatgcctatgtggcatccatacaaggttgatgtgacctggacgagagccagaggtgcgagcagagggtggagatcgcgccatcagctgaaggggaggaatgggtggcgaaattcacgagtctacaaataagatcttccatatggcacct

SEQ ID NO: 4247 - DNA, 619 bp, Homo sapiens
  source 1..619: mol_type = genomic DNA
aaataattcacaagttggccatgcagctgagacacattggggacaacattgatcataggatggttcgagaggatcttcaacaggatggcagagatgcactagatcattttgtcttctttttctttagaagagttcaggtgttgctgcattttttctggaacaaccatttgctgtaaaaggaatgaaagagaacctcgtcctcaaactaaaggccacagaaatgggcactacctcctggcccactccctgggcaccatgccctctggtgacctgttggctccactcttgtcactcatgtccagatctgcagtgccagcttctccttctcggtgacatgtcacctccctgccccaatcctggctccaaccctctctggaaaatcgaagtgaaacatttgtctctaatactcaaattcaacatatggctcatctcatctaccttcccatttccatgcctagaggccccactactaccactagcaccgttgggtgtttccttctcaggctctgattctacaacatttacgttcttttctcacctttgatcccctcactcctctgtgacccccttcaagtcttccttcaccactccagtgttttcccataccactcgaccctgc

SEQ ID NO: 4248 - DNA, 887 bp, Homo sapiens
  source 1..887: mol_type = genomic DNA
aatcggctaggagcagcgagcggcgcggctgaggcgcggcggccccgtggagcagcgcagtatggcgggcggggcccgggaggtgctcacactgcagttgggacattttgccggtttcgtgggcgcgcactggtggaaccagcaggatgctgcgctgggccgagcgaccgattccaaggagcccccgggagagctgtgccccgacgtcctgtatcgtacgggccggacgctgcacggccaggagacctacacgccgcgactcatcctcatggatctgaagggtagtttgagctccctaaaagaggaaggtggactctacagggacaaacagttggatgctgcaatagcatggcaggggaagctcaccacacacaaagaggaactctatcccaagaacccttatctccaagactttctgagtgcagaggtgagggcctctgtcctgaactttttaacccggtgccacaacctgagggtctccataggggcagggagtgctgagtagtgatggtgtctggagggtcaaatccattcccaatggcaaaggttcctcaccactccccaccgctacaactccaaaaccacttatccctacagaggccagcatcagggtctggtcagacttcctcagagtccatctccatccccggagcatctgtatgattcagaagtacaaccacgatggggaagcaggtcggctggaggcttttggccaaggggaaagtgtcctaaaggaacccaagtaccaggaagagctggaggacaggctgcatttctacgtggaggaatgtgactacttgcagggcttccagatcctgtgtgacctgcacgatggcttctctggggtaggcgcgaaggcggcagagctgctacaagatgaatattca

SEQ ID NO: 4249 - DNA, 3505 bp, Homo sapiens
  source 1..3505: mol_type = genomic DNA
atcgcagcgagagcgtttttgcctgtggagagccggccgacgggagccgcggcggagcctgttgagctcgcgcgggctgccgggagtggtctctgaggcggcggcggcggcggggatcgtctccggcactgacgcaccatgtcggtcagtgtccatgagacccgcaagtcgcggagcagcacggggtccatgaacgtcaccctcttccacaaggcctcccacccggactgtgtgctggccgcctctagccgctattttgaggccatgttcagccatggccttcgggagagccgggatgacactgtcaacttccaggacaacctgcacccggaggtgctggagctgctgctggactttgcctactcctcacgcatcgccatcaacgaggagaacgctgagtcactgctggaggcaggcgacatgctgcagttccacgatgtgcgggatgctgccgccgagttcctggagaagaaccttttcccctccaactgcctgggcatgatgctgctctcggacgcccaccagtgccgccggctgtatgagttctcctggcgcatgtgcctggtgcactttgagacggtgaggcagagcgaggacttcaacagcctgtccaaggacacactgctggacctcatctcgagtgatgagctggagaccgaggacgagcgggtggtcttcgaggccatcctccagtgggtgaagcacgacctggagccacggaaggtccacttgcccgagctcctccgcagcgtgcgtctggccttgctgccgtccgactgcctgcaggaggccgtctccagcgaggccctcctcatggcagacgagcgcaccaagcttatcatggatgaggccctgcgctgcaagaccaggatcctgcagaatgatggcgtggtcaccagcccctgtgcccggccacgcaaggcgggccacacgctactcatcctggggggccagaccttcatgtgtgacaagatctaccaggtggaccacaaggccaaggagatcatccccaaggccgacctgcccagcccccggaaggagttcagcgcctcagcgatcggctgcaaggtctatgtgacggggggcaggggctccgagaacggggtctccaaggatgtctgggtgtacgacaccgtacatgaggaatggtccaaggcggcgcccatgctgattgcccgctttggccatggctcagctgagctggagaactgcctctatgtggtggggggacacacatccctggcaggggtcttcccggcctcgccttctgtctccctgaaacaagtggagaaatacgaccctggggccaacaagtggatgatggtggcccccttgcgggatggcgtcagcaatgccgcagtggtgagtgccaagctgaagctctttgttttcggaggaaccagcatccaccgggacatggtgtccaaggtccagtgctatgacccctcggagaacaggtggacgatcaaggccgagtgcccccagccttggcggtacacagccgctgccgtcctgggcagccagatcttcatcatgggaggtgacacggaattcacagccgcctcggcctaccgctttgactgtgagaccaaccagtggacgcggattggggacatgactgccaagcgcatgtcctgccatgccctggcttccggcaacaagctctatgtggtcgggggctactttgggacccagaggtgtaagactctggactgctatgaccccacttcagatacatggaactgcatcaccacagtgccctactcacttatccccacggcctttgtcagcacctggaagcacctgcccgcgtgaggagcacctgctgagcccagccagaccgcggccttcagtgtcacagcgtggccttgcttgtctgccacagcgggagctaagccggccctgggccagcactccgagaggtggaaggggccctgccagctctggggagcagcagccttgggctgttctgagctttaggcaagagaagagaagcatctcttgcatccgtgcccctgggggcctcttcagctttgcagtggtttgtgggaagacatacctcccagaggggcatggactgccaccaggactgaccctggcgtcggggagaaggacacttgcagagccttgagatcacctgtttggcaggtcctggactggggccgggcaggcaggggcagggaggcgccccgggtgggctttggggctgcggcactgccacacatcctttccctcctggcctgccctgctggggctctactgccatctatagatggtgtcctgggcctgggaaactaggttcccaggggttgagaccagaaaggtgaccaagacagattttttaaggtgcagaaactgcaggggggcctcagtgacatccatgaggccttattagcaaaggacacccagacctccaaggtttgtgggccccttccacaaagctgtaagtcccagcccacctactcagggccttgctcagtgctgtggcccggtggggacacagttgctcgtggccactcagtggagctgggcctgcagcagactcaaggctccgagtgccctgggggtcacccctcccctcccctcctcagagcccaccctgagaggcagcagtgacccccatggcacacacctgccaacagcactgggggcttctccccaggagaccacgctgccctccaagaccaggagcagctgtgagctggagacagcagagggaccccagggtgtcccctgcagatcccaccagggccgcatccatctcagtgtggaggacagtgacgggaccctcaccatcctcttgcgttttggcccccatttgctccctgagctccaagataagaatggccccgagagaactgctgaacatttgttcattgctgtcacctcctgagtcactggggtccctcaccagcacctccctgacacctgggctatggagaggttggcgcctgtcagtgaccatcctaatgcctctcgctcactcccaagccaccatttgagagggaggggtgttggtgccctgacagggactgggcagggtgtccaaacttggggcttcccaggcacctgcagtgtgaacactgcttggctggctcaagattagggccgcggagggggctgtgcacataccagttacttaagcagccacgagtgtcccccatgccttggtgcgggtcctggaggcctcttgggggtgggacctttgggcagggtttgcccactgacacgcccgccatggggcactggctgcatggggctccttggaccctgtagacccagcagaccccgcctgtgtcaggccagctgcccgaaggcacttggctgtggtcccaggggacggctctgctggcacactcaggagcctggccgcggggactgcagggagggtgcctggacccgtggggttgcttcattgagataaagcacacttatcacatagcacaaaggacgtgccatggtgctttccccaaaagttgtgttgcttttatcagttttctaactt

SEQ ID NO: 4250 - DNA, 2916 bp, Homo sapiens
  source 1..2916: mol_type = genomic DNA
atgaatttcctccgcggggtaatggggggtcagagtgccggaccccagcacacagaagccgagacggtgagaggagcagcgggtctgggacttgggaaggggtccgggcagggacggggacggagcactcggagacccgaagagtgtggacttaaatttagacatagttttcgtttagtcaagcacattttataccatgttactataaatgtttcagattctgaaataataggttatgctttggacacactatataatataatatctaatgaagaagaagaagaagtaggcggatcacaagaagaaaattccacaagacagagtgaagatttgggaagccaatttacagaaattttcattaagcagcaggaaaatgtcactcttctgttatctttattggaggagtttgatttccatgtccgctggcctggtgtgaagcttcttacttctcttttaaaacaactagggcctcaggtgcaacaaattattttagtcagtcctatgggtgtttcaagattgatggacttactagcggattccagggaagttatacgtaatgatggcgtcttactactgcaggcactaacaagaagcaatggtgcaatccagaaaattgttgcttttgaaaatgctttcgagagactactggacattatttcagaggaggggaacagtgatggaggtatagtagttgaagattgtttgattttgctccaaaacttattaaaaaacaacaactccaatcaaaatttttttaaagaaggctcatatattcaacgtatgaaaccttggtttgaagttggagatgaaaattctggctggtctgcacagaaagtgaccaatctacatctaatgctacagcttgttcgtgtattggtatctcccaccaaccctcctggtgctaccagtagctgccagaaggctatgttccagtgtgggttattgcagcagctttgtactatcctaatggctactggggttcctgctgatatcctgactgagaccataaatactgtatcagaagttattcgaggctgccaagtaaaccaagactactttgcatctgtaaatgcaccttcaaacccaccaagaccggcaattgtagtacttctcatgtccatggttaatgaaaggcagccatttgttttgcgctgtgctgttctctattgtttccagtgtttcttgtataaaaaccaaaaaggacaaggagaaatcgtgtcaacacttttaccttctaccattgatgcaacaggtaattcagtttcagctggccagttattatgtggaggtttgttttctactgattcactttcaaactggtgtgctgctgtggcccttgcccatgcgttgcaagaaaatgccacccagaaagaacagttgctcagggttcaacttgctacaagtattggcaaccctccagtttctttacttcaacagtgcaccaatattctttcacagggtgataagatcgacagacggggaagcaaaatacaaacaagagttggattattaatgttgctttgtacctggctaagcaattgtcccattgcagtaacgcattttcttcacaattcagccaatgttccatttcttacaggacaaattgcagaaaatcttggagaagaagagcagttggtccaaggcttatgtgcccttttgttgggcatttcgatttatttcaatgataactcacttgagagctacatgaaagagaagctaaaacaactgattgagaagaggattggcaaagagaatttcatagagaaactaggatttattagcaaacatgagttgtattccagagcatctcagaaaccccagccaaactttcccagtccagaatacatgatatttgatcatgagtttacgaagctggtaaaagaacttgaaggtgttataactaaggctatttataagtccagtgaagaagataaaaaagaagaagaggtgaaaaaaacattagaacagcatgacaatattgtgactcactacaaaaatatgattcgagagcaggatctccaacttgaggaattaaggcagcaggtttctacattaaaatgtcaaaatgaacagctccagacggcagtcacacagcaagtatcacagatccagcagcacaaagaccagtataatcttcttaaaatacagctaggaaaagacaatcagcatcaaggttcttacagtgagggggctcagatgaatggcattcagccagaagaaattggtagattgcgagaagagatagaagaattaaaacgtaatcaggaacttttacaaagccagctgactgaaaaggactctatgattgaaaatatgaaatcttcccaaacatctggcacaaatgaacagtcttcagcaatagtttcagctagagattctgaacaagttgcagaattaaaacaggaactggcaactttaaagtctcagttaaactcacaatctgtggagatcaccaaactacagacagaaaagcaggaactgttacagaaaacagaagcgtttgcaaaatcagttgaggtacaaggagagaccgagactataatagccaccaaaactactgatgtagaaggaagactgtcagcattattacaagagaccaaagagttaaagaatgaaattaaagctctgtctgaggaaagaactgccattaaagagcagctggattcatctaatagtaccattgccattttacaaactgagaaagacaaactagagttggaaattacagattctaaaaaagaacaagatgatctcttggtgctcttggccgatcaagatcagaaaatactgtcattgaagaataaactcaaggatcttggtcatccagttgaagaagaggatgaacttgaatctggagaccaagaggatgaggatgatgaaagtgaagatcctggcaaggatctagatcatatctag

SEQ ID NO: 4251 - DNA, 642 bp, Homo sapiens
  source 1..642: mol_type = genomic DNA
gcgttttatgagccatatggaagtctgaagagctgctcagctctgacagctgtttaaattatctgtgacactgcatcccaccattagcagggatgatggattgttgacagtctccatcagaaaaggctggagtcccagtccgtggaggagcacttacagggtctttcctaagtgctgaggctctgtgtatgaatgacaaggataccttcagccagctcattctggatgaatgaatgattacactaagtgtcctccacattcctctgtgggctcacttcatggactcactttgcgtgcttgttaaatgtgctgtgttgctcccaagaccatgtaaagcctactgaccactaacctccctcacagcagaaactagacgtcaggttaaaatgggcaactccgacagtcagtacacccttcaaggatctaaaaatcatagcaatactattactggtgctaagcaaattccttgctccctgaaaatacgtggcattcatgcaaaagaggaaaagtcattgcatggatggggtcacggaagcaacggagcaggttacaagtccaggtccctggcccgaagctgcctttctcactttaagagtaaccagccttacgcatcgagactcggtggccccacatgcaaggtct

SEQ ID NO: 4252 - DNA, 2391 bp, Homo sapiens
  source 1..2391: mol_type = genomic DNA
gggggcgggctcccggtcccgctatcggcggccggcgggcaggcgactcctgtcccgggtggaggcggcggagccggagccgggggagggggcagcggctgtctcacggaccacggcggcgcccgcagctcctcaccgaaacaaggagaccagtgctggtccagtggctgtgatgggaaaagattattacaagattcttgggatcccatcgggggccaacgaggatgagatcaagaaagcctaccggaagatggccttgaagtaccacccagacaagaataaagaacccaacgctgaggagaagtttaaggagattgcagaggcctatgatgtgctaagtgaccccaagaaacggggcctgtatgaccagtatggggaggaaggcctgaagaccggcggtggcacatcaggtggctccagtggctcctttcactacacctttcatggggacccccatgccacctttgcctccttctttggtggctccaaccccttcgatatcttctttgccagcagccgctccactcggcccttcagtggctttgacccagatgacatggatgtggatgaagatgaggacccatttggcgctttcggccgttttggcttcaatgggctgagtaggggtccaaggcgagccccagaaccactgtaccctcggcgcaaggtgcaggaccccccagtggtgcacgagctgcgggtgtccctggaggagatctaccatggctccaccaagcgcatgaagatcacaaggcgtcgcctcaaccctgatgggcgaactgtgcgcaccgaggacaagatcctgcacatagtcatcaagcgtggctggaaggaaggcaccaagatcaccttccccaaagaaggcgacgccacacctgacaacatccctgctgacatcgtctttgtgctcaaagacaagccccatgcacacttccgccgagatggcaccaacgtgctctacagtgccctgatcagcctcaaggaggcgctgtgtggctgcactgtgaacattcccactatcgacggccgagtgatccctttgccctgcaatgatgtcatcaagccaggcaccgtgaagagactccgtggggagggccttcccttccccaaagtgccaactcagcgaggagacctcattgttgagttcaaagttcgcttcccagacagattaacaccacagacaagacagatccttaagcagcacctaccctgttcctaggctctgccccagccagtccagagcctaccacagcaatacccccaacactcactccactcaatgtgcacccagcttgatgtccactggacactggcaactttttctaaaatgcaaaaaaaagccactggttttcaggaaaatgttcctgtccctgaccccttttagagctgggctgcctggggggagtgggagggaggtggggagagctagcccaggccaggggtcaatgttcatgtcactagctttcaatccagtttccactgcagtggctggagagtgacctgagtgctacttgaagatatgtagagattccttatccatgcctgtacatagcatgtcctcctcccctcagctttgctaataccagtcccctcccttccctttggcttcctgctgttgggggtggaaaagactagaaaggacattgctttctcagccccacccccaggtccacagtgtccaaggtaatggcacacatattcatgcacaagaagcactcacctagagctgtctgtgcctctctgggagaaaggagagaggataagaagggaaagttcacaacctgtgaacagggacttgagcacgagacacttttcatctggagcaggggggtgagctcctcagcagcctccgtaacagctgccctgcctacacctgcagagctggaggttctgtcctccctgctgctctcaggagtgttcaagggtggagggcagggaatggggcctgaggtattaaggctaagaggtgggggacagggcccatctaccagccttcatcaggaagggaaagggctttggggtcaggtggcagctattccccaccaagagattcagggtcacaggtttttccccacacctctgaactcagggcctagccacccccaaacttccaaatcccacttttgtgatatgtgaagctactcatttcttacccttggaggctgtgtggggaatttccagcccttttatgcctgtgtgatcccaccccacccccatagttgtataaaggtcatagtgaagaagctgggggaagactgcttcagccagatcctggggtggggtctttaggttttctcactttgacaacccccgaatgtttttatagtagtttttttgtatttttttgtaatgacagtattatgtaaaaaataaagtattttaaaaatatgg

SEQ ID NO: 4253 - DNA, 1434 bp, Homo sapiens
  source 1..1434: mol_type = genomic DNA
gagcatttccggcagccatccccgcggtgctgacatcccggttgttcttctgtgccgggggtcttcctgctgtcatgaaggacgtaccgggcttcctacagcagagccagaactccgggcccgggcagcccgctgtgtggcaccgtctggaggagctctacacgaagaagttgtggcatcagctgacacttcaggtgcttgattttgtgcaggatccgtgctttgcccaaggagatggtctcattaagggtgaaccctttgtccctcgtggaaatcattcttcatgtagttagacagatgactgatcctaatgtggctcttacttttctggaaaagactcgtgagaaggtgaaaagtagtgatgaggcagtgatcctgtgtaaaacagcaattggagctctaaaattaaacatcggggacctacaggttacaaaggaaacaattgaagatgttgaagaaatgctcaacaaccttcctggtgtgacatcggttcacagtcgtttctatgatctctccagtaaatactatcaaacaatcggaaaccacgcgtcctactacaaagatgctctgcggtttttgggctgtgttgacatcaaggatctaccagtgtctgagcagcaggagagagccttcacgctggggctagcaggacttctcggcgagggagtttttaactttggagaactcctcatgcaccctgtgctggagtccctgaggaatactgaccggcagtggctgattgacaccctctatgccttcaacagtggcaacgtagagcggttccagactctgaagactgcctggggccagcagcctgatttagcagctaatgaagcccagcttctgaggaaaattcagttgttgtgcctcatggagatgactttcacacgacctgccaatcacagacaactcacttttgaagaaattgccaaaagtgctaaaatcacagtgaatgaggtggagcttctggtgatgaaggccctttcggtggggctggtgaaaggcagtatagacgaggtggacaaacgagtccacatgacctgggtgcagccccgagtgttggatttgcaacagatcaagggaatgaaggaccgcctggagttctggtgcacggatgtgaagagcatggagatgctggtggagcaccaggcccatgacatcctcacctagggccccctggttccccgtcgtgtctcctttgactcacctgagagaggcgtttgcagccaatgaagctggctgctcagacggtcgacattgaatttgggtgggggtctcagggtcttaggtgatacgggagagaaagaacgtgccaggcaggaggccccctgaagtctgtgtactccgaggtggatctccatccccatccacctgtacggacatcttttccgttgcggtttgagaatgttcctataataaacccctctgctttgt

SEQ ID NO: 4254 - DNA, 2242 bp, Homo sapiens
  source 1..2242: mol_type = genomic DNA
acagagttgtcctcggaggtccaggacagcggccagcccggcggcgggagtcagggccacgccacctgcagggaagaacccgagtcgaagcgggaagatggctgcagacaagcctgcagatcagggagcagagaaacatgaaggcacaggtcagtcctctgggatcactgatcaagagaaggagttatccaccaatgctttccaagctttcacatctggaaattatgatgcctgtctacaacaccttgcctgtctacaagatataaacaaagatgattataaaataattttgaatacagcagtagctgagttttttaaaagtaaccaaacaacaacagataatttgagacaaacacttaaccagctgaagaatcaggtccactcagctgttgaagaaatggatggattagatgatgttgaaaacagcatgttgtactataatcaagcagtcattctttatcatctgcggcagtatacagaagccatatcagttggtgaaaaactttatcagttcatagagccttttgactggtaataacaacaacaaagatggatctaatcataaagctgaaagtggagctctaatagaagctgcaaaatcaaagatacatcagtacaaagtacgagcttatatccaaatgaagtctctgaaagcatgtaaaagggaaatcaagtcagtcatgaatacagctggaaattccgcaccctctctctttcttaaaagcaattttgagtacttaagaggtaattatcgaaaagccgtgaagctattaaatagttcaaacattgctgagcatccaggattcatgaaaacaggtgaatgcttgagatgcatgttctggaataaccttggttgcatccattttgccatgagcaagcacaatttgggaatattctactttaaaaaggctctgcaagagaatgacaatgtctgtgcacagctcagtgcaggtagcactgatccaggtaaaaaattttcaggaagacccatgtgtacgttactaaccaataagagatatgagttgctgtataactgtggaattcagcttcttcacattggaaggcctcttgctgccttcgaatgtctgattgaagctgttcaggtttatcatgcaaatcctcgcctctggctacggctggctgaatgctgcattgctgccaataaggggacttctgaacaagaaactaaaggccttcccagcaaaaaaggaattgtacagtctattgttggtcaaggctatcatcgtaaaatagttttggcatcacagtctatacagaatactgtttataatgatgggcagtcttcggccattcctgtagccagtatggagtttgcagccatatgtctcagaaatgccttgttgctgctacctgaagaacagcaagatccaaagcaggaaaatggggctaaaaatagtaatcaattaggtgggaacacagagagcagcgaaagcagtgaaacttgcagcagtaaaagccatgatggagataaattcattccagctccaccttcttctccattgagaaaacaggaattagaaaacttaaagtgctccatacttgcttgcagtgcctacgtggctctggctttgggtgataacctcatggctttgaatcatgcagataaacttcttcagcagcccaagctgtcaggatctcttaagtttttgggacatttatatgctgcagaagccctcatctctctcgacagaatatctgatgccattactcacttgaacccggagaatgtcactgatgtctccttagggatctcttcaaatgagcaggaccaaggttaatgaggacatctttgatcagaactggtcactgtttccatttccctcctgtcataattcaggatgtgtggaaatttaggcatggtggtaatgagaagaaagttttaggttggctttccacatttttgtctgtacttactttgtagcagttgtttgctaagtagacctgagagttaatgatcacatcatctaaattctcacttttgaaaggctggtactgttagaatggttaattttggttctgatactatttatttgttttcctttggagtgattctaaaatccataggggagtaaaaatattgcattcaagagtcagttttagtccaggcgtggtggctcacgcctgtaatcccagcactttgggaggctgtagcaggagggtcacttgagcccaagagttcaagaccagcctgggcaacctggtgagaccctgtctctatttt

SEQ ID NO: 4255 - DNA, 1933 bp, Homo sapiens
  source 1..1933: mol_type = genomic DNA
agaaagatggcggcgatggcggtcgggggtgctggtgggagccgcgtgtccagcgggagggacctgaattgcgtccccgaaatagctgacacactaggggctgtggccaagcaggggtgagggccggacctccacgagcggaatgcggggtccgaactcggggacggagaagggcagactagtcatcccggagaagcagggactggaatacgctaattgtgggaaagctttctccatggattcgtccagactcaaaagtggagaagattcgcaggaactccgaggcggccatgttacaggagctgaattttggtgcatatttgggtcttccagctttcctgctgccccttaatcaggaagataacaccaacctggccagagttttgaccaaccacatccacactggccatcactcttccatgttctggatgcgggtacccttggtggcaccagaggacctgagagatgatataattgagaatgcaccaactacacacacagaggagtacagtggggaggagaaaacgtggatgtggtggcacaacttccggactttgtgtgactatagtaagaggattgcagtggctcttgaaattggggctgacctcccatctaatcatgtcattgatcgctggcttggggagcccatcaaagcagccattctccccactagcattttcctgaccaataagaagggatttcctgttctttctaagatgcaccagaggctcatcttccggctcctcaagttggaggtgcagttcatcatcacaggcaccaaccaccactcagagaaggagttctgctcctacctccaatacctggaatacttaagccagaaccgtcctccacctaatgcctatgaactctttgccaagggctatgaagactatctgcagtccccgcttcagccactgatggacaatctggaatctcagacatatgaagtgtttgaaaaggaccccatcaaatactctcagtaccagcaggccatctataaatgtctgctagaccgagtaccagaagaggagaaggataccaatgtccaggtactgatggtgctgggagcaggacggggacccctggtgaacgcttccctgcgggcagccaagcaggccgaccggcggataaagctgtatgctgtggagaaaaacccaaatgccgtggtgacgctagagaactggcagtttgaagaatggggaagccaagtgaccgtagtctcatcagacatgagggaatgggtggctccagagaaagcagacatcattgtcagtgagcttctgggctcatttgctgacaatgaattgtcgcctgagtgcctggatggagcccagcacttcctaaaagatgatggtgtgagcatccccggggagtacacttcctttctggctcccatctcttcctccaagctgtacaatgaggtccgagcctgtagggagaaggaccgtgaccctgaggcccagtttgagatgccttatgtggtacggctgcacaacttccaccagctctctgcaccccagccctgtttcaccttcagccatcccaacagagatcctatgattgacaacaaccgctattgcaccttggaatttcctgtggaggtgaacacagtactacatggctttgccggctactttgagactgtgctttatcaggacatcactctgagtatccgtccagagactcactctcctgggatgttctcatggtttcccatcctcttccctattaagcagcccataacggtacgtgaaggccaaaccatctgtgtgcgtttctggcgatgcagcaattccaagaaggtgtggtatgagtgggctgtgacagcaccagtctgttctgctattcataaccccacaggccgctcatataccattggcctctagccctgcgtgccaagtgtccagagccttggaagcagcttcaggttctg

SEQ ID NO: 4256 - DNA, 1862 bp, Homo sapiens
  source 1..1862: mol_type = genomic DNA
agtctagtgggataccaggccctgagagacccctacgatcccaggacactgatgtggggtaactaacacccactggaagtctacgctgagttcacaggctatgtatgacctgacatgcattttgacctgccctgtgttttgatatttgaatgagttgctgatgtttacaagccgaagctggccgggcgtggtggctcgcgcctgtaatcccagcactttgggaggtcgaggcaggaggatcgcttcaggtcaggagttccagaccagtctggccaacatggcgaaacctcgtctctactaaaaaaaaaaaaaaaaaaaaaaatacaaaaattagccgggcgtggtggcacgcccctgtaatcccaggactcgggaggctgagacaattataaattcattaacccccagaactcttggctagacttcataaaggcaaaaactgtgtttgccctgttaactgctttatcccaccactagaatataagcttcctgaagacagaagacttctgttattttgttcacagttaccaagcatgcctactttgttaaatttatgaaagaactttaaagagtcagaggttccggttgagatcaagttgggagacacacccttgttcattctccttgagaagcagctattatcaacagaacattgacagaacctgtgtttggggaaaggactgatggctttgagtctaggttggaaagcacacaggaaccactgtggtctcctcttgcaggctctgcgaagcagtggtcttctcttgtttccctgtggccagtgtccctggagaggagctggaagctttttggaccctgagataaaggctttcctggaggagaacactgaagtcaccagcagtggtagcctcacccctgaaatccagttgcggcttttgacccccagatgcaaattctggtgggagagagctgacctgtggccccacagtgatccttactgggcaatctactggccaggaggccaagccctgtctaggtatcttttggataatcctgatgttgtcagaggaaaatctgtattagatcttgggagtggatgtggagctacagctattgctgctaagatgagtggggcatcaaggatcttggccaatgacatagaccctattgcaggaatggctattacactaaattgtgaattgaacagactgaatccttttcctattttaatccaaaacattttgaatttggaacaagataagtgggaccttgttgttcttggcgatatgttttatgatgaagaccttgcagatagtcttcatcagtggctgaagaagtgcttctggacctatagaactcgagtactgattggtgaccctgggcggccccagttcagtggacacagcattcagcatcacctgcacaaagtggtagaatattcacttttggagtctactaggcaggaaaacagtggactgacaacaagcacagtgtggggttttcagccttgagttgtcaaagtgcttccaagtatgaatatagtaatgtttggatctgactctaaaagttttctctataggagatactctccagtttaatgaatgtaattcttgttaaatggaaaatcttgtttttaaaatatgaaggtttagagttttgtttacttttgtcatgtaactggttctgtatttctatgcatgccaattatacacatctctatctgcatttttttttctattttaaccgctgaaggaatatgattatacaatgccatactcaatggtggcagcatttaatttaagtaatggagaagaattaaacattgtagctggatctgtttctgtagtcgaggacaactgtgatgtaactttgaattaaacaaacaaaacaaaacagaagaa

SEQ ID NO: 4257 - DNA, 1401 bp, Homo sapiens
  source 1..1401: mol_type = genomic DNA
cttcactcccaacaatggcggctccgagcccgagcggcacccccgtcagcagcatgcagggtaaacgcaaagcactgaagttgaattttgcaaatccacctttcaaatctacagcaaggtttactctgaatcccaatcctacaggagttcaaaacccacacatagagagactgagaacacacagcattgagtcatcaggaaaactgaagatctcccctgaacaacactgggatttcactgcagaggacttgaaagaccttggagaaattggacgaggagcttatggttctgtcaacaaaatggtccacaaaccaagtgggcaaataatggcagttaaaagaattcggtcaacagtggatgaaaaagaacaaaaacaacttcttatggatttggatgtagtaatgcggagtagtgattgcccatacattgttcagttttatggtgcactcttcagagagggtgactgttggatctgtatggaactcatgtctacctcgtttgataagttttacaaatatgtatatagtgtattagatgatgttattccagaagaaattttaggcaaaatcactttagcaactgtgaaagcactaaaccacttaaaagaaaacttgaaaattattcacagagatatcaaaccttccaatattcttctggacagaagtggaaatattaagctctgtgacttcggcatcagtggacagcttgtggactctattgccaagacaagagatgctggctgtaggccatacatggcacctgaaagaatagacccaagcgcatcacgacaaggatatgatgtccgctctgatgtctggagtttggggatcacattgtatgagttggccacaggccgatttccttatccaaagtggaatagtgtatttgatcaactaacacaagtcgtgaaaggagatcctccgcagctgagtaattctgaggaaagggaattctccccgagtttcatcaactttgtcaacttgtgccttacgaaggatgaatccaaaaggccaaagtataaagagcttctgaaacatccctttattttgatgtatgaagaacgtgccgttgaggtcgcatgctatgtttgtaaaatcctggatcaaatgccagctactcccagctctcccatgtatgtcgattgatatcgctgctacatcagactctagaaaaaagggctgagaggaagcaagacgtaaagaattttcatcccgtatcacagtgtttttattgctcgcccagacaccatgtgcaataagattggtgttcgtttccatcatgtctgtatactcctgtcacctagaacgtgcatccttgtaatacctgattgatcacacagtgttagtgctggtcagagagacctcatcctgctcttttgtgatgaacatattcatgaaatgt

SEQ ID NO: 4258 - DNA, 8446 bp, Homo sapiens
  source 1..8446: mol_type = genomic DNA
atttccggcttctgggactcgggtgcaccacggcttccggtgtcatggctgcttgaagtcccgggagtcggtgaggcggctgcaggtccctccctgcggagccgctggtccggctggcggagatgtgaccgcgggcccggccggcctgcctcaggcgtcgcgtcagctcccgtgtccgtgcccttaacccacaccgatggcgggatccggctgcgcctggggcgcggagccgccgcgttttctggaggccttcgggcggctgtggcaggtacagagccgtctgggtagcggctcctccgcctcggtgtatcgggttcgctgctgcggcaaccctggctcgccccccggcgccctcaagcagttcttgccgccaggaaccaccggggctgcggcctctgccgccgagtatggtttccgcaaagagagggcggcgctggaacagttgcagggtcacagaaacatcgtgactttgtatggagtgtttacaatccacttttctccaaatgtgccatcacgctgtctgttgcttgaactcctggatgtcagtgtttcggaattgctcttatattccagtcaccagggttgttccatgtggatgatacagcattgtgcccgagatgttttggaggcccttgcttttcttcatcatgagggctatgtccatgcggacctcaaaccacgtaacatattgtggagtgcagagaatgaatgttttaaactcattgactttggacttagcttcaaagaaggcaatcaggatgtaaagtatattcagacagacgggtatcgggctccagaagcagaattgcaaaattgcttggcccaggctggcctgcagagtgatacagaatgtacctcagctgttgatctgtggagcctaggaatcattttactggaaatgttctcaggaatgaaactgaaacatacagtcagatctcaggaatggaaggcaaacagttctgctattattgatcacatatttgccagtaaagcagtggtgaatgccgcaattccagcctatcacctaagagaccttatcaaaagcatgcttcatgatgatccaagcagaagaattcctgctgaaatggcattgtgcagcccattctttagcattccttttgcccctcatattgaagatctggtcatgcttcccactccagtgctaagactgctgaatgtgctggatgatgattatcttgagaatgaagaggaatatgaaggtctttgttgagtatgcaaatgctggtgattccaaagctgcgcagaaattactgactggaaggatgtttgatgggaagtttgttgtggctacattctacccgctgagtgcctacaagaggggatatctgtatcaaaccttgctttaatcagtaacctaaggactgtttcctttttctcctcttccatttcttgggttattccacatatgaatgcaggactacccccttaccattttaagaaggtactttatacatttatttaatcctactaatgtgcagccattgcccaagcagtgactgcgttgcatacatttggcactgagtaggacaagacctctcagctatacattgaggggttttagagcatccatgtgggcaacccttttttgtgcgggagagcaggtgttgctcttcagtatgtagcctaaaaaaatcttaattatttcatggatcatgaagcaaggatgaataatatcatgtcttggtaaatactaacaaatttgttaggtttggtgacatcatttacagattatttctttatgttgtccagtggttcttccttattgttgatatccataagctggcactggatgctctcagtaatgttaagtaattgtcaagcagcagttacctactgtgttcttaacactgagttgtgaattttttcttaaagcagtactgtagtactgaatattcctttaaaggaactgcagtgagcctatctaagtttttttaaattaaggcttttaaaatagaaagctgatgcttgatcttgcacaatttttatgtctagtatgtatgcttgagtgaatgtgcgagtatgaatgattagagaaaatttgagtcagtgtactttatagtgtgaatcctgtgagctaatacagtctatacttatttcttccctacctgtttcacatccgtaagatttaagatatacattttttgagaggtagtctgtctgatacaatgtaaatgacaaaacataattcctgagaggcccagaacaaactggagtctagcctggagttaaattgagacttctaaaatgattggaacaaagactaagttgtgccagatgtaaatcaacccctcttttagtttactttagactttgtattagctcatcttttttgtagtaaatctatagttttaaggtttctcaagatgtggctctacctactatgatgaaaattgaagtgggtcaaaagaattagatgtacagtgaagggaaaagaaaaaaaatgggcgaagagagggtggaaaataaaaggattcttttttcttcctttctgtttctcgtatccctgctccctttttcctccccttccctcattctttgcctctatccttagctgaagacaaactagaggagcagcatcccaggtagtttggcttttgactgcaaggtagttaagaaaggtgtagatataatgaggtagaagtagaaaggaagaaaaactcaaagaattcttaaaaggattcatagcaacataatgtgtccctgagtagaggatgctgctatgcgtgagttcatggacacaagttgattacatggtttttagaattataattatggattcttcttatttcatggtaggttgtctttaaagatataaaaattaggatgcctttatgaagcactgattataccaaaaaaaaaagacaagttatatacaggttattaatttttttatttatttattttttcctaaggaaaaagtcttctatctttccctgctggaagcctcctcatatttccttatgtttgccatgcaggttgctgagagtccagttagaatttgcattttacagaatgaaatactttaccccattcaaacaattattgtttgacattttagttatttataattgtcaaattcaggactctcctttaatgtttattatgaaaccaaatttggcataaggaggctgatttatgaattaccaaagggtcttgtggcatgttccccaatacatgcccttagaaggaagaactattattttttattttggccctttcaggagttgattataaattggtttgttttcaagtcagaattcaagtgggcagaacccgtattgtgaagacctaaactttcctaaatgttcatatgggtagcagattttgtggtgattagaaacatcaggtccttaaatacgatgaacatgggatacaaaggaattctttataagggcaagtatcctaagttagcacatttacttttctctcccctccgcccccaaaagaaaaatccttacaaataaactgcaggtaggcttctaagcctagtcctgcagtatgctgctaacatcttgatgccaatcttcacagcattctttgattgtcatcttattgctgatacattcatacatatatttagtgcttgacactgtagaattttgttacagaagatggttactagattttaagggagctgagggaataattgatgagccttgaattaaccatgcatttaattagattttttgttgttgttgttgttgttttgagatgatgtcttgctctgttgcccaggctggagtgcagtggctcaatctcggctcactgcaacctctgcctcgcaggtttgagcgattctcctgtctcagcctccccagtagctgggtttacaggcgcttgccaccacacctggctagatgttttatattaaagccagagaattgaaaaagaaatgcctcctgtgattgaaattattttatagctcttagcccgttctaccaaagatcacattagcagattacccctccctcctgtgatattatctttcttaaacctgaaccaaatatcaaaagatacaagtttcatgattaggatgaaatatatacatagggattttggtttattgaagttattgaaagacctagaaattttctttttgagagaaagggtaaagaggtgagggttcatgtcacttaacccctacccttttgggcaaattttgtctcaggtagtgtttcattccctaaattaatacctgtgcttccttgcctctcaccttcccagttacttctttggggtattactgtggcacattgtacacccagaaaaggcacatacagtgattattttgtgggaaatacttgattcttttgaaatatatttggagggggtagctagctagccactgtcaaaactaatgctgtatttacaggacaaaaacaagtagagttggacacctcagtaagagacagcattaactaaaagtactgactgccttttaaaggaatttttaaaactattctcttgcaataagagatccgcatttattaccactggatgtcttccttttttgtggccaccaatatagcagctctctttagagggattccctttctgctatgccttgagccaaactggctgcttttagaacaaaaaccataagtatggttttactcgaacttctctttgtttttattgagagaaatattgccttctttttggtactccagctgctaaagagtgctgagatatgttaaattattttttaaaagaaaatctccaaatacttatttaacttgtcttctagattcatgttgcttatattttaactattgagcaagtttattataaggaatgctgccatatagagaaagctgaagagaaaccatgggcagaaggcttttttctgtcttattacactggaccttcactctggtaagggcatcagttacttttctggaataaaaggcggagttagagcacttatcagatgctgtttcatggcttgttttagttaatttatcatgcagataactaacatttgggtatctttttgttttaggtcttattttctgactgttaggcctatcttacacataagttctactatcagtatacttggcagcatgacttttttttttttttacagttaatttaatgaaaatcagcaccattgtaaatgatagtaattgtaacaacatagttactgggtgaaggagtaggggagacactcagtaaccatctatttacctagacacttatgcaggggtacatgctaggtggctttattcagattcgggtacattggaatcacatcatgactttgagtctgatggctgtgtagataaagatttaagcaagtgccttgtgtttgctggaaaatattaaaactcatttgggtgaaagcttcccagatgatgataattaatagcacttctgcctttttcctggagtaacttttagattgagtcacatatgatagtataaaagtccaaaattttctgggtttacctttgttttatttttcatatatatattcactgtctgcctggaaatagccttggtttaccttatttttttgtatatgtaaaactattcatatttgattttattccaatattatatatgatggaaaagccagaattgtctggcagaatttaattcttccttggatctctagttctgtttttaatatcaggttccttcatcaaattttactactgtagctctgtgatataatttcatttcttgtcaattatggtcacatatagacaagtacttggtcacaattagctcaaaagaatccccatttcttaaggtgctcagtcaatcacctttattttgagatggtagtttttcaagttagtattacttactagctttcttgatgaatataaaaatgttgtctccatcatacagagctgagcctcttgtggtatattaagataagtcccattcttaatcacagaagaacatggatattttagtttttggagtacccagaattgtaaagattttgtttcattttgttttaggatagcttctctgcctaatactataggatatgtcatgttcgttattgtagccacctccctcagatgtttttcactatttttaaattatataatgaccagtagattcacagtagcatgtacttgacaagtgccatggatatttaagaagaaggtaaataattttaatattttttgctgtaattttataggagcagtggactgtaagagaaatatctataaatcagagagtatttaggaaactttgtattttataggtggtcattaaagtgatcttcaggatataagatagtttacacaaactttattctcctgataggaaatttttattcattttcctaccactcagcacttttgttctgccttgtactgcttatgaggattaatgttttaaatttgctttatttgtgcttttcagagagttgtcataattgtggcagttgtgtttgtggcactgtaaatgctgaaattcatgggaaacttaccaaatgactgcttgagtgttatttcccattaaattgggtagctgtcacaataaccagaagaaatcttgtggcccttttgaagaaagccatgtatgttttgttacctaggttcatagtattttaatttaaaggcaaagagaagcattctacttatttgtcttataaaccattaatcgttttttgtgcagaagagagcttattttgttatactgctttgtataatggaaataagtcacattctgggggaaaaaaactggaattgtttgtattttgtttttttggggggggatctttatgtgaaaaatcagagctacttgttaccataagcccttactatcaacaagataattatttgtaatcacttttttatcccaggttggaattgctttccccttctaagttatcttcccttaataatatttatgataccaggacagtgagggtataagagcaaatgtagtgaggtattcaaaaatcctgcatatatggactcaaaagttctttagttatttgaattatatatagctatattattttattagcttgggttgtcagaagattgccaattttaagagtaaagaggagagagataagtaataaaaatagaggaggggaagaaaatggctcccttactggtcttagtaatcttctatatagttaatgagctaaaaaatgatacttaaagttccaggtttggtaccgctagcatagaaacattgcctttcctacacattcctcatcattgtttcctcagaaaattattttaagagtttgtgaaaccagattaaatatctatattcagtttggcctaatttttaaaaataaatatttatactccagcttttgtgtatttggtgtacatcaccacttatgcaaatcaaggatcagaaaactggaggttagccatctccattatttccttttgcacattgggtacagtgggtggcattagtatgcactagctgcaaagtcacagcaccttatggaaataagtatgtttattataataaaaaaaagttaagctgcatctctgtagattatttactttgcagactgtaaagctgccctatcttttccagcagaatttactcttccattcttaattcttttttgaaatatcttaaataatttaacattcctttataacttcttaacagtgtcaaaactggggtagaagggattttattttttcccaaaagggttccatctttgctatctgttgatcagccttagaaaatctaagtatgatcaataaattttaatggttgatggcatcctgtgtcagctggagtagttggttgtgaatattaaaacctagtactattttccctcagtaacatgtaattgctacattttttataagaaggtatggttagaaaaaaatgtgaaagatcacttaaaccaaagccagttacaaggagtaatctctcctgttggtttaccttcacctcagaactacaagaatattacaatacatagtgaatagttgtctgtaacatttctaccagttgtttcagtagcatattggtcttggcatttcttggcactgtggttctgctgtattatttgtgatgtcttattgtttgtgagcttttgttttttttttaaagaaaaaacaaaaactaagtgggactatgtatgtagatgtgtgtcagtaccaaaaagttattttctcaaatccctaaatttctgatttccattcaagtcttttaaactctttcctgctgaatagcaaagaacttttattttccactttcctatattcctaaaaagtgtgaacaatgcgtttcagttgactgtattgcatacttttttgctgaagactttttctgtaaacacaattgccttgttcagttttgttgtaaactgacttaccataagatgcactgttgataatgctttctgatgtgtgtttgataagagtgataaaataaaagcttaaaaataaaggagttgctttttaatttc

SEQ ID NO: 4259 - DNA, 2327 bp, Homo sapiens
  source 1..2327: mol_type = genomic DNA
agcagagctaccagctgccctgttggcttcgctggtcggatcgtcctcctggccccgccaaacaggcggggggagcggccccgactgtggggccatggcagtagtctcctcgttcgccgccgccgctagcctagctgagtcgccggcttctgcgctaggggctcccaccgcctccgcaggctaaggagccgctgccaccaacgagctgtgagggttactatgctccctctttgccgccgtctcctcctcttgcccgcgcaggcacccctctggctgctcagtcctgcctcaggtacgacaccgagcttctggtcaggtgatggctcttaagatgaacacattgagcagtaaccgggcaaacatgctgaaagaagtacagctcatgaatagactctcccatcccaacatccttaggttcatgggtgtatgtgttcatcaaggacaattgcatgcacttacagagtatatcaactccgggaacctggaacagttgctagacagtaacctgcatttgccttggactgtgagggtaaaactggcctatgacatagcagtgggcctcagctaccttcacttcaaaggcatttttcatcgggacctcacatctaagaactgcctgataaagagggatgagaatggttactctgcagtggtagctgactttggcctggctgagaagatccccgatgtcagcatggggagtgagaagctggccgtggtgggttccccattctggatggcacctgaggttctccgagatgagccctataatgaaaaggcagatgtgttctcttatggtatcatcctctgcgagatcatcgcccgcatccaggccgatccggactatcttccccgcacagagaatttcgggctggactatgatgctttccagcacatggtgggagactgtcccccagattttctgcaacttactttcaactgctgtaacatggatcccaaactgcgcccatcttttgtggagattgggaagaccctggaggaaattctgagccgcctacaggaagaagagcaggagagggataggaagctgcagcccacagccaggggactcttggagaaagcacctggggtgaagcgactaagctcactggatgacaagatcccccacaagtcaccatgcccaagacgtaccatctggctgtctcgaagccagtcagatatcttttcccgtaagcccccacgtacagtgagtgtcttggacccatactaccggccacgagatggtgctgcccgcacccccaaagtcaacccttttagtgctcgccaggacctcatggggggcaagatcaagttttttgacctgcccagcaagtctgtcatctctctggtatttgacctggatgcaccagggcccggaactatgcccctggctgactggcaggagcccctggccccacctattcgccggtggcgttccttgcctggttcgcctgagttcttgcatcaagaggcttgtccatttgtgggccgggaagaatcgctatctgatgggcccccaccacgcctaagtagtctcaagtacagagttaaagagatcccaccattccgggcatctgccctaccagctgctcaagcccatgaggctatggactgctccattctccaggaagaaaatggttttgggtccaggccccaggggaccagtccatgccctgcgggtgcttctgaggagatggaggtagaagaaaggccagcaggctcaactccagccaccttctccacctcaggcataggcctgcaaacccagggaaagcaggatgggtgagggggtttagtccctgcctcaccttggggatggaccttcagctgaaaccatatggccccctaggtgcacagccttgattcttccctggagcctacagagcaggcaggctaggccaagccaggctcaacttctgggctcccagtgcccattggctgtgtatgacgggaggcagcagtgagaggccttcctagttagggccaacagctgataccaagcctctgaaatccagcaaggaggtctgcctcccaccagaccctctccagtgtacttccccagataggaccagaggatgtctagttctaggctgagctggcaggcagctattaccccggttctttccccaccccaggtctgtctcttgccttttcttggggcatataagctactgagtggaacatggagctgatcaagaggccgtaatggtcatggctgtttcccagacctgaatattggggtgcttcttgccagtattctaagacatttgagtaattgctgtttgcacttactgcatggtcagaccacgtcactacatttctatgca

SEQ ID NO: 4260 - DNA, 2099 bp, Homo sapiens
  source 1..2099: mol_type = genomic DNA
agcagcgggttagtggtcgcgcgcccgacctccgcagtcccagccgagccgcgacccttccggccgtccccaccccacctcgccgccatgcgcctccgccgcctagcgctgttcccgggtgtggcgctgcttcttgccgcggcccgcctcgccgctgcctccgacgtgctagaactcacggacgacaacttcgagagtcgcatctccgacacgggctctgcgggcctcatgctcgtcgagttcttcgccccctgttccattcctgctggatttgaagaggagagtctcctccagcctcattgaaactctttttgtggatttgatgaccttatggatattgccaaagtttaaggcagtggattttagtcccagccttgcagcttacacacacacctggttgctccccagatttctggagattctcattcagtgtggacactgcaagagacttgcacctgagtatgaagctgcagctaccagattaaaaggaatagtcccattagcaaaggttgattgcactgccaacactaacacctgtaataaatatggagtcagtggatatccaaccctgaagatatttagagatggtgaagaagcaggtgcttatgatggacctaggactgctgatggaattgtcagccacttgaagaagcaggcaggaccagcttcagtgcctctcaggactgaggaagaatttaagaaattcattagtgataaagatgcctctatagtaggttttttcgatgattcattcagtgaggctcactccgagttcctaaaagcagccagcaacttgagggataactaccgatttgcacatacgaatgttgagtctctggtgaacgagtatgatgataatggagagggtatcatcttatttcgtccttcacatctcactaacaagtttgaggacaagactgtggcatatacagagcaaaaaatgaccagtggcaaaattaaaaagtttatccaggaaaacatttttggtatctgccctcacatgacagaagacaataaagatttgatacagggcaaggacttacttattgcttactatgatgtggactatgaaaagaacgctaaaggttccaactactggagaaacagggtaatgatggtggcaaagaaattcctggatgctgggcacaaactcaactttgctgtagctagccgcaaaacctttagccatgaactttctgattttggcttggagagcactgctggagagattcctgttgttgctatcagaactgctaaaggagagaagtttgtcatgcaggaggagttctcgcgtgatgggaaggctctggagaggttcctgcaggattactttgatggcaatctgaagagatacctgaagtctgaacctatcccagagagcaatgatgggcctgtgaaggtagtggtagcagagaattttgatgaaatagtgaataatgaaaataaagatgtgctgattgaattttatgccccttggtgtggtcactgtaagaacctggagcccaagtataaagaacttggcgagaagctcagcaaagacccaaatatcgtcatagccaagatggatgccacagccaatgatgtgccttctccatatgaagtcagaggttttcctaccatatacttctctccagccaacaagaagctaaatccaaagaaatatgaaggtggccgtgaattaagtgattttattagctatctacaaagagaagctacaaacccccctgtaattcaagaagaaaaacccaagaagaagaagaaggcacaggaggatctctaaagcagtagccaaacaccactttgtaaaaggactcttccatcagagatgggaaaaccattggggaggactaggacccatatgggaattattacctctcagggccgagaggacagaatggatataatctgaatcctgttaaattttctctaaactgtttcttagctgcactgtttatggaaataccaggaccagtttatgtttgtggttttgggaaaaattatttgtgttgggggaaatgttgtgggggtggggttgagttgggggtattttctaattttttttgtacatttggaacagtgacaataaatgagaccccttt

SEQ ID NO: 4261 - DNA, 3001 bp, Homo sapiens
  source 1..3001: mol_type = genomic DNA
aaagagcccgctccgccgagcgccgggcgacggcaggaagcccctccgcttggccagaatggagcagccgaagggagttgattggacagtcatcatcctgacctgccagtacaaggacagtgtccaggtctttcagagagaactggaagtgcggcagaagcgggagcagatccctgctgggacgctgttactggccgtggaggacccagagaagcgtgtgggcagcggaggagccaccctcaacgccctgctggtggctgctgaacacctgagtgcccgggcaggcttcactgtggtcacatccgatgtcctgcactcggcctggatcctcattctgcacatgggtcgagacttcccctttgatgactgtggcagggctttcacctgcctccccgtggagaaccccgaggcccccgtggaagccttggtctgcaacctggactgcctgctggacatcatgacctatcggctgggcccgggctccccgccaggcgtgtgggtctgcagcaccgacatgctgctgtctgttcctgcaaatcctggtatcagctgggacagcttccggggagccagagtgatcgccctcccagggagcccggcctacgctcagaatcatggcgtctacctaactgacccccagggccttgttttggacatttactaccagggcactgaggcagagattcagcggtgtgtcaggcctgatgggcgggtgccactggtctctggggttgtcttcttctctgtggagactgccgagcgcctcctagccacccacgtgagcccgcccctggatgcctgcacctacctaggcttggactccggagcccggcctgtccagctgtctctgttttttgacattctccactgcatggctgagaacgtgaccagggaggacttcctggtggggaggcccccagagttggggcaaggcgatgcagatgtagcgggttatctgcagagcgcccgggcccagctgtggagggagcttcgcgatcagccccttaccatggcctatgtctccagcggcagctacagctacatgacctcctcagccagtgagttcctgctcagcctcacactccccggggctcctggggcccagattgtgcactcccaggtggaggagcagcagcttctggcggccgggagctctgtggtcagctgcctgctggagggccctgtccagctgggtcctgggagcgtcctgcagcactgccacctgcagggccccattcacataggcgctggctgcttggtgactggcctggatacagcccactccaaggccctgcatggccgggagctgcgtgaccttgtcctgcagggacaccacacgcggctacacggctccccgggccacgccttcaccctcgttggccgtctggacagctgggagagacagggggcaggcacatatctcaacgtgccctggagtgaattcttcaagaggacaggtgttcgagcctgggacctgtgggaccctgagacgctgcccgcagagtactgccttcccagcgcccgcctctttcctgtgctccacccctcgagggagctgggaccccaggacctgctgtggatgctggaccaccaggaggatgggggcgaggccctgcgagcctggcgggcctcctggcgcctgtcctgggagcagctgcagccgtgcctggatcgggctgccacgctggcctctcgccgggacctgttcttccgccaggccctgcataaggcgcggcacgtgctggaggcccggcaggacctcagcctgcgcccgctgatctgggctgctgtccgcgagggctgccccgggcccctgctggccacgctggaccaggttgcagctggggcaggagaccctggtgtggcggcacgggcactggcctgtgtggcggacgtcctgggctgcatggcagagggccgtgggggcttgcggagcgggccagctgccaaccctgagtggatgcggcccttctcatacctggagtgtggagacctggcagcgggcgtggaggcgcttgcccaggagagggacaagtggctaagcaggccagccttgctggtgcgagcggcccgccactatgagggggctggtcagatcctgatccgccaggctgtgatgtcagcccagcactttgtctccacagagcaggtggaactgccgggacctgggcagtgggtggtggctgagtgcccggcccgtgtggatttctctgggggctggagtgacacgccaccccttgcctatgagcttggcggggctgtgctgggcctggctgtgcgagtggacggccgccggcccatcggagccagggcacgccgcatcccggagcctgagctgtggctggcggtggggcctcggcaggatgagatgactgtgaagatagtgtgccggtgcctggctgacctgcgggactactgccagcctcatgccccaggggccctgctgaaggcggccttcatctgtgcagggatcgtgcatgtccactcggaactccagctgagtgagcagctgctccgcaccttcgggggcggctttgagctgcacacctggtctgagctgccccacggctctggcctgggcaccagcagcatcctggcaggcactgccctggctgccttgcagcgagccgcaggccgggtggtgggcacggaagccctgatccacgcagtgctgcacctggagcaggtgctcaccactggaggtggctggcaggaccaagtaggtggcctaatgcctggcatcaaggtggggcgctcccgggctcagctgccactgaaggtggaggtagaagaggtcacggtgcctgagggctttgtccagaagctcaatgaccacctgctcttggtgtacactggcaagacccgcctggctcggaacctgctgcaggatgtgctgaggagctggtatgcccgacttcctgctgtggtgcagaatgcccacagcctggtacggcaaactgaggagtgtgctgaaggcttccgccaagggtctcacatttag

SEQ ID NO: 4262 - DNA, 1816 bp, Homo sapiens
  source 1..1816: mol_type = genomic DNA
gtggggcgcatggagggctgctcttcacctatcgtggtgaagtttgctgacactcagaaggacaaagagcaaaggcgcctccagcagcagctcgctcagcagatgcagcagctcaacactgccacctgggggaacctgacagggctgggcggactgaccccacagtatctggcgctcctgcagcaggccacctcctccagcaacctgggtgcgttcagcggcattcaacaaatggcaggcatgaatgctttacagttgcagaacctggcgacgctggctgctgctgcagctgcggcccagacctcagccaccagcaccaatgcaaaccctctctctaccacgagcagcgccctgggagccctcacgagtcccgtggctgcttcaacccccaactccactgctggtgcagccatgaactccttgacctctctcgggactctgcaaggactggctggagccactgttggactgaataatattaatgcactagcaggtatggcggctctgaatggaggacttggcgccacaggcttgacgaatggcacggctggcaccatggacgccctcacccaggcctactcaggaattcaacagtacgcagccgccgcgctgcccactctgtacagccagagcctgctgcagcagcagagcgctgcaggcagccagaaggaaggtccagagggggcaaacctctttatttaccaccttccacaggaatttggagaccaggacattctgcagatgttcatgccttttggaaatgttatctctgctaaagtcttcattgacaaacagaccaatctgagcaagtgctttggttttgttagctacgacaatccagtctctgcacaagctgctatccaagctatgaatggctttcagatcggcatgaaacgcttgaaggtgcagctgaagcgttccaaaaacgacagcaaaccttactgatcctaaccccagaggctccctgctctcattttagctttcttaggacatcttcatgcccgttagttcatcgtttgcctagcatgtccctgtggcgtctcaaaaaaaagtttcatcgtcccgtcattgtttctgatgtctttctgacctcacatcatatttggttctcctactgacctttgatctagtttgacctttgaaatttgcatgtgacctcatctagctatgaattctgggaagtcaatgtgaaaaacattgctgcattcatgcaagactgaaatttattattagacaaattcattatagaaaaaacctgtggcaaaaacgtttctttcttattttttttcttttcctaaaacagacttgaaagtattatacagggattggcattcttcccggtcactggtaacaatagcaatatgtgtccagggacacagaatgttggtttctaacagactacttccaaaaacagtttgagaaaaaaactgtctgattttaagtctctagaggtctgtaatagtttttacatttttcaggcagtgtaaagttttttgataaggccattttaggtggctcactttctcattaagatatatatatagaaccactttttgtagattagtataagaaaaatatttaccctgttttggggcaaatgctacctatttgtgtcaccttttgctgaactcacagttagacaatccatggtttaatgcacatgaaattacctatattttatactgtttcaatgtacaggagaaaggttactgtaaactgtgttatgttggtgcttctgtgaattaagttgtggtttcatcatgagtcttaatgttctttgttgataagacaagtttagaattggtttacttaatac

SEQ ID NO: 4263 - DNA, 3086 bp, Homo sapiens
  source 1..3086: mol_type = genomic DNA
agcatggaaaagacttatacaagcactagcaacaactctatatctggatcattgaagcgcttggaagatactactgcacgatttacaaatgcaaatttccaggaagtctctgcacacacctctagtggaaaagatgtttcagagactagagggtcagagggcaaagggaagaaatcttcagctcacagctcaggtcaaaggggaagaaagcctggtggtggaagaaatccaggaacaactgtgtcagcagctagcccttttcctcaagcaggatataagcgggctcaaacttctggcatagaagaagaaactgtaaaggaaaagaaaaggaaaggaaataaacaaagtaagcatgggcctggcagacccaaaggaaacaaaaatcaagagaatgtttctcatctctcagtttcttctgcttcaccaacatcatctgtagcatcagctgcaggaagcataacaagctctagtctgcagaaatctcctacattgctcaggaatggaagtttacagagcctcagtgttggctcatctccagttggttcagaaatttccatgcagtatcggcatgatggagcttgcccaacaactacgttctcagagttgctgaatgcaatacacaacgacagaggtgacagttctacactaacaaagcaagaacttaaattcataggtatttataacagcaatgatgtagcagtatcgtttccaaatgtagtatctggctcgggatctagtactcctgtctccagctctcacttacctcagcagtcttctgggcatttgcaacaagtaggagcgctctctccctcagctgtgtcatctgcagcccctgctgttgctacaactcaggcaaatactctatctggatcttctctcagtcaggcaccatctcatatgtatggcaatagatcaaattcatcaatggcagctcttatagctcagtctgaaaacaatcaaacagatcaagatcttggagacaatagccgcaacctagttggcagaggaagctcaccccgaggaagtctctcgccacgatcccctgtaagcagcttacagattcgctatgatcaaccaggcaacagcagtttggaaaatctgcctccagtagcagccagcatagaacagcttttggagaggcagtggagtgaaggacagcaatttttactagaacagggtactcctagtgacattttaggaatgctgaagtcattacaccaacttcaagttgaaaaccgaagattagaggaacaaattaaaaacttgactgccaaaaaggaacggcttcagttattgaatgcacagctttcagtgccttttccaacaataacagcaaatcctagtccgtctcatcaaatacacacattttcagcacagactgctcctactactgattccttgaacagcagtaagagccctcatataggaaacagctttttacctgataattctcttcctgtattaaatcaggacttaacctccagtggacaaagtaccagcagctcatcagctctttctaccccacctcctgctgggcagagtccggctcaacaaggctcaggagtgagtggagttcagcaggtcaatggcgtgacagtgggggcactagctagtggaatgcagcctgtaacttccaccattcctgccgtgtctgcagtgggtggaataattggagctttgccaggtaaccaactggcaattaatggcattgtaggagctttaaatggggttatgcagactcctgtcacaatgtcccagaaccctacccctctcacccacacaaccgtaccacctaatgcaacacatccaatgccagctacactgactaacagtgcctcaggactaggattactttctgaccagcaacgacaaatacttattcatcaacagcagtttcagcagttgttaaattctcaacagctcacaccagaacaacatcaagcctttttgtatcagttaatgcaacatcaccaccagcagcaccaccaacctgaacttcagcagctgcagatccctggaccaacacaaatacccataaacaaccttcttgcaggtacacaggcacccccacttcacacagctaccaccaacccatttctcaccatccatggagataatgcaagtcagaaagtagcaagacttagtgataaaactgggcctgtagctcaagagaaaagttgacacctgagaaacatctagaaattgcctatcctgctgttctagcacttcatctggctgcctttgcagtccttttactacagctatgaagaaacgcaacaagaaactcaatgcacaacaaaggattaattgctgcaaggacattcttgtaaggctttgattagttttcttgttgctttgttgcactgaaatggaattcccatgcccctaccccttaccccagttttttgaacatggaaagaaaatttaataactttttaaagtgacataatttacatgcaatatgtttatcaactcaagaatttaatatagttggtacacaactagttttgtttataaattggagatgcaaatagcaaaactaaatacttgctccatttacaaactacttgattttattgtacaagttgaaatatgctcttttgtttgggttacagtatgcttgctctaagtcaaattccaaggaactaatttcttctcctggagttgcattgattcagtattacaaatatatagcacatcacctgggacttggcaatctttgttaaaaaaaaatttcctttctaatgggatttggccaattttggtaatgaagttaggatggtaatgtctgcatctgctaaaggtaattttcttttgagaattgctttctttagtgttaagacctactcatattttgaagaaatcttgagttaagtgagttctgaggctgctgggggaaccagatcaattcaaagctaaatacttctttcagaaaggggccactgtggaaagtgctggtggggtttgcccttgatcaagtgcctccattgtgctgcaagggctgtagacagcagggtgggacagtcagtcctccgagcagcaggaatcatcccgtcacctgcagccttcccatgcttccgccttta

SEQ ID NO: 4264 - DNA, 2476 bp, Homo sapiens
  source 1..2476: mol_type = genomic DNA
gtgcggaggggcggggcgtgtggaggccgggacggcgcccccggccggcggtgaggccggctcagcgcggagcagctcagtgccccccgcgccccgctccggcagctccacgctcgcgcccgccatgccggagcagttcagcgtcgccgagttcctggccgtcaccgcggaggacctcagctccccggctggggccgccgccttcgccgccaagatgccccggtaccgaggggcggcgctggcgcgggaggagatcttggaaggagaccaagccatcctgcagagaataaagaaggctgtgcgggcaatccatagctccggccttggccatgtggagaatgaagagcagtaccgagaggccgtggaatccttaggcaacagccacctgtcccagaacagccatgagctgtccacaggcttcctaaacttggccgtgttcacccgcgaggttgctgcgctcttcaagaacctgattcagaacttgaacaacattgtctctttccccctggacagtctgatgaaggggcagctgagggacggtcgacaggattccaaaaaacagctggagaaggcatggaaggactatgaagccaaaatggccaagctggagaaggagcgcgatcgggccagggtgacaggagggatccctggggaggtggcccaggacatgcagagagagcggcgcatcttccagctgcacatgtgtgagtatctgctcaaagccggggagagccagatgaagcaaggtcctgacttccttcagagcctcatcaagttcttccacgcccagcacaactttttccaagatggctggaaggctgcccagagcctgttccccttcatcgagaagctggcggcctcagtacatgcactccatcaggcccaggaggacgagctacagaagctgacccagctccgggactccctccgagggacactgcagcttgagagcagagaggaacacctgagccggaagaactcaggatgtggctatagcatccaccagcaccaaggcaacaagcagtttgggacggagaaagtgggctttctatacaagaaaagtgacggaattcgaagagtctggcagaaaaggaagtgtggagtcaagtatggctgcctgaccatctcacacagcacgataaaccggcccccggtgaagctgaccctgctgacgtgccaagtgaggccaaaccctgaggagaaaaagtgcttcgacctggtgacccacaaccggacgtaccactttcaggcagaggacgagcacgagtgtgaggcgtgggtgtcagtgttgcagaacagcaaggacgaagccctgagcagcgccttcctcggggagcccagcgctggcccggggtcctgggggtccgccggccatgatggggagccgcacgacctcacaaagctgctcatcgcggaggtgaagagcaggcctgggaatagccagtgctgcgactgcggggctgcagaccccacgtggctcagcaccaacctgggcgtgctcacctgcatccagtgctcgggcgtccaccgcgaactgggcgtgcgcttttcgcgcatgcagtcactcaccttggacctgctgggcccctccgagttgttgctggccttgaacatgggaaacacgagcttcaatgaggtcatggaggcccagctaccctcacacggcggccctaaaccctcagctgagagtgacatgggcacccgcagggactacattatggccaagtatgtggagcataggtttgcacgccggtgcacacctgagcctcagcgactctggacagccatttgcaacagggacctcctgtcggtactggaggcctttgccaatgggcaggactttggacagccgctgccagggcctgatgcacaggcacctgaagaactcgtcttgcatttggctgtcaaagtcgccaaccaggcttccctgcctctggtggatttcatcatccagaacggtggtcacctggatgccaaggctgctgacgggaacacggctctgcactacgcagcactctacaaccagcccgactgcctcaagctgctgctgaaggggagagctttggttggcacagtaaatgaagcaggcgagacagctctggacatagccaggaagaagcaccacaaggagtgtgaggagctgctggagcaggcccaggcggggacctttgccttccctctacatgtggactactcctgggtaatttccacagagcctggctctgacagtgaggaggatgaggaagagaagcgctgcttgctgaagctcccggcccaggctcactgggccagtgggaggctggacatcagcaacaagacctatgagactgtcgccagcctgggagcagccacccctcagggcgagagtgaggactgtcccccgcccttgccagtcaaaaactcttctcggactttggtccaagggtgtgcaagacatgccagtggagggcggagggaggagcgggctcggcgggag

SEQ ID NO: 4265 - DNA, 5175 bp, Homo sapiens
  source 1..5175: mol_type = genomic DNA
cccatctctacgaaaaatacaaaaattagccaagtatggtggccggcgcctgtaatcccagctactcgggagactgaggcagagaactgcttgaacctgggaggcagaggttgcagtgatccgagatcgcgtcactgcactccagcgtgggcgacagagcgagactccgtttcagaaaagaaaaaaaaaaaaaaaaaaaagggagtcggggtggagctctcattggctcgttgcatgtgagtgtccctacggcctagaaatacaagagaagcacatcggaacgggctggaaatccacccagttaactagagggctttgaaccttttattaacttggaggttgactctcctgtcaactcgattcccttttggctgtttggcagggtcagtgagacatcccctgggtcgctcgaccccgtaggacggttcagggagccctccaggtcttcgtttctcctcttccccgcacagtgctgttatccagctgggggatccaacgcacacttaaggctccagcaaagtggctccgctgccggatgggagtgccccagtgtgctggatgaagctggcgcatgcaccatgtcatcatgtgtctctagccagcccagcagcaaccgggccgccccccaggatgagctggggggcaggggcagcagcagcagcgaaagccagaagccctgtgaggccctgcggggcctctcatccttgagcatccacctgggcatggagtccttcattgtggtcaccgagtgtgagccgggctgtgctgtggacctcggcttggcgcgggaccggcccctggaggccgatggccaagaggtcccccttgacacctccgggtcccaggcccggccccacctctccggtcgcaagctgtctctgcaagagcggtcccagggtgggctggcagccggtggcagcctggacatgaacggacgctgcatctgcccgtccctgccctactcacccgtcagctccccgcagtcctcgcctcggctgccccggcggccgacagtggagtctcaccacgtctccatcacgggtatgcaggactgtgtgcagctgaatcagtataccctgaaggatgaaattggaaagggctcctatggtgtcgtcaagttggcctacaatgaaaatgacaatacctactatgcaatgaaggtgctgtccaaaaagaagctgatccggcaggccggctttccacgtcgccctccaccccgaggcacccggccagctcctggaggctgcatccagcccaggggccccattgagcaggtgtaccaggaaattgccatcctcaagaagctggaccaccccaatgtggtgaagctggtggaggtcctggatgaccccaatgaggaccatctgtacatggtgttcgaactggtcaaccaagggcccgtgatggaagtgcccaccctcaaaccactctctgaagaccaggcccgtttctacttccaggatctgatcaaaggcatcgagtacttacactaccagaagatcatccaccgtgacatcaaaccttccaacctcctggtcggagaagatgggcacatcaagatcgctgactttggtgtgagcaatgaattcaagggcagtgacgcgctcctctccaacaccgtgggcacgcccgccttcatggcacccgagtcgctctctgagacccgcaagatcttctctgggaaggccttggatgtttgggccatgggtgtgacactatactgctttgtctttggccagtgcccattcatggacgagcggatcatgtgtttacacagtaagatcaagagtcaggccctggaatttccagaccagcccgacatagctgaggacttgaaggacctgatcacccgtatgctggacaagaaccccgagtcgaggatcgtggtgccggaaatcaagatcctggtgaagaccatgatacgtaaacgctcctttgggaacccattcgagggcagccggcgggaggaacgctcactgtcagcgcctggaaacttgctcacgaagcaaggcagcgaagacaacctccagggcaccgacccgccccccgtgggggaggaggaagtgctcttgtgagaggcagtccctgcgtggaaagttgctgggcccccgcccccggctcccccgcacgcatgcatccactgcggccggaggaggccatggagcccgagtagctgcctggatcgctcgacctcgcatgcgcgccgcgtcgcctctggggggctgctgcaccgcgtttccatagcagcatgtcctacggaaacccagcacgtgtgtagagcctcgatcgtcatctctggttatttgttttttcctttgttgttttaaaggggacaaaaaaaaaaaaaggacttgactccatgacgtcgaccgtggccgctggctggctggacaggcgggtgtgaggagttgcagacccaaacccacgtgcattttgggacaattgctttttaaaacgtttttatgccaaaaatccttcattgtgattttcagaaccacgtcagatataccaagtgactgtgtgtggggtttgacaactgtggaaaggcgagcagaaaactccggcggtctgaggccatggaggtggttgctgcatttgagagggagtagggggctagatgtggctcctagtgcaaaccggaaaccatggcaccttccagagccgtggtctcaaggagtcagagcagggctggccctcagtagctgcagggagctttgatgcaacttatttgtaagaaggatttttaaattttttatgggtagaattgtagtcaggaaaacagaaagggcttgaaatttaataagtgctgctggaaggggattttccaagcctggaagggtattcagcagctgtggtggggaaacatttctcctgaaagactgaacgtgtttcttcatgacagctgctcaaagcaggtttctgagatagctgaccgagctctggtaaatctctttgtcaaattacgaaaacttcagggtgaaatcctatgcttccatgtacattacatggcttaagattaaacaaaaacatttttcaagtctctaactagagtgaactctagagcacagtagttcagaaactatttagagcttccaggatatatttcacagcttcaggcatgtgatcagttagagccgatgaaacctatgcccgcctgtatatatattagcagcttagctagttcataacctgtatattctaaagactgctaaggttttgttttcattttaaatcctagctgattgttgtggtcaatgaaatacccagtttctggagggccaggtgggaaatgctttcactggaccaacacacaaatgatcatcctgaggatctgagcttccctagactccacacaataaccttggggcacccttttagagaagactgttgaaacccacagcactcgttggggtatgaggaaaccagggcttggcacaggaagttcccctttgtagctaaaagtccagaaagaaagggttcatctttttgacttccaactgatattgggaagtttggttgaggttcaagtgtgactccttccagagccacaggtaggggagtgtgaagttgagggggaggaaagctggaaggactctgccttgggagattcccagctctgctttccagcgcttggtggaatctgggctggggaaagacggcaccgggaaactctgcttccccattgtttccatctgatcagctgtggtgtgaggacttctcagacaaaggcaaggcctcgtgcccctgcccagcccattcatggagccctgggccttcttggcttccatagatcctaagctcttgactgtagtttagccagacttgttttgctatcttataagcagttcagaattagggaatgctggttttgaagagcaaaggacaggtagtctagagagggtcgtctggcctgcttgctgggtctttgtaacccagcacttcctcttgccctcctggctttatgtttatggggagaggactcaatagctccaccccttctggcaccagatggggcttggttagtttgcaataagcaccttgcagaggttaaagccagcgggtccctagtcttaggcccagcctgcttgtgtgggctctggcctggcctggtggctggcccagggggcagcagtgcttagagcttctgcagggcttctcttgtttacacagctgcatcagacaatgccatttctccccaccacggaaccttccatctaagatttcttccagggaatgccagcaatcaggcagcacccagctgtgggggcagtggggtgggggagacccacattgatgactttttttttttcttttaatgaagaaacaccaaagaaagctgtggaaaggacctgccccacatgaaaaggataagccaagatggctgtaaacacagagcatttgagctgccactcttggagcacattgatttttcaaaagccagctctgtcaggaaaggaggtgctgttatgagcagctcttccagtgggcaaagaggacgcccataatttcttccattgctagctcatctgtgggaccaatttggtgtaagcaacctgtggcctgcacttgtggcctcgaaggaagcacaaaccctccatccacttcccatttcctctgcccttttccacctcccccttccatcccaccagctgccagtggctcccagaaagccttattgagccccttgttgacacttggggctgcggaggcctctccctactggtctggcctttcctgagaggcaggtcttccgtcctcagagcctttctggaacaaggagaatgcctgtgcaggtggacacacaggcctggcctgtcgctctcacttgtcttccagcggggagcttcacgttgccgagtggaagaaccatgacctccacttgcttccaaggtgctagggaagtttcagggtacgctggttcccctctccagctggaggccgagtttctggggactgcagatttttctactctgtgatcgattcaatgcccgatgcttctgtttcattcccgaccctttctactatgcattttccttttatcaggtgtataaagttaaatactgtgtatttatcactaaaaagtacatgaacttaagagacaactaagcctttcgtgtttttccacaggtgtttaagcttctctgtacagttgaaataaacagacagcaaaatggt

SEQ ID NO: 4266 - DNA, 833 bp, Homo sapiens
  source 1..833: mol_type = genomic DNA
gagcgccggagcggacgcccccagggagctggggacacccccatgggacagcccttcctggatctggagagagcagctgctgctgccccaccacctgccaggcccggccactgagcagccccccggagccccagatccccgttccccccaggtggcctgggaggtggccccctcgaggatgactccactagcgccctgggaccccaagtatgaagccaaagcaggacctcggccggtgtggggggccaactgtagctcaggagcctcgttctcaggccggacgctgtgtcacccctcattctggccgctgtatgaagcagcctcgggcaggggtctcaggcccgtggcccctgccacagggcactggaatggacagcaggcgcccccagatgcagggttcccggtggtgtgctgtgaagatgtcttcctctcggaccctctgctgccccgggggcagcgtgttcccctgtacctgtccaaggccccccagcagatgatgggctccctgaaactgctgccgccgccccccatcatgtctgccagggtgctcccccgcccatcaccctcccggggcccctccactgcctggctcagcgggccggagctgatcgctctcactggcctgctgcagatgagccagggggagcctaggcccagctcctccgcggttggccccccagaccatacctctgacccacccagcccctgtggtagccccagcagttctcagggtgctgacctctctctcccacagaccccagacacccattgtccatagccttctcagggcagagtgggctggttgtgttgacaataaaacagtgttggtttgc

SEQ ID NO: 4267 - DNA, 1785 bp, Homo sapiens
  source 1..1785: mol_type = genomic DNA
gctgggcggcccggtctcggagaagaggggagagtggcgggccgctgaataagcttccaaaatgatgcccacaccagttatcctattgaaagaggggactgatagctcccaaggcatcccccagcttgtgagtaacatcagtgcctgccaggtgattgctgaggctgtaagaactaccctgggtccccgtggcatggacaagcttattgtagatggcagaggcaaagcaacaatttctaatgatggggccacaattctgaaacttcttgatgttgtccatcctgcagcaaagactttggtagacattgccaaatcccaagatgctgaggtgggtgatggcaccacctcagtgaccttgctggctgcagagtttctgaagcaggtgaaaccctatgtggaggaaggtttacacccccagatcatcattcgagctttccgcacagccacccagctgggagcagaggaagctgctggaaaagtgtgccatgaccgctctgagctccaagctgatctcccagcagaaagctttctttgctaagatggtggtggatgcagtgatgatgctcgatgatttgctgcagcttaaaatgattggaatcaagaaggtacagggtggagccctcgaggattctcagctggtagctggtgttgcattcaagaagactttctcttacgctgggtttgaaatgcaacccaaaaagtaccacaatcccaagattgcccttttgaatgtcgagctcgagttgaaagctgagaaagacaatgctgagataagagtccacacagttgaggattatcaggcaattgttgatgctgagtggaacattctctatgacaagttagagaagatccatcattctggagccaaagttgtcttgtccaaactccccattggggatgtggccacccagtactttgctgacagggacatgttctgtgctggccgagtacctgaggaggatctgaagaggacaatgatggcctgtggaggctcaatccagaccagtgtgaatgctctgtcagcagatgtgctgggtcgatgccaggtgtttgaagagacccagattggaggcgagaggtacaatttttttactggctgccccaaggccaagacatgcaccttcattctccgtggcggcgccgagcagtttatggaggagacagagcggtccctgcatgatgccatcatgatcgtcaggagggccatcaagaatgattcagtggtggctggtggcggggccattgagatggaactctccaagtacctgcgggattactcaaggactattccaggaaaacagcagctgttgattggggcatatgccaaggccttggagattatcccacgccagctgtgtgacaatgctggctttgatgccacaaacattctcaacaagctgcgggctcggcatgcccaggggggtacatggtatggagtagacatcaacaacgaggacattgctgacaactttgaagctttcgtgtgggagccagctatggtgcggatcaatgcgctgacagcagcctctgaggctgcgtgcctgatcgtgtctgtagatgaaaccatcaagaacccccgctcgactgtggatgctcccacagcagcaggccggggccgtggtcgtggccgcccccactgagaggcaccccacccatcacatggctggctggctgctgggtgcacttaccctccttggcttggttacttcattttacaaggaaggggtagtaattggcccactctcttcttactggaggctatttaaataaaatgtaagacttcag

SEQ ID NO: 4268 - DNA, 3438 bp, Homo sapiens
  source 1..3438: mol_type = genomic DNA
aagccttattagagctttctcaacctgcagccctcatctccgccggcgagtagggccaggtgttgggagctcccacgtgggacaagatggtgtcttcggcgcagatgggcttcaacctgcaggctctcctggagcagctcagccaggatgagttgagcaagttcaagtatctgatcacgaccttctccctggcacacgagctccagaagatcccccacaaggaggtagacaaggctgatgggaagcaactggtagaaatcctcaccacccattgtgacagctactgggtggagatggcgagcctccaggtctttgaaaagatgcaccgaatggatctgtctgagagagcaaaggatgaagtcagagaagcagctttgaaatcctttaataaaaggaagcctctatcattagcgtttacagaaacgaaaggaaatgtcatctgcctgggtaaagaagtctttaaaggaaaaaagccagacaaagacaataggtgcaggtatatattgaagacgaagttccgggagatgtggaagagctggcctggagatagcaaagaggtccaggttatggctgagagatacaagatgctgatcccattcagcaaccccagggtgcttcccgggcccttctcatacacggtggtgctgtatggtcctgcaggccttgggaaaaccacgctggcccagaaactaatgctagactgggcagaggacaacctcatccacaaattcaaatatgcgttctacctcagctgcagggagctcagccgcctgggcccgtgcagttttgcagagctggtcttcagggactggcctgaattgcaggatgacattccacacatcctagcccaagcacggaaaatcttgttcgtgattgacggctttgatgagctgggagccgcacctggggcgctgatcgaggacatctgcggggactgggagaagaagaagccggtgcccgtcctcctggggagtttgctgaacagggtgatgttacccaaggccgccctgctggtcaccacgcggcccagggccctgagggacctccggatcctggcggaggagccgatctacataagggtggagggcttcctggaggaggacaggagggcctatttcctgagacactttggagacgaggaccaagccatgcgtgcctttgagctaatgaggagcaacgcggccctgttccagctgggctcggcccccgcggtgtgctggatcgtgtgcacgactctgaagctgcagatggagaagggggaggacccggtccccacctgcctcacccgcacggggctgttcctgcgtttcctctgcagccggttcccgcagggcgcacagctgcggggcgcgctgcggacgctgagcctcctggccgcgcagggcctgtgggcgcagacgtccgtgcttcaccgagaggatctggaaaggctcggggtgcaggagtccgacctccgtctgttcctggacggagacatcctccgccaggacagagtctccaaaggctgctactccttcatccacctcagcttccagcagtttctcactgccctgttctacaccctggagaaggaggaggaagaggatagggacggccacacctgggacattggggacgtacagaagctgctttccggagtagaaagactcaggaaccccgacctgatccaagcaggctactactcctttggcctcgctaacgagaagagagccaaggagttggaggccacttttggctgccggatgtcaccggacatcaaacaggaattgctgcgatgcgacataagttgtaagggtggacattcaacggtgacagacctgcaggagctcctcggctgtctgtacgagtctcaggaggaggagctggtgaaggaggtgatggctcagttcaaagaaatatccctgcacttaaatgcagtagacgttgtgccatcttcattctgcgtcaagcactgtcgaaacctgcagaaaatgtcactgcaggtaataaaggagaatctcccggagaatgtcactgcgtctgaatcagacgccgaggttgagagatcccaggatgatcagcacatgcttcctttctggacggacctttgttccatatttggatcaaataaggatctgatgggtctagcaatcaatgatagctttctcagtgcctccctagtaaggatcctgtgtgaacaaatagcctctgacacctgtcatctccagagagtggtgttcaaaaacatttccccagctgatgctcatcggaacctctgcctagctcttcgaggtcacaagactgtaacgtatctgacccttcaaggcaatgaccaggatgatatgtttcccgcattgtgtgaggtcttgagacatccagaatgtaacctgcgatatctcgggttggtgtcttgttccgctaccactcagcagtgggctgatctctccttggcccttgaagtcaaccagtccctgacgtgcgtaaacctctccgacaatgagcttctggatgagggtgctaagttgctgtacacaactttgagacaccccaagtgctttctgcagaggttgtcgttggaaaactgtcaccttacagaagccaattgcaaggaccttgctgctgtgttggttgtcagccgggagctgacacacctgtgcttggccaagaaccccattgggaatacaggggtgaagtttctgtgtgagggcttgaggtaccccgagtgtaaactgcagaccttggtgctttggaactgcgacataactagcgatggctgctgcgatctcacaaagcttctccaagaaaaatcaagcctgttgtgtttggatctggggctgaatcacataggagttaagggaatgaagttcctgtgtgaggctttgaggaaaccactgtgcaacttgagatgtctgtggttgtggggatgttccatccctccgttcagttgtgaagacctctgctctgccctcagctgcaaccagagcctcgtcactctggacctgggtcagaatcccttggggtctagtggagtgaagatgctgtttgaaaccttgacatgttccagtggcaccctccggacactcaggttgaaaatcgatgactttaatgatgaactcaataagctgctggaagaaatagaagaaaaaaacccacaactgattattgatactgagaaacatcatccctgggcagaaaggccttcttctcatgacttcatgatctgaatccccccgagtcattcattctccatgaagtcatcgattttccaggtgttggtgaactgcctgtgactcctctcctccccggcccctacccctcagggataatgagttcattgctgggctagatgttttagccatgattctgcctctgttttatacctgcacacatccttatctttgttacatatgaaatatctgtatcacgggtatattgagagaaataaaggtgagagcattc

SEQ ID NO: 4269 - DNA, 1885 bp, Homo sapiens
  source 1..1885: mol_type = genomic DNA
ggctgcaggtccgcctgggccagacgcgcgagcgcaagcagcgggttagtggtcgcgcgcccgacctccgcagtcccagccgagccgcgacccttccggccgtccccaccccacctcgccgccatgcgcctccgccgcctagcgctgttcccgggtgtggcgctgcttcttgccgcggcccgcctcgccgctgcctccgagttcttcgccccctggtgtggacactgcaagagacttgcacctgagtatgaagctgcagctaccagattaaaaggaatagtcccattagcaaaggttgattgcactgccaacactaacacctgtaataaatatggagtcagtggatatccaaccctgaagatatttagagatggtgaagaagcaggtgcttatgatggacctaggactgctgatggaattgtcagccacttgaagaagcaggcaggaccagcttcagtgcctctcaggactgaggaagaatttaagaaattcattagtgataaagatgcctctatagtaggttttttcgatgattcattcagtgaggctcactccgagttcctaaaagcagccagcaacttgagggataactaccgatttgcacatacgaatgttgagtctctggtgaacgagtatgatgataatggagagggtatcatcttatttcgtccttcacatctcactaacaagtttgaggacaagactgtggcatatacagagcaaaaaatgaccagtggcaaaattaaaaagtttatccaggaaaacatttttggtatctgccctcacatgacagaagacaataaagatttgatacagggcaaggacttacttattgcttactatgatgtggactatgaaaagaacgctaaaggttccaactactggagaaacagggtaatgatggtggcaaagaaattcctggatgctgggcacaaactcaactttgctgtagctagccgcaaaacctttagccatgaactttctgattttggcttggagagcactgctggagagattcctgttgttgctatcagaactgctaaaggagagaagtttgtcatgcaggaggagttctcgcgtgatgggaaggctctggagaggttcctgcaggattactttgatggcaatctgaagagatacctgaagtctgaacctatcccagagagcaatgatgggcctgtgaaggtagtggtagcagagaattttgatgaaatagtgaataatgaaaataaagatgtgctgattgaattttatgccccttggtgtggtcactgtaagaacctggagcccaagtataaagaacttggcgagaagctcagcaaagacccaaatatcgtcatagccaagatggatgccacagccaatgatgtgccttctccatatgaagtcagaggttttcctaccatatacttctctccagccaacaagaagctaaatccaaagaaatatgaaggtggccgtgaattaagtgattttattagctatctacaaagagaagctacaaacccccctgtaattcaagaagaaaaacccaagaagaagaagaaggcacaggaggatctctaaagcagtagccaaacaccactttgtaaaaggactcttccatcagagatgggaaaaccattggggaggactaggacccatatgggaattattacctctcagggccgagaggacagaatggatataatctgaatcctgttaaattttctctaaactgtttcttagctgcactgtttatggaaataccaggaccagtttatgtttgtggttttgggaaaaattatttgtgttgggggaaatgttgtgggggtggggttgagttgggggtattttctaattttttttgtacatttggaacagtgacaataaatgagaccccttt

SEQ ID NO: 4270 - DNA, 309 bp, Homo sapiens
  source 1..309: mol_type = genomic DNA
gggagaaacgagatgggggtgaagctggagatatttcggatgataatctacctcactttccctgtggctatgttctgggtttccaatcaggccgagtggtttgaggatgatgtcatacagcgcaagagggagctgtggccacctgagaagcttcaagagttagaggaattcaaagagaggttacggaagcggaagcggcgggaggagaagctccttcgcgacgcccagcagaactcctgaggcctccaagtgggagtcctagcccctcccctgatgaaatatacatatactcagttccttgttattcaa

SEQ ID NO: 4271 - DNA, 1937 bp, Homo sapiens
  source 1..1937: mol_type = genomic DNA
gcgcgagaatggcagttggacggagcctgcctgccggtgctccgcccctgccccgcgcttgactgacgccaatgagaagcgctcctaaggcaattgatggttgaaagaaccaatcccactcctccagggcgggagcgcacgtagagcagctaggtgggcttcggggttgcagctgctgcggctccgcagctgctccggctccgggacccttagagtccattcgcgtgccttctattgaagagcaggaactgacggttgttttaggcctctcaattccagaaagtttcctggggacctgtccggtcggaaagtcgagggacagttgtcttggtatttgtaaagggggtatccagtgaggcggagcttgagggggttgtgtcgagtgactgatacagctgtcaaccaataaagctactatcgctcgcctcaggaaaaccatcacaactccagctggatgtgcgcataatagtgtaatcactcatgattctattttgtttaataattcgttcttgagactagacgtctcgaaagcgaagactggcactcctcagcctgccacggacggctcgcaggccgatactgaacagaagtacccttatcaaggaggcgtcacccctgggcaagcctagcatcagtccattgacacctacagtcaccatgatagacgttctcccagaccaacagcttcctttggctcgaggcgggtcttacgtggagggcctatgggaactacgtcggctcagccaatagggtcagggcagggggcgtggcgggaagtttgaaactggtaacttcgggagttgagccacgagctgttgtgcatccagaggtggaattggggcccggcattccctcctcgtcccgggctggcccttgcccccaccctgcaactcctggttgagatgggctcagccaagagcgtcccagtcacaccagcgcggcctccgccgcacaacaagcatctggctcgagtggcggacccccgttcacctagtgctggcatcctgcgcactcccatccaggtggagagctctccacagccaggcctaccagcaggggagcaactggagggtcttaaacatgcccaggactcagatccccgctctcctactcttggtattgcacggacacctatgaagaccagcagtggagaccccccaagcccactggtgaaacagctgagtgaagtatttgaaactgaagactctaaatcaaatcttcccccagagcctgttctgcccccagaggcacctttatcttctgaattggacttgcctctgggtacccagttatctgttgaggaacagatgccaccttggaaccagactgagttcccctccaaacaggtgttttccaaggaggaagcaagacagcccacagaaacccctgtggccagccagagctccgacaagccctcaagggaccctgagactcccagatcttcaggttctatgcgcaatagatggaaaccaaacagcagcaaggtactagggagatcccccctcaccatcctgcaggatgacaactcccctggcaccctgacactacgacagggtaagcggccttcacccctaagtgaaaatgttagtgaactaaaggaaggagccattcttggaactggacgacttctgaaaactggaggacgagcatgggagcaaggccaggaccatgacaaggaaaatcagcactttcccttggtggagagctaggccctgcatggccccagcaatgcagtcacccagggcctggtgatatctgtgtcctctcaccccttctttcccagggatactgaggaatggcttgttttcttagactcctcctcagctaccaaactgggactcacagctttattgggctttctttgtgtcttgtgtgtttcttttatattaaaggaagtaattttaaatgttactttaaaaaggtatatgtaaaccttg

SEQ ID NO: 4272 - DNA, 884 bp, Homo sapiens
  source 1..884: mol_type = genomic DNA
ccatcagcggccgggagatcgccttccccatcgaggcgtgtgtgaccatgctgcttgagtgtgggatgcaggaggagggactcttccgagtagccccctctgcctccaaactgaagaagctgaaagcggccctggactgctgcgtggtggatgtgcaggagtactcggcagacccccacgcaattgcaggagctttgaaatcttacctccgagagttgccagaacctcttatgacctttgaactctatgatgagtggatccaggcttccaatgtccaggagcaagacaagaagcttcaggctctatggaatgcttgtgaaaagttgcccaaggccaatcacaacaacatccgatacttgataaaattttatccaagctgtcagaatatcaagatgtaaacaagatgactcccagtaatatggcaattgttttaggacccaacctcctatggccacaagcagaagggaacattacagagatgatgaccacagtgtcgctgcaaattgttgggatcattgaacctatcatccagcatgcagactggttcttccctggggagatagagttcaacattactggcaattatgggagtccagtacacgtgaaccataatgccaactacagctcaatgccctccccagacatggaccctgctgaccggcgccagcccgagcaggcccgccggcccctcagcgtcgccacggataatatgatgctggagttttacaaaaaggatgggtatgaactggtgtctctttctcagcactggggattaggggaggtggtgggggtggatgggtgacgcataagaaaaatacaattacgggaaggctgcactgactctcagcagtttaggtgactcgtagcaattaaactgtatctgc

SEQ ID NO: 4273 - DNA, 1220 bp, Homo sapiens
  source 1..1220: mol_type = genomic DNA
atgcacacatacgcgcgcgcacatgcacataggcacacagagatacgcgcacacacacacacaaacgcactcagatttcccggaccctggttttcctcctgtgaccctttcggggccgggctctcaccctaaagaagcagccccgccctggggtggccccaccctctcttgggacctgtcataagtcggaccccgggcgcccggctgcgcagtcccagccgccttccccaggcagtggaaccttcgggctcctgagcttcaggatggttcgtactaagacatggaccctgaagaagcactttgttggctatcctactaatagtgactttgagttgaagacagctgagctcccacccttaaaaaatggagaggtcctgcttgaagctttgttcctcaccgtggatccctacatgagagtggcagccaaaagattgaaggaaggtgatacaatgatggggcagcaagtggccaaagttgtggaaagtaaaaatgtagccctaccaaaaggaactattgtactggcttctccaggctggacaacgcactccatttctgatgggaaagatctggaaaagctgctgacagagtggccagacacaataccactgtctttggctctggggacagttggcatgccaggcctgactgcctactttggcctacttgaaatctgtggtgtgaagggtggagaaacagtgatggttaatgcagcagctggagctgtgggctcagtcgtggggcagattgcaaagctcaagggctgcaaagttgttggagcagtagggtctgatgaaaaggttgcctaccttcaaaagcttggatttgatgtcgtctttaactacaagacggtagagtctttggaagaaaccttgaagaaagcgtctcctgatggttatgattgttattttgataatgtaggtggagagttttcaaacactgttatcggccagatgaagaaatttggaaggattgccatatgtggagccatctctacatataacagaaccggcccacttcccccaggcccacccccagagattgttatctatcaggagcttcgcatggaagcttttgtcgtctaccgctggcaaggagatgcccgccaaaaagctctgaaggacttgctgaaatgggtcttagagatcaaaagagaaaatgaagaagattgaagcttcaaagcagaaaaatgaagggaatatgtatcattcaccattacctta

SEQ ID NO: 4274 - DNA, 1317 bp, Homo sapiens
  source 1..1317: mol_type = genomic DNA
ggatggtgaaccctgaagtcggtgtctgctgcgttcacggcaggattcggttaggaggaacagcacagcatgctgggctctggatttaaagctgagcgcttaagagtgaatttgagattagtcataaatcgccttaaactattggagaaaaagaaaacggaactggcccagaaagcaaggaaggagattgctgactatctggctgctgggaaagatgaacgagctcggatccgtgtggagcacattatccgggaagactacctcgtggaggccatggagatcctggagctgtactgtgacctgctgctggctcggtttggccttatccagtctatgaaggaactagattctggtctggctgaatctgtgtctacattggctgagttgaaaatagttgctgatcagctctgtgccaagtatagcaaggaatatggcaagctatgtaggaccaaccagattggaactgtgaatgacaggctaatgcacaagctgagtgtggaagccccacccaaaatcctggtggagagatacctgattgaaattgcaaagaattacaacgtaccctatgaacctgactctgtggtcatggcagaagctcctcctggggtagagacagatcttattgatgttggattcacagatgatgtgaagaaaggaggccctggaagaggagggagtggtggcttcacagcaccagttggtggacctgatggaacggtgccaatgcccatgcccatgcccatgcctatgccatctgcaaatacgcctttctcatatccactgccaaagggaccatcagatttcaatggactgccaatggggacttatcaggcctttcccaatattcatccacctcagataccagcaactcccccatcgtatgaatctgtagatgacattaatgctgataagaatatctcttctgcacagattgttggtcctggacccaagccagaagcctctgcaaagcttccttccagacctgcagataactatgacaactttgtcctaccagagttgccatctgtgccagacacactaccaactgcatctgctggtgccagcacctcagcatctgaagacattgactttgatgatctttcccggaggtttgaagagctgaaaaagaaaacataggtctcttaaaccaggcaactttcacgttttgggagttgagactgagcaatttctccttgtaacaaagaatctccatgaaattctgtttcatctgttaaccgtcactcagcacaacactccctctgggctctcttcctgctcctccagattctgctgctttccagttctctgttgatcctg

SEQ ID NO: 4275 - DNA, 2255 bp, Homo sapiens
  source 1..2255: mol_type = genomic DNA
cttggttctagcacatgcagatgacaatccaggctctccaggatgaattgcggatccagagggacctgaatcagctgtttcagcaggatagtagcagcaggactggcgaaccttgtgtagcagagctgacagaggagaactttcagaggcttcatgctgagcatgagcggcaggccaaagagctgtttcttcttcgaaagacattggaggaaatggagctgcgtattgagactcaaaagcagaccctaaatgctcgggatgaatccattaagaagcttctggaaatgttgcagagcaaaggactttctgccaaggctaccgaggaagaccatgagagaacaagacgactggcagaggcagagatgcacgttcatcacctagaaagccttttggagcagaaggaaaaagagaacagtatgttgagagaggagatgcatcgaaggtttgagaatgctcctgattctgccaaaacaaaagctctgcaaactgttattgagatgaaggattcaaaaatttcctctatggagcgtgggcttcgagacctggaagaggaaattcagatgctgaaatcgaatggtgctttgagtactgaggaaagggaagaagaaatgaagcaaatggaagtgtatcggagccattctaaatttatgaaaaataagattggccaggtgaaacaggagctgtccagaaaggacacagaactactcgccctgcagacaaagctagaaacactcacaaaccagttctcagatagtaaacagcacattgaagtgttgaaggagtccttgactgctaaggagcagagggctgccatcctgcagactgaggtggatgctctccgattgcgtttggaagagaaggaaaccatgttgaataaaaagacaaaacaaattcaggatatggctgaagagaaggggacacaagctggagagatacatgacctcaaggacatgttggatgtgaaggagcggaaggttaatgttcttcagaagaagattgaaaatcttcaagagcagcttagagacaaggaaaagcagatgagcagcttgaaagaacgggtcaaatccttgcaggctgacaccaccaacactgacactgccttgacaactttggaggaggcccttgcagagaaagagcggacaattgaacgcttaaaggagcagagggacagagatgagcgagagaagcaagaggaaattgataactacaaaaaagatcttaaagacttgaaggaaaaagtcagcctgttgcaaggcgacctttcagagaaagaggcttcacttttggatctgaaagagcatgcttcttctctggcatcctcaggactgaaaaaggactcacggcttaagacactagagattgctttggagcagaagaaggaggagtgtctgaaaatggaatcacaattgaaaaaggcacatgaggcagcattggaagccagagccagtccagagatgagtgaccgaatacagcacttggagagagagatcaccaggtacaaagatgaatctagcaaggcccaggcagaagttgatcgactcttagaaatcttgaaggaggtggaaaatgagaagaatgacaaagataagaagatagctgagttggaaagtctcacctcaaggcaagtgaaagaccagaataagaaggtagcaaatctgaagcacaaggaacaggtggaaaaaaagaagagtgcacaaatgttagaggaggcgcgacgacgggaggacaatctcaacgacagctctcagcagctacaggtggaggagttactgatggccatggagaaggtaaagcaggaactagaatccatgaaagcaaagctgtcctccacccagcagtctctggcagaaaaggaaactcacttgactaatcttcgggcagagagaaggaaacacttagaggaagttctggagatgaagcaagaagctcttctggctgccattagtgaaaaagacgccaatatagctctcttggagctttcgtcctctaagaagaagacccaagaggaagtggctgccctgaagcgggagaaggatcgtctggtacagcagcttaagcagcagacgcaaaatcgaatgaagctaatggccgacaactacgaggatgaccacttcaaatcctcccattccaatcaaacaaatcacaagccctccccagaccaggatgaggaggagggtatatgggcatagccaatcagaggcttagttcagccattttgttcagaacgatcatccagcccctcttagaacttgacc

SEQ ID NO: 4276 - DNA, 1231 bp, Homo sapiens
  source 1..1231: mol_type = genomic DNA
gaagttgctggctgactgggcttgcgaggaaaccgcctcggagctgcagccgaaggccaaggaatcactgaagatcggcgagggaggacagggggttcatcatggccattggatttaatgtagagacggtgacgtacaaaaaccttaaattccaagtctgggatttaggaggacagacaagtatcaggccatactggagatgttactattcaaacacagatgcagtcatttatgtagtagacagttgtgaccgagaccgaattggcatttccaaatcagagttagttgccatgttggaggaagaagagctgagaaaagccattttagtggtgtttgcaaataaacaggacatggaacaggccatgacttcctcagagatggcaaattcacttgggttacctgccttgaaggaccgaaaatggcagatattcaaaacgtcagcaaccaaaggcaccggccttgatgaggcaatggaatggttagttgaaacattaaaaagcagacagtaattcagtccattcttctcccctgaaatgaagactacatcacctctctccctttggaaacagtcaagtgtacttcacactactagatgttaaaactatatgattattggcatatactgactgactgcaatatttgtagtaaatagggaaaataagtatttagttggagggataatttgatcgaatcacctgaatgttctatgtaatgtaaaatattcttttcttgctttcttgtgttaaggtatatattctatttgtatggaattcttattcaaatacagttctattaaagagtatactcctattggatgaaaaaaacctatttttgaatagtagttgcagcttgtttgtataaatactaaaaaatatcttaacagatttttttccccttaaaatgaattatctttccaaagattagactcagtatgagagtaggtgaggaacatagtttgtgtaatataatctttatttgcttacctgaccactttttattaagctgttttgtttaaaagcttttggttataggcatgaatattgttttgatggttaacttcactgacttatctgtaagtgtcattttatagtactttacagttgtcaaaaaaaatcttacatatattgatctagttgatcggtagaggaagcttgtgaagtaggtaggacaggttatgatgtcttcactgtatggacgtgaacccagggttctaataggttggcttgcccaa

SEQ ID NO: 4277 - DNA, 683 bp, Homo sapiens
  source 1..683: mol_type = genomic DNA
aggaggcagatcctgaaagagcttgccctgtgtctgcggaggcaagagatgtatgggcctagagcagctagcagaaacaaggagaccagtgctggtccagtggctgtgatgggaaaagattattacaagattcttgggatcccatcgggggccaacgaggatgagatcaagaaagcctaccggaagatggccttgaagtaccacccagacaagaataaagaacccaacgctgaggagaagtttaaggagattgcagaggcctatgatgtgctaagtgaccccaagaaacggggcctgtatgaccagtatggggaggaaggcctgaagaccggcggtggcacatcaggtggctccagtggctcctttcactacacctttcatggggacccccatgccacctttgcctccttctttggtggctccaaccccttcgatatcttctttgccagcagccgctccactcggcccttcagtggctttgacccagatgacatggatgtggatgaagatgaggacccatttggcgctttcggccgttttggcttcaatgggctgagtaggggtccaaggcgagccccagaaccactgtaccctcggcgcaaggtgcaggaccccccagtggtgcacgagctgcgggtgtccctggaggagatctaccatggctccaccaagcgcatgaagat

SEQ ID NO: 4278 - DNA, 560 bp, Homo sapiens
  source 1..560: mol_type = genomic DNA
gagccgacgagccgggaggcgggaggcggcggccgcggcggctgctgctgctgcagtgggacaggtggcggcgaccggcggcgtccgaggagtctcttctgtatatacagaaatatgaatgtgaatgaagtggaaggaagaaaatcaaatagcttgccctttcttaaggggaaacaagtcaatttggaaaggtcccagcgttgtatttaatccagagactgacttcactatagaacccacagttgtatcaatggttggggaaagatagtggcaacaggcaaaggagaaacagctctgacatacaaagaaaatgagtatgctaaagccaagtgggcttaaggcccccaccaagatcctgaagcctggaagcacagctctgaagacacctacggctgttgtagctccagtagaaaaaaccatatccagtgaaaaagcatcaagcactccatcatctgagactcaggaggaatttgtggatgactttcgagttggggagcgagtttgggtgaatggaaataagcctggatttatccagtttcttggagaaacccagtttgcac

SEQ ID NO: 4279 - DNA, 1245 bp, Homo sapiens
  source 1..1245: mol_type = genomic DNA
ctctgctcgccgccgccgctgtcgccgccacctcctctgatctacgaaagtcatgttacccaacaccgggaggctggcaggatgtacagtttttatcacaggtgcaagccgtggcattggcaaagctattgcattgaaagcagcaaaggatggagcaaatattgttattgctgcaaagaccgcccagccacatccaaaacttctaggcacaatctatactgctgctgaagaaattgaagcagttggaggaaaggccttgccatgtattgttgatgtgagagatgaacagcagatcagtgctgcagtggagaaagccatcaagaaatttggaggaattgatattctggtaaataatgccagtgccattagtttgaccaatacattggacacacctaccaagagattggatctgatgatgaacgtgaacaccagaggcacctaccttgcccatacacactgctgctatggatatgctgggaggacctggtatcgaaagccagtgtagaaaagttgatatcattgcagatgcagcatattccattttccaaaagccaaaaagttttactggcaactttgtcattgatgaaaatatcttaaaagaagaaggaatagaaaattttgacgtttatgcaattaaaccaggtcatcctttgcaaccagatttcttcttagatgaatacccagaagcagttagcaagaaagtggaatcaactggtgctgttccagaattcaaagaagagaaactgcagctgcaaccaaaaccacgttctggagctgtggaagaaacatttagaattgttaaggactctctcagtgatgatgttgttaaagccactcaagcaatctatctgtttgaactctccggtgaagatggtggcacgtggtttcttgatctgaaaagcaagggtgggaatgtcggatatggagagccttctgatcaggcagatgtggtgatgagtatgactactgatgactttgtaaaaatgttttcagggaaactaaaaccaacaatggcattcatgtcagggaaattgaagattaaaggtaacatggccctagcaatcaaattggagaagctaatgaatcagatgaatgccagactgtgaaggaaaatataaaaaaaaagtcgactgctatgctcaaaaagtaaaaaaagctcaacagttaaaatctaatgtttgttttctttcctgttatattataaggatatgcacgtttgttctggaaaagatagaatttgtctct

SEQ ID NO: 4280 - DNA, 1407 bp, Homo sapiens
  source 1..1407: mol_type = genomic DNA
agagcaaggaagggcaggggacctgggaaggaagttctggaaggcagtggggtttgagattggacccagggtcaagatagaacatgaaggtgggatgaggacatgaacagaacatggccaagaaggatctgggggagcagccaggacgagccggagttcgcgagcagtgtgcggcggccgcatctgacatcggatgccgtggcgctgctgcgggacaacgtcactccacgtgaaaacgagctctggacctcgctgggggactcgtggacccgccccgggctggagctgtccccggaggagggacccccatacagacccgagttcttcagcggctgggagccgccggtcactgacccgcagagccgcgcctgggaggacccagttgagaaacagctacagcacgagcggaggcgccggcaggtgacccaagcgacacagcagggccgaggctgggaagtccgggggcgcggccggtccgcctggccccgcctgacccgactgtcttacttcctacagcaaagcgccccccaggtcgctgtcaatggtcaccgagacttggagccagaatctgagcctcagctggagtcagagacagcaggaaaatgggtcctgtgtaattatgacttccaggcccgcaacagcagtgagctgtcggtcaagcagcgggacgtactggaggtcctggatgacagtcgtaagtggtggaaggttcgggacccagcggggcaggagggatatgtgccctacaacatcctgacaccctaccccggaccccggctgcaccacagccaaagccctgcccgcagcctgaacagcactcctcctccaccaccagccccagccccggccccacctccagctctggctcggccccgctgggacaggccccgctgggacagctgcgatagcctcaacggcttggaccccagcgagaaggagaaattctcccagatgctcatcgtcaacgaggaactgcaggcgcgcctggcccagggccgctcgggaccgagccgcgcagtcccagggccccgcgccccggaaccgcagctcagcccgggctcggacgcctccgaggtccgcgcctggctgcaggccaagggctttagctccgggaccgtggacgcgctgggtgtgctgaccggggcgcagcttttctcgctgcagaaggaggagctgcgggcggtgagccccgaggagggggcacgtgtgtacagccaggtcaccgtgcagcgctcgctgctggaggacaaagagaaagtgtcagagctggaggcagtgatggagaagcaaaagaagaaggtggaaggcgaggtggaaatggaggtcatttgacctgccaggcgcccttcgcaaagagtgacgaggccccgtgggagaacggactcctcagactctccccaatagcgg

SEQ ID NO: 4281 - DNA, 1718 bp, Homo sapiens
  source 1..1718: mol_type = genomic DNA
agttgcaacttgtctttgagtgcagggacaggagaagtgtgggctacccggccactgccctggagctgtggtgactgctgcgtttttctcccatgcacttgcacgtccaggactcctgggagaacttgggccacactccttccttgccctcttgagctcattcgtcaccctgttgggtgagcacagccctagctcaggccactgggcaagccacaccatccaaagaggaggtcctctgccccaggacccccacaccaccccagctccctgtttcgctgaggcctggagcccccatggcctcactgagccgagccctacgtgtggctgctgcccaccctcgccagagccctacccggggcatggggccatgcaacctgtccagcgcagctggccccacagccgagaagagtgtgccatatcagcggaccctgaaggagggacagggcacctcggtggtggcccaaggcccaagccggcccctgcccagcacggccaacgtggtggtcattggtggaggcagcttgggctgccagaccctgtaccacctggccaagctgggcatgagtggggcggtgctgctggagcgggagcggctgacctccgggaccacctggcacacggcaggcctgctgtggcagctgcggcccagtgacgtggaggtggagcttctggcccacactcggcgggtggtgagccgggagctggaggaggagacgggactacacacgggctggatccagaatgggggcctcttcatcgcgtccaaccggcagcgcctggacgagtacaagaggctcatgtcgctgggcaaggcgtatggtgtggaatcccatgtgctgagcccggcagagaccaagactctgtacccgctgatgaatgtggacgacctctacgggaccctgtatgtgccgcacgacggtaccatggaccccgctggcacctgtaccaccctcgccagggcagcttctgcccgaggagcacaggtcattgagaactgcccagtgaccggcattcgtgtgtggacggatgattttggggtgcggcgggtcgcgggtgtggagactcagcatggttccatccagacaccctgcgtggtcaactgtgcaggagtgtgggcaagtgctgtgggccggatggctggagtcaaggtcccgctggtggccatgcaccatgcctatgtcgtcaccgagcgcatcgaggggattcagaacatgcccaatgtccgtgatcatgatgcctctgtctacctccgcctccaaggggatgccttgtctgtgggtggctatgaggccaaccccatcttttgggaggaggtgtcagacaagtttgccttcggcctctttgacctggactgggaggtgttcacccagcacattgaaggcgccatcaacagggtccccgtgctggagaagacaggaatcaagtccacggtctgcggccctgaatccttcacgcccgaccacaagcccctgatgggggaggcacctgagctccgagggttcttcctgggctgtggcttcaacagcgcaggaatgatgctgggtggtggctgtgggcaggagctggcccactggatcatccatgggcgcccggagaaggacatgcatggctatgacatcaggcgcttccatcactcgctcacggaccacccccgctggatccgagagcgaagccatgagtcctaccaagaactactccgtcgtcttcccccacgatga

SEQ ID NO: 4282 - DNA, 2525 bp, Homo sapiens
  source 1..2525: mol_type = genomic DNA
cccctcgtttctccctccccgcctcctccgcagaagccaagtgctgttccaccaactagtcccgttgcaggtgaaatgcaaagactgtgaggagaggagagtaagtataagaatgagcattgaactacaatcagtttctaatccagttcacagaaaggacttagttattcgtctgactgatgacacggatccattttttttatataaccttgttatatctgaggaagattttcaaagtttaaaattccagcaaggtcttctggtagacttcttagctttcccacaaaaatttatagatctccttcagcaatgtactcaagaacatgccaaagaaattccaaggtttttgctacagttagtttctccagcagctattttggataactcacctgcatttttaaatgtggtagagacaaatccttttaagcatcttacacacctctcactaaaacttttacctggaaatgatgtggagataaagaaatttctcgcaggctgtttgaaatgtagcaaggaagaaaaattatcattgatgcaatcactagatgatgctactaagcaactggactttacacgaaagacattagcagaaaaaaaacaagaattagataagttacggaatgaatgggcgtcacatacagcagccttgacaaacaagcattctcaggaactgacaaatgaaaaggaaaaagccttgcaggcacaggttcaatatcaacagcagcatgaacaacagaaaaaagatttagaaatcctccatcaacaaaacatccaccagctacaaaacagactgtctgagttagaagcggctaataaagacttaaccgaaagaaaatataaaggagactccactattagagaacttaaagcaaaactttctggtgttgaagaggagctacagcggactaagcaagaagtcctctctttgcgaagagagaattctacactagatgttgaatgccacgagaaagaaaagcacgttaatcagctacaaacaaaagtggcagttttagaacaggaaatcaaggataaggaccagcttgttttaagaacaaaagaggcatttgatacaatccaggaacaaaaggtggttttagaagaaaatggtgagaaaaatcaagtacaactaggaaagcttgaagctacaataaaatcattatctgcagaacttctgaaggcaaatgaaattatcaagaagttacaaggggatctgaaaactttaatgggtaagttgaaattgaagaatacagttactattcagcaagaaaaactcttggctgagaaggaggaaaaattacaaaaggaacaaaaggaattacaagatgttggacagtctcttcgaattaaagagcaagaggtatgcaaattacaagaacaattagaagctacagttaaaaaacttgaagaaagcaaacaacttctaaaaaataatgaaaagttaatcacgtggttaaataaagaactaaatgaaaatcagctagtgagaaagcaagatgtattgggaccttctactactccgcctgcacattccagcagcaacacaatcagaagtggaatttctcctaacctgaatgtggttgatggtagactgacttacccaacctgtgggattggttatcctgtctcctctgcatttgcattccagaataccttccctcattcgatatctgccaaaaataccagccaccctggttcaggaacaaaggttcagtttaatttgcagtttacaaaaccaaatgcatcactaggagatgttcagtcaggagcaactattagtatgccttgctcaactgataaggaaaatggtgaaaatgtagggttggaatccaaatacctgaagaaaagggaagatagcattcctttacgcggactcagccagaacctatttagtaattcagaccatcagagagatggcactttaggagcattacatacatcttccaaacccacagcgctcccctctgcgtcttcagcctatttccctgggcagttaccaaacagttaattctagtgtcatgttttactttttattggtattttagaaactcaggtgcttaaaaaatatgtcaacacaaaccagatcctcaaatagcaagtttcaaattttacttgagctgttaaagactggatactttaagtactgcttttatggcagtttataatataggaacaaatttgtacttggggattggtaaagattgtgagtaaatgacattttttggtttgtgaacatggcgttttatagaataatatgaattttattaagctattctttagaaattcagttctaaggaaagagttgatccttatgagggagattctgatcatattaaaaatctgggtaaactaaaacctgctcataacctcatagtatgcaaccaaagaatactaattcattttatcactttcattggtaaaacttttaaattcaacacctgaaaatcatgagggaaaatgattacctcttgagatatattattgatgacatttaaagggaaaagtcctaaatttaccttaaataactg

SEQ ID NO: 4283 - DNA, 1590 bp, Homo sapiens
  source 1..1590: mol_type = genomic DNA
actcagcatcgtttccttttcctccgctggagcagctatggcggcggtgaagaccctgaaccccaacagcttccttaatagcaaaggtagcaacagcccaggatgatataactggtgatggtacgacttctaatgtcctaatcattggagagctgctgaaacaggcggatctctacatttctgaaggccttcatcctagaataatcactgaaggatttgaagctgcaaaggaaaaggcccttcagtttttggaagaagtcaaagtaagcagagagatggacagggaaacacttatagatgtggccagaacatctcttcgtactaaagttcatgctgaacttgcagatgtcttaacagaggctgtagtggactccattttggccattaaaaagcaagatgaacctattgatctcttcatgattgagatcatggagatgaaacataaatctgaaactgatacaagcttaatcagagggcttgttttggaccacggagcacggcatcctgatatgaagaaaagggtggaggatgcatacatcctcacttgtaacgtgtcattagagtatgagaaaacagaagtgaattctggctttttttacaagagtgcagaagagagagaaaaactcgtgaaagctgaaagaaaattcattgaagatagggttaaaaaaataatagaactgaaaaggaaagtctgtggcgattcagataaaggatttgttgttattaatcaaaagggaattgaccccttttccttagatgctctttcaaaagaaggcatagttgctctgcgcagagctaaaaggagaaatatggagaggctgactcttgcttgtggtggggtagccctgaattcttttgacgacctaagtcctgactgcttgggacatgcaggacttgtatatgagtatacattgggagaagagaagtttacctttattgagaaatgtaacaaccctcgttctgtcacattattgatcaaaggaccaaataagcacacactcactcagatcaaagatgcagtgagggacggcttgagggctgtcaaaaatgctattgatgatggctgtgtggttccaggtgctggtgccgtggaagtggcaatggcagaagccctgattaaacataagcccagtgtaaagggcagggcacagcttggagtccaagcatttgctgatgcattgctcattattcccaaggttcttgctcagaactctggttttgaccttcaggaaacattagttaaaattcaagcagaacattcagaatcaggtcagcttgtgggtgtggacctgaacacaggtgagccaatggtggcagcagaagtaggcgtatgggataactattgtgtaaagaaacagcttcttcactcctgcactgtgattgccaccaacattctcttggttgatgagatcatgcgagctggaatgtcttctctgaaaggttgaattgaagcttcctctgtatctgaatcttgaagactgcaaagtgatcctgaggattacagctgtggaatttttgtccaagcttcaaataattttgaaagaaattttcccatatgaaaaaaggagagaacactggcatctgttgaaa

SEQ ID NO: 4284 - DNA, 1041 bp, Homo sapiens
  source 1..1041: mol_type = genomic DNA
tctcgtcgcagccgccgcggctggcgggccttgggcttcccctgaagcatgagccctctcgcccgcagccaccctcaccgcgtggcccgcggacagtgcgcgccggggtcccgggtgcacagcctcaggataccccgtgcccgcagctcgggcgcccgcggcaggcgatcagtgggtgaccgcggctgcgagggactttgtcatccgtcctccaggatctggggagaaagagccccatcccttctctctctgccaccatttcggacaccccgcaggcggcgcgtctggcgaaggccctgcgggagctcggtcagacaggatggtactggggaagtatgactgttaatgaagccaaagagaaattaaaagaggcaccagaaggaactttcttgattagagatagctcgcattcagactacctactaacaatatctgttaaaacatcagctggaccaactaatcttcgaatcgaataccaagacggaaaattcagattggactctatcatatgtgtcaaatccaagcttaaacaatttgacagtgtggttcatctgatcgactactatgttcagatgtgcaaggataagcggacaggtccagaagccccccggaacggcactgttcacctttatctgaccaaaccgctctacacgtcagcaccatctctgcagcatctctgtaggctcaccattaacaaatgtaccggtgccatctggggactgcctttaccaacaagactaaaagattacttggaagaatataaattccaggtataaatgtttctctttttttaaacatgtctcacatagagtatctccgaatgcagctatgtaaaagagaaccaaaacttgagtgctctggataactatatggaatgctttctaagaacagctgaagctaatctaatttaaatttaacagcttgaagaggtagctaggtgtttaaagttcctccagatacttttacctgagtgatgcttcccttcctaaggctgaccaagacctgttgatccttttagattaaaaataaaatgtcgcatgt

SEQ ID NO: 4285 - DNA, 2608 bp, Homo sapiens
  source 1..2608: mol_type = genomic DNA
accttagcaaccttctcctggtgcagagtcctaagaggtttggggctccataaccacaaaggtggaagcgaggggaaggctgctccccaccacctcgcccccaccgctggggaagggttaccatgacaaccaacctggccggcaatcagagaggatggggccactgctggtcgccctttctctcagagtaaaagtaattgtccaggagagtggtgtttgggtgtggaagggcacgagtgggcgcgcttcgaagccgagaaagcccgctgggaggccgagcgcgccgagttacaggctcaggtggccttccttcagggagagaggaaagggcaggagaatctaaagacggacctggtgcggcggatcaagatgctagagtatgcgctgaagcaggaaagggccaaatatcataaactgaagtttgggacagacctgaaccagggggagaagaaagcagatgtgtcagaacaagtctccaatggccccgtggaatcggtcaccctggagaacagcccgttggtgtggaaggaggggcggcagcttctccgacagtacctggaagaggtgggctacacagacaccatcctcgacatgcggtccaagcgcgtccgttccctgctgggccgctcgctggagctcaacggggcagtggagccgagtgaaggggcccccagggctccaccaggccctgcagggctcagtggtggggagtcgctgctggtgaaacagatcgaggagcagataaagaggaacgcggcaggcaaagatggcaaagagcgcttgggcggctcagtgctggggcagatccccttcctgcagaactgcgaggacgaagacagcgacgaggacgatgagctggacagcgtgcagcacaagaagcagcgtgtgaagctcccatccaaggctctggtgcccgaaatggaagacgaggatgaggaagacgactctgaggatgctatcaatgagtttgatttcctgggctcaggagaggatggggaaggggctccagaccctcggcggtgcactgtggatgggagcccccatgagctggaaagccgtcgggtcaaactccaaggcattctggctgacctgcgggatgtggatgggctgcccccaaaagtgactggcccgcctcctggcacaccccagccccggccacatgaagacgtcttcatcatggacactatcgggggcggggaggtgagcctgggggacttggcagatctcaccgtcaccaacgacaacgacctcagctgcgatctgtctgacagcaaagatgcttttaagaagacgtggaaccccaagttcaccctgcgctcgcactacgacggcattcgttccctggccttccaccacagccagtcggctctgctcaccgcctccgaggacggcacgctcaagctctggaacctgcagaaggcggtcacggccaagaagaatgcggcgctagatgtggaacctatacatgctttccgggctcacaggggcccagtgttggctgtggctatgggcagcaacagtgaatactgctacagtggcggggcagatgcctgcatccatagttggaagattccagacctcagcatggatccctatgatggctacgacccaagcgtgctgagccacgtcctggagggccacggggacgccgtgtggggcctggccttcagtcccacctcccagcgcctggcctcctgttctgctgatggcaccgtccgcatctgggaccccagcagcagcagcccggcctgcctctgcaccttccccacagccagcgagcacggggtccccacctcagtggccttcaccagcaccgagcctgcccacatcgtggcctccttccgctctggcgacaccgtcttgtatgacatggaggttggcagtgccctcctcacgctggagtcccggggcagcagcggtccaacccagatcaaccaagtggtgagtcatccaaaccagcctctcaccatcaccgcccacgacgacaggggcatccgcttcctggacaatcggacaggtaagccggtgcactccatggttgcacacctggacgcagtcacctgcctagccgtggaccccaacggcgcattcctgatgtcaggaagccatgactgctccctgcgtctctggagcctggacaacaaaacgtgcgtgcaggagatcacggcccaccgcaagaagcacgaggaggccatccacgctgttgcctgccaccccagcaaggccctcattgccagtgctggcgctgatgccctggccaaggtcttcgtatgatgcccacctggccctgccctggccgccacgctggctggggtgtagggccgggcaggtggggctgaggggactcccagcctcgctggaggtgcagaggcctggcctctgtctgtttgccatggagcctggtggtgctaacggccctttccccaggaatccctccccaacggctgccttccccaagcatccagcctggggatgggcccctttcaggaatcacccccgaggatggcctcggggtttccccctgtgccctgacagccgctcctggtatcagagctgctttccagagggcagcacagccagggccgggtgtctttagggatcagttttt

SEQ ID NO: 4286 - DNA, 2312 bp, Homo sapiens
  source 1..2312: mol_type = genomic DNA
agagaggcagccttcagacctatgttcccagaaatctctacgtttgtgcctttcccaactagagaattaactcttgcggggcacaaaacagcctctatttctttgcgtccccagcgcctgtttgttgaagactgagttgaaggagtagcaggtggtgttaatttgtcaaaaagatgagttaaggtgctgggggcgagggggaacacccccacggccctccccccacagcaaggcagattttgtggaagtataatactttgtcattatgagatgtcgtctctcggtgcctcctttgtgcaaattaaatttgatgacttgcagttttttgaaaactgcggtggaggaagttttgggagtgtttatcgagccaaatggatatcacaggacaaggaggtggctgtaaagaagctcctcaaaatagagaaagaggcagaaatactcagtgtcctcagtcacagaaacatcatccagttttatggagtaattcttgaacctcccaactatggcattgtcacagaatatgcttctctgggatcactctatgattacattaacagtaacagaagtgaggagatggatatggatcacattatgacctgggccactgatgtagccaaaggaatgcattatttacatatggaggctcctgtcaaggtgattcacagagacctcaagtcaagaaacgttgttatagctgctgatggagtattgaagatctgtgactttggtgcctctcggttccataaccatacaacacacatgtccttggttggaactttcccatggatggctccagaagttatccagagtctccctgtgtcagaaacttgtgacacatattcctatggtgtggttctctgggagatgctaacaagggaggtcccctttaaaggtttggaaggattacaagtagcttggcttgtagtggaaaaaaacgagagattaaccattccaagcagttgccccagaagttttgctgaactgttacatcagtgttgggaagctgatgccaagaaacggccatcattcaagcaaatcatttcaatcctggagtccatgtcaaatgacacgagccttcctgacaagtgtaactcattcctacacaacaaggcggagtggaggtgcgaaattgaggcaactcttgagaggctaaagaaactagagcgtgatctcagctttaaggagcaggagcttaaagaacgagaaagacgtttaaagatgtgggagcaaaagctgacagagcagtccaacaccccgcttctcttgcctcttgctgcaagaatgtctgaggagtcttactttgaatctaaaacagaggagtcaaacagtgcagagatgtcatgtcagatcacagcaacaagtaacggggagggccatggcatgaacccaagtctgcaggccatgatgctgatgggctttggggatatcttctcaatgaacaaagcaggagctgtgatgcattctgggatgcagataaacatgcaagccaagcagaattcttccaaaaccacatctaagagaagggggaagaaagtcaacatggctctggggttcagtgattttgacttgtcagaaggtgacgatgatgatgatgatgacggtgaggaggaggataatgacatggataatagtgaatgaaagcagaaagcaaagtaataaaatcacaaatgtttggaaaacacaaaagtaacttgtttatctcagtctgtacaaaaacagtaaggaggcagaaagccaagcactgcatttttaggccaatcacatttacatgaccgtaatttcttatcaattctacttttatttttgcttacagaaaaacggggggagaattaagccaaagaagtatatttatgaatcagcaaatgtggtgcctgattatagaaatttgtgatcctatatacaatataggacttttaaagttgtgacattctggctttttcttttaatgaatactttttagtttgtatttgactttatttcctttattcaaatcatttttaaaaacttacattttgaacaaacactcttaactcctaattgttctttgacacgtagtaattctgtgacatactttttttttcttatagcaatacactgtaatatcagaaatggttggcctgagcaacctagtaagacctcgtctctactaataattaaaaaactagctggcatggtagcacacacctgtagtcccagatacttgggaggccaaggcaggaggattgcttgagacctagcaatcagtcagggctgcagtgagccatgatggcaccactgcactctagcctgggcaagagaacaagatcctgtct

SEQ ID NO: 4287 - DNA, 4509 bp, Homo sapiens
  source 1..4509: mol_type = genomic DNA
gaaggcggctgtggtagcggcggcggcggcggcggagccctgggtcggtgtctgcgcgctggtgtctgaggcccaggctgaggcctccgctattgctggagcgcaggcggcggagaggatgactgccgctgccattctctcttgagctagcgagccgccgccaccctccaccctcccccggcagggcggagaggagcggccggagtcagcgatggtgcccggcgaggagaaccaactggtcccgaaagagatagaaaatgctgctgaagaacctagagtcttatgtattatacaagatactactaattcaaagacagtgaatgaacggatcactttaaatttaccagcatctactccagtcagaaagctctttgaagatgtggccaacaaagtaggctacataaatggaacctttgacttggtgtggggaaatggaatcaatactgctgatatggcaccactggatcataccagtgacaagtcacttctcgacgctaattttgagccaggaaagaagaactttctgcatttgacagataaagatggtgaacaacctcaaatactgctggaggattccagtgctggggaagacagtgttcatgacaggtttataggtccgcttccaagagaaggttctgggggttctaccagtgattatgtcagccaaagctactcctactcatctattttgaataaatcagaaactggatatgtgggactagtaaaccaagcaatgacttgctatttgaatagccttttgcaaacactttttatgactcctgaatttaggaatgcattatataagtgggaatttgaagaatctgaagaagatccagtgacaagtattccataccaacttcaaaggctttttgttttgttacaaaccagcaaaaagagagcaattgaaaccacagatgttacaaggagctttggatgggatagtagtgaggcttggcagcagcatgatgtacaagaactatgcagagtcatgtttgatgctttggaacagaaatggaagcaaacagaacaggctgatcttataaatgagctatatcaaggcaagctgaaggactacgtgagatgtctggaatgtggttatgagggctggcgaatcgacacatatcttgatattccattggtcatccgaccttatgggtccagccaagcatttgctagtgtggaagaagcattgcatgcatttattcagccagagattctggatggcccaaatcagtatttttgtgaacgttgtaagaagaagtgtgatgcacggaagggccttcggtttttgcattttccttatctgctgaccttacagctgaaaagattcgattttgattatacaaccatgcataggattaaactgaatgatcgaatgacatttcccgaggaactagatatgagtacttttattgatgttgaagatgagaaatctcctcagactgaaagttgcactgacagtggagcagaaaatgaaggtagttgtcacagtgatcagatgagcaacgatttctccaatgatgatggtgttgatgaaggaatctgtcttgaaaccaatagtggaactgaaaagatctcaaaatctggacttgaaaagaattccttgatctatgaacttttctctgttatggttcattctgggagcgctgctggtggtcattattatgcatgtataaagtcattcagtgatgagcagtggtacagcttcaatgatcaacatgtcagcaggataacacaagaggacattaagaaaacacatggtggatcttcaggaagcagaggatattattctagtgctttcgcaagttccacaaatgcatatatgctgatctatagactgaaggatccagccagaaatgcaaaatttctagaagtggatgaatacccagaacatattaaaaacttggtgcagaaagagagagagttggaagaacaagaaaagagacaacgagaaattgagcgcaatacatgcaagataaaattattctgtttgcatcctacaaaacaagtaatgatggaaaataaattggaggttcataaggataagacattaaaggaagcagtagaaatggcttataagatgatggatttagaagaggtaatacccctggattgctgtcgccttgttaaatatgatgagtttcatgattatctagaacggtcatatgaaggagaagaagatacaccaatggggcttctactaggtggcgtcaagtcaacatatatgtttgatctgctgttggagacgagaaagcctgatcaggttttccaatcttataaacctggagaagtgatggtgaaagttcatgttgttgatctaaaggcagaatctgtagctgctcctataactgttcgtgcttacttaaatcagacagttacagaattcaaacaactgatttcaaaggccatccatttacctgctgaaacaatgagaatagtgctggaacgctgctacaatgatttgcgtcttctcagtgtctccagtaaaaccctgaaagctgaaggattttttagaagtaacaaggtgtttgttgaaagctccgagactttggattaccagatggcctttgcagactctcatttatggaaactcctggatcggcatgcaaatacaatcagattatttgttttgctacctgaacaatccccagtatcttattccaaaaggacagcataccagaaagctggaggcgattctggtaatgtggatgatgactgtgaaagagtcaaaggacctgtaggaagcctaaagtctgtggaagctattctagaagaaagcactgaaaaactcaaaagcttgtcactgcagcaacagcaggatggagataatggggacagcagcaaaagtactgagacaagtgactttgaaaacatcgaatcacctctcaatgagagggactcttcagcatcagtggataatagagaacttgaacagcatattcagacttctgatccagaaaattttcagtctgaagaacgatcagactcagatgtgaataatgacaggagtacaagttcagtggacagtgatattcttagctccagtcatagcagtgatactttgtgcaatgcagacaatgctcagatccctttggctaatggacttgactctcacagtatcacaagtagtagaagaacgaaagcaaatgaagggaaaaaagaaacatgggatacagcagaagaagactctggaactgatagtgaatatgatgagagtggcaagagtaggggagaaatgcagtacatgtatttcaaagctgaaccttatgctgcagatgaaggttctggggaaggacataaatggttgatggtgcatgttgataaaagaattactctggcagctttcaaacaacatttagagccctttgttggagttttgtcctctcacttcaaggtctttcgagtgtatgccagcaatcaagagtttgagagcgtccggctgaatgagacactttcatcattttctgatgacaataagattacaattagactggggagagcacttaaaaaaggagaatacagagttaaagtataccagcttttggtcaatgaacaagagccatgcaagtttctgctagatgctgtgtttgctaaaggaatgactgtacggcaatcaaaagaggaattaattcctcagctcagggagcaatgtggtttagagctcagtattgacaggtttcgtctaaggaaaaaaacatggaagaatcctggcactgtctttttggattatcatatttatgaagaagatattaatatttccagcaactgggaggttttccttgaagttcttgatggggtagagaagatgaagtccatgtcacagcttgcagttttgtcaagacggtggaagccttcagagatgaagttggatcccttccaggaggttgtattggaaagcagtagtgtggacgaattgcgagagaagcttagtgaaatcagtgggattcctttggatgatattgaatttgctaagggtagaggaacatttccctgtgatatttctgtccttgatattcatcaggatttagactggaatcctaaagtttctaccctgaatgtctggcctctttatatctgtgatgatggtgcggtcatattttatagggataaaacagaagaattaatggaattgacagatgagcaaagaaatgaactgatgaaaaaagaaagcagtcgactccagaagactggacatcgtgtaacatactcacctcgtaaagagaaagcactaaaaatatatctggatggagcaccaaataaagatctgactcaagactgactctgatagtgtagcattttccctgggggagttttggttttaattagatggttcactaccactgggtagtgccattttggccggacatggttggggtaacccagtgacaccagcactgattggactgccctacaccaatcagaagctcagtgcccaatgggccactgttttgactcggaatcatgttgtgcactatagtcaaatgtactgtaaagtgaaaagggatgtgc

SEQ ID NO: 4288 - DNA, 1928 bp, Homo sapiens
  source 1..1928: mol_type = genomic DNA
cgggccatggcggcgaacctgagccggaacgggccagcgctgcaagaggcctacgtgcgggtggtcaccgagaagtccccgaccgactgggctctctttacctatgaaggcaacagcaatgacatccgcgtggctggcacaggggacaggcgagggcgtgaacgatgtgcggaagggagcctgtgccagccacgtcagcaccatggccagcttcctgaagggggcccatgtgaccatcaacgcacgggccgaggaggatgtggagcctgagtgcatcatggagaaggtggccaaggcttcaggtgccaactacagctttcacaaggagagtggccgcttccaggacgtgggaccccaggccccagtgggctctgtgtaccagaagaccaatgccgtgtctgagattaaaagggttggtaaagacagcttctgggccaaagcagagaaggaggaggagaaccgtcggctggaggaaaagcggcgggccgaggaggcacagcggcagctggagcaggagcgccgggagcgtgagctgcgtgaggctgcacgccgggagcagcgctatcaggagcagggtggcgaggccagcccccagaggacgtgggagcagcagcaagaagtggtttcaaggaaccgaaatgagcaggagtctgccgtgcacccgagggagattttcaagcagaaggagagggccatgtccaccacctccatctccagtcctcagcctggcaagctgaggagccccttcctgcagaagcagctcacccaaccagagacccactttggcagagagccagctgctgccatctcaaggcccagggcagatctccctgctgaggagccggcgcccagcactcctccatgtctggtgcaggcagaagaggaggctgtgtatgaggaacctccagagcaggagaccttctacgagcagcccccactggtgcagcagcaaggtgctggctctgagcacattgaccaccacattcagggccaggggctcagtgggcaagggctctgtgcccgtgccctgtacgactaccaggcagccgacgacacagagatctcctttgaccccgagaacctcatcacgggcatcgaggtgatcgacgaaggctggtggcgtggctatgggccggatggccattttggcatgttccctgccaactacgtggagctcattgagtgaggctgagggcacatcttgcccttcccctctcagacatggcttccttattgctggaagaggaggcctgggagttgacattcagcactcttccaggaataggacccccagtgaggatgaggcctcagggctccctccggcttggcagactcagcctgtcaccccaaatgcagcaatggcctggtgattcccacacatccttcctgcatcccccgaccctcccagacagcttggctcttgcccctgacaggatactgagccaagccctgcctgtggccaagccctgagtggccactgccaagctgcggggaagggtcctgagcaggggcatctgggaggctctggctgccttctgcatttatttgccttttttctttttctcttgcttctaaggggtggtggccaccactgtttagaatgacccttgggaacagtgaacgtagagaattgtttttagcagagtttgtgaccaaagtcagagtggatcatggtggtttggcagcagggaatttgtcttgttggagcctgctctgtgctccccactccatttctctgtccctctgcctgggctatgggaagtggggatgcagatggccaagctcccaccctgggtattcaaaaacggcagacacaacatgttcctccacgcggctcactcgatgcctgcaggccccagtgtgtgcctcaactgattctgacttcaggaaaagtaacacagagtggccttggcctgttgtcttcccct

SEQ ID NO: 4289 - DNA, 291 bp, Homo sapiens
  source 1..291: mol_type = genomic DNA
atgtgtcataccagctgctcctcgggctgccagccagcctgctgcgcgcccagcccctgccagccagcctgttgcgtgcccgtgagctgccagtcttctgtgtgtgtgcctgtgagctgcaggcccattgtgtgtgcagccccctcctgccagtcctccctgtgcgtgcctgtgagctgcaggcctgtcgtgtatgcggctccgtcctgccagtcctctgggtgctgccagccctcctgcaccagcgtcctctgcagacccatctcctacagtatctcttcctgctgctga

SEQ ID NO: 4290 - DNA, 321 bp, Homo sapiens
  source 1..321: mol_type = genomic DNA
attacacgcatgaaacactgcttatggcctgtttccgcctctgtctcctgggtaatggggaccacaggtgcgcaccgccacgccaggctaaagaaataaagtgatgtactgtatgaagaagtgccgtaaagtgatattaaattttgagaagccaaggaaggaaacagggaaaaatgtcgccatgaaggccgagaaccgctgccgccgccgacccccgccggccctgaacgccatgagcctgggtccccgccgcgcccgctccgctccgactgccgtcgccgccgaggcccccgttgatgccgctgagctcccccaacgccg

SEQ ID NO: 4291 - DNA, 800 bp, Homo sapiens
  source 1..800: mol_type = genomic DNA
gaaattattggagaagcacaaaaggccatgggaaacatgtgcagagatcaagcagtttggctggtccagtcaagttccaggtcaaacatttgagagccaagggaccaagacccgaaccctgcggctgtggccgagaacgctgcactgagcctgcgcgcaaagcctctgagtaaaaggagaaagtaaccccctaactaggcctctggagggcgaaagctgctgcacaagtctgcgcaggcgcgccccgctgacgaacactcatcagtgcgcaggcgcccatcttagttggtcttctagtccggtaaacagagggcctgcccccgacagcttctgcttccgggtcacgccttgacagcggctttcaacccccacctcagcccagcaattcgtttggagcatgtgaacaccttgagccttgatgagttccagtatgtggtatattatgcagagcattcagagcaaatactctctctccgagcgcttaatccgaacaattgctgccatccgttccttcccacatgataatgtagaggacctcatcagagggggagcagatgtgaactgcactcatggcacactgaagcccttgcactgtgcctgtatggtgtcagatgctgactgtgtggagttacttctggaaaaaggagccgaggtgaatgccctggatgggtataaccgaacagccctccactatgcagcagagaaagatgaggcttgtgtggaggtcctattggagtatggtgcaaaccccaatgctttggatggcaacagagataccccacttcactgggcagccttta

SEQ ID NO: 4292 - DNA, 454 bp, Homo sapiens
  source 1..454: mol_type = genomic DNA
cagtggacagcatctacagctacaataactaaagaaaaacaagatcaacctaagaaagatatctcaaattatcaggtggaacaagctcaagttcttcttaagagagagaaggaaatcccaccaaccgttttccctaatcgcagcccttggtgccagaatccctatgtctctgcacatccttactgtcctctgattgaaccacacaatacatccaccgctggaggcagattggatagacagcccaggactcggtcaaccagacctaatcgagcctcagggtctaagaaaaagaagacatctgagtcacaaaagcaataagcagtcaactcaacctttaaaggcttcctattctttacttgacttaagatgaaaactacagccacgtgaaccctaacttgttggtattctggactctcctggtagaaatgacttaattttactactccatacagcc

SEQ ID NO: 4293 - DNA, 1424 bp, Homo sapiens
  source 1..1424: mol_type = genomic DNA
gtgcggaggctgagccggccgcgggcgcgaccggaggcaggcagaagaaattagaagtggccatggaagaagaaggattagcagatgaagaggtgcggttggtccagaagaaagatacaggccatatctatgcaatgaagatattgagaaagtctgatatgcttgaaaaagagcaggtggcccatatccgagcagaaagagatattttggtagaagcagatggtgcctgggtggtgaagatgttttacagttttcaggataagaggaatctttatctaatcatggaatttctccctggaggtgacatgatgacattgctaatgaagaaagacaccttgacagaagaggaaacacagttctacatttcagagactgttctggcaatagatgcgatccaccagttgggtttcatccatcgggatattaagccagacaaccttttattggatgccaagggtcatgtaaaattatctgattttggtttatgtacgggattaaagaaagctcacaggactgaattttatagaaatctcacacacaacccaccaagtgacttctcatttcagaacatgaactcaaagaggaaagcagaaacttggaagaagaacaggagacaactggcatattccacagttgggacaccagattacattgctccagaagtattcatgcagactggttacaacaaattgtgtgactggtggtctttgggagtgattatgtatgaaatgctaataggatatccacctttctgctctgaaacacctcaagaaacgtacagaaaagtgatgaactggaaagaaactctggtatttcctccagaggtacctatatctgagaaagccaaggacttaattctcagattttgtattgattctgaaaacagaattggaaatagtggagtagaagaaataaaaggtcatcccttttttgaaggtgtcgactgggagcacataagggaaaggccagcagcaatccctatagaaatcaaaagcattgatgatacttcaaattttgatgacttccctgaatctgatattttacaaccagtgccaaataccacagaaccggactacaaatccaaagactgggtttttctcaattatacctataaaaggtttgaagggttgactcaacgtggctctatccccacctacatgaaagctgggaagttatgaatgaagataacattcacccataaccaagagaactcaggtagctgcatcaccaggcttgcttggcgtagataacaatacactgaaatactcctgaagatggtggtgcttattgactacaagaggaaattctacaggattaggatttctaagactactataggaattggttggcagtgccagctggctcttttttttaatattttattatttttgttaactttattatatgaaggtactggaataaaa

SEQ ID NO: 4294 - DNA, 1420 bp, Homo sapiens
  source 1..1420: mol_type = genomic DNA
agagctggagcatctcgcagccctacaacttctttgcggcgcttggtctgtctttgcgttgcgagatcaggatcggtgtgttgctcagacaccggccgaacgccaccggcacgtctaggagtctcctgtgcctggaagaggctggtttcattcgattctaaaagaaacggatgttgaaacatttgtagcagatatactgaaaggagaaaatttatccaagaaagcaaaggaaaagagagaatcccttattaagaagataaaagatgtaaagtctatctatcttcaggaatttcaagacaaaggtgatgcagaagatggggaagaatatgatgacccttttgctgggcctccagacactatttcattagcctcagaacgatatgataaagacgatgaagccccctctgatggagcccagtttcctccaattgcagcacaagaccttccttttgttctaaaggctggctaccttgaaaaacgcagaaaagatcacagctttctgggatttgaatggcagaaacggtggtgtgctctcagtaaaacggtattctattattatggaagtgataaagacaaacaacagaaaggtgaatttgcaatagatggctacagtgtcagaatgaataacactctaagaaaggatggaaagaaagattgctgttttgaaatctctgctcctgataaacgtatatatcagtttacagcagcttctcccaaagatgctgaagaatgggtacagcagctgaaatttgtattgcaagatatggaatctgatattattcctgaggattatgatgagagaggagaattatatgatgatgttgatcatcctctaccaataagcaatccactaacaagcagtcaaccaatagatgatgaaatttatgaagaacttccagaagaagaagaggacagtgctccagtgaaagtggaagaacaaaggaagatgagtcaggatagtgtccatcacacctcaggggataagagcactgattatgctaatttttaccagggattgtgggattgtactggagctttttctgatgagttgtcatttaagcgtggtgatgtgatttacattcttagcaaggaatacaatagatatggctggtgggtaggagaaatgaagggagccattggcttggtgcctaaagcctacataatggagatgtatgatatttgagagtcctggaaaaggaaaattcttctgcttgtctgcaaatgctttggatttagaagcgtcatgaaagcacgagtgacagctcctaacctctccttgttttattaaacattacttatctttgactgttattttatgcagtcgctcattaaaatattcctctgatgtgaaattaaatgaaggatattaatgtaaattagatgcaaccagttaagttatacctgttgctattttgcaaag

SEQ ID NO: 4295 - DNA, 554 bp, Homo sapiens
  source 1..554: mol_type = genomic DNA
gagagacccctacgatcccaggacactgatgtggggtaactaacacccactggaagtctacgctgagttcacaggctatgtatgacctgacatgcattttgacctgccctgtgttttgatatttgaatgagttgctgatgtttacaagccgaagctggccgggcgtggtggctcgcgcctgtaatcccagcactttgggaggtcgaggcaggaggatcgcttcagagtcagaggttccggttgagatcaagttgggagacacacccttgttcattctccttgagaagcagctattatcaacagaacattgacagaacctgtgtttggggaaaggactgatggctttgagtctaggttggaaagcacacaggaaccactgtggtctcctcttgcaggctctgcgaagcagtggtcttctcttgtttccctgtggccagtgtccctggagaggagctggaagctttttggaccctgagataaaggctttcctggaggagaacactgaagtcaccagcagtggtagcctcacccctgaaatccagttgcggcttttg

SEQ ID NO: 4296 - DNA, 2996 bp, Homo sapiens
  source 1..2996: mol_type = genomic DNA
cttctctctcacgcctagcgcaatggcggcggccgcggcggagcagcaacagttctacctgctcctgggaaacctgctcagccccgacaatgtggtccggaaacaggcagaggaaacctatgagaatatcccaggccagtcaaagatcacattcctcttacaagccatcagaaatacaacagctgctgaagaggctagacaaatggccgccgttctcctaagacgtctcttgtcctctgcatttgatgaagtctatccagcacttccctctgatgttcagactgccatcaagaacttgctaccgggattcctacaggcggtaaatgactcgtgctaccagaatgatgattctgtcctaaaatccctcgttgagattgcagatactgttccaaagtatttgcgtcctcacttggaagcaactctacagctaagtctaaagttgtgtggagacactagcctcaacaatatgcaacgccagcttgcccttgaagtgatcgtcaccctctctgagactgcagctgctatgttaagaaaacataccaatattgttgcacagactattcctcagatgttagcaatgatggttgatttggaagaagatgaggactgggcaaatgcagatgaactagaagatgatgattttgacagcaatgcagttgcaggcgagagtgctctagatcgaatggcttgcggacttggtggaaagctcgttctgccgatgatcaaggaacacattatgcaaatgcttcaaaatcctgactggaaataccggcatgcaggattgatggccttatctgccattggtgaagggtgccaccagcaaatggaaggaattctaaatgagatcgtaaattttgttttactttttctccaggatcctcatccaagagtaaggtatgcagcctgtaatgccgtgggacagatggctacagattttgcacctggtttccaaaagaaatttcatgagaaggtgattgcagctctgctgcagaccatggaagaccaaggcaatcaacgtgtgcaggcccatgcagctgctgccctcattaactttactgaagactgtcccaagtcactacttattccatacttggataatttggtgaaacatctgcattccattatggtactgaagcttcaagagctgattcagaaaggcaccaagttagttttggaacaagttgtgacatccattgcatcagttgccgatactgcagaagaaaaatttgtcccctactatgatttatttatgccatcactgaagcacatcgttgagaatgcggttcaaaaagaactgagacttctgagaggaaaaactattgaatgcattagcctcattggtctggctgttgggaaggaaaaattcatgcaggatgcatcagatgtgatgcagcttttgttaaagacccagacagacttcaatgatatggaagatgatgatcctcagatctcttacatgatctcagcatgggccagaatgtgcaaaatccttggaaaagaatttcagcaataccttccagtggttatggggcctttaatgaagacggcttcaattaagcccgaagtagcccttttagatacccaagacatggagaatatgagtgatgatgatggttgggaatttgtgaaccttggagatcagcaaagctttggtattaaaactgcaggactagaagaaaaatcaactgcttgccagatgttggtttgctatgctaaggagttaaaggaaggctttgtggagtacaccgaacaggttgtcaaactgatggtccctttactgaaattttatttccacgatggtgttcgagtggcagcagcggaatccatgcctcttctcctggagtgtgcaagagtccgtggtcctgagtatctcacacagatgtggcattttatgtgtgatgctctaattaaggccattggtacagaaccagattcagacgtcctctcagaaataatgcattcttttgcaaagtgcattgaagtaatgggagatggatgccttaataatgaacactttgaagaactgggaggtatattgaaagcaaagcttgaagaacattttaaaaatcaagaattacgacaagttaaaagacaagatgaagactatgatgaacaggtcgaagagtcactacaagatgaggatgataatgatgtttatattctgaccaaagtgtcagatattttacactcaatattcagtagctacaaagaaaaggtgttaccatggtttgaacagctgcttccattaattgtcaacctcatttgtccacatagaccatggccagacagacaatggggattatgcatctttgatgatgtcatagaacactgtagtccagcctcatttaaatacgcagaatatttcttaagaccaatgctccaatatgtatgtgacaacagcccagaagtcaggcaagcagctgcatatggcctgggagtcatggcacagtacggtggagataattatcgccctttttgtacagaagcacttcccctgctggtaagagttattcagtctgcggattctaagaccaaagaaaatgtcaatgctacagagaactgcatctcagcagtagggaaaatcatgaagttcaagcctgactgtgtaaacgttgaagaggtccttccacactggttgtcttggcttccactacatgaagataaagaagaagctgttcagactttcaattatctgtgtgacctgattgaaagtaatcatccaattgttcttggcccaaacaataccaatctgcccaaaatatttagtataattgcggaaggagaaatgcacgaggcaattaaacatgaagatccttgtgccaaacgtctggccaatgtcgttcgccaagtacagacttctggaggactgtggactgagtgcatagcacagctcagtcctgagcagcaggccgccattcaggagctcctgaactctgcgtgaagggccttaatgtcacccaccagaaaactaactccaaataaacgcttaccctttc

SEQ ID NO: 4297 - DNA, 3127 bp, Homo sapiens
  source 1..3127: mol_type = genomic DNA
ccatatatattacttatttcctctttctttttatcatgactttttcatagcatcttattttttggatgcatcatcttatctttccaaggaaattagggtttttggggtctaagttttctttggttcacgtattatctggttcctcttttttttttttttcctctctgttactccagtttatctcttttatgttggaggccctcctcagatgccttacccaaggctatctgtctatatctgagtgaggccctaaaaggctagccaagaagttctgtgtttggggtggggtggatggtagctaaatggcaagccaggctttttggagggactcccaaatgtctggatctggatggctgttccctagactgttcagtttttctggaaaggacttgtgccatctgctttctggggagctgctggtattctcagggtagggttgggagtggtttggcgctgagtcccttccactgtgcctgaccatggccctgcatctggatcctctcaggactcctgttcaggggcccagggggactggttttgcatagaggttgcctgcagtggtgggtgccgccaatagggtcaggctctgaacttcacctttggctcctggtgtctgcagcgcctgggtatacagggcttttgcaggctcagtcaacctgactccttacacacccacatctgcagcctttaggtatggcatcctctgcttccctaacccagggattggtcacacctatttgctgctttctagaaatgtatcagaatccctcatctgctgctggcttgccttccctctttctattattatgggcttatatttttgtttatttttgtagagatggggcaacataataagacccccttctcaaaaaaaaaaaaaggttgaggggagtctttgctaacaattggatttagggaaagaggggccaggaattaaaataactacaggaagtaagataactacagggtatgcccagctgtgcccttggaggcctgtctggagtacagtcagtatttagtgcacggagagctttggctgcacttgctctggggcagatcagtcactgctgatgcgtcccatggtgcatctctcctgatgatcttgatgctgttgcaggtggcccatggcgccctcagtgatggtgccattgatgctgtggagacacagaaggacctcctgggagccagtgggctcatgctgctgcttccccccaaaatgaagagtgaggacatggcagaggaggacgtgtactggctgtcggccttgctgcagctcaagcagctcctgcaggctaagcccttccagcctgcgcttcctctggtggttcttgtgcctagcccaggaggggacgccgttgagaaggaagtagaagatggtttgtgaaggaagtctcgtttatgaagcagcattgtttaataaatgggtggaggccctgggtctgaggatggtccagtagtgttggggtcaggaatcactgagacagcaacccctgtggtgactgtccactgcaggactgggtggggtcagcacagtgagatatgttagcaggtgtgctgacagcagaatgcaagtgaccttcatctatgtctgtcttaaaggtctgatgctacaggacttggtttcagctaagctgatttcagattacactgttaccgagatccctgataccattaatgatctacaaggttcaactaaggttttgcaagcagtgcagtggctggtttcccactgcccccattcccttgacctctgctgccagactctcattcagtacgtcgaagacgggattggccatgagtttagtggccgctttttccatgacagaagagagaggcgtctgggcggtcttgcttctcaggagcctggcgccatcattgagctgtttaacagtgtgctgcagttcctggcttctgtggtgtcctctgaacagctgtgtgacctgtcctggcctgtcactgagtttgctgaggcagggggcagccggctgcttcctcacctgcactggaatgccccagagcacctggcctggctgaagcaggctgtgctcgggttccagcttccgcagatggaccttccacccctgggggccccctggctccccgtgtgctccatggttgtccagtacgcctcccagatccccagctcacgccagacacagcctgtcctccagtcccaggtggagaacctgctccacagaacctactgtaggtggaagagcaagagtccctccccagtccatggggcaggcccctcggtcatggagatcccatgggatgatcttatcgccttgtgtatcaaccacaagctgagagactggacgcccccccggcttcctgttacatcagaggcgctgagtgaagatggtcagatatgtgtgtatttttttaaaaacgatttgaaaaaatatgatgttcctttgtcgtgggaacaagccaggttgcagacgcagaaggagctacagctgagagagggacgtttggcaataaagccttttcatccttctgcaaacaattttcccataccattgcttcacatgcaccgtaactggaagaggagcacagagtgtgctcaagaggggaggattcccagcacagaggatctgatgcgaggagcttctgctgaggagctcttggcgcagtgtttgtcgagcagtctgctgctggagaaagaagagaacaagaggtttgaagatcagcttcagcaatggttgtctgaagactcaggagcatttacggatttaacttcccttcccctctatcttcctcagactctagtgtctctttctcacactattgaacctgtgatgaaaacatctgtaactactagcccacagagtgacatgatgagggagcaactgcagctgtcagaggcgacaggaacgtgtctaggcgaacgactaaagcacctggaaaggctgatccggagttcaagggaagaggaagttgcctctgagctccatctctctgcgctgctagacatggtggacatttgagcagcctgacctgtggggagggggtctctcccgaagagtttctgtttttactcaaaataatgttattctcagatgcttgatgcactgttggaaatgtgattaatttaatcatgcagataaaccatttaaatgtc

SEQ ID NO: 4298 - DNA, 2961 bp, Homo sapiens
  source 1..2961: mol_type = genomic DNA
gggtgacgcaggcgcagcgcgggctgcgcgcgctactgcccatccccggttgtcccacttttgttcgcctctcttcggccctctactcaagagctccgtctccgtctcgccctcctcgaagtcctcgtcgcgcgcccgcgacccaggtcgccctgaaatctagcccgtccgagcgcgagtccaacgccgcggccgcaccaaggccccctcagaccgtgccatgggtgacagtgatgacgagtacgatcgaaggcgcagggacaagttcagaagagagcgcagcgactacgaccgttcccgcgagagagatgaaagacgtcgaggggacgattggaatgacagagagtgggaccgtggccgtgagcgccgtagtcggggtgaatatcgggactatgaccggaatcggcgagagcgcttctcgccacctcgccacgaactcagcccgccacagaagcgcatgaggagagactgggatgagcacagctctgacccataccacagtggctatgagatgccctatgggggggggtgggggcccaacttatggcccccctcagccctggggccaccctgacgtccacatcatgcagcaccatgtcctgcctatccaggccaggctgggcagcattgcagagattgacctgggtgtgccgccgcccgtgatgaagaccttcaaggagtttctcctctccctggatgactcggtggatgagacggaggccgtcaagcgctataatgactacaagctggatttccggaggcaacagatgcaggatttcttcctggcgcacaaagatgaggagtggtttcggtctaagtaccacccagatgaggtggggaagcgtcggcaggaggcccggggggccctgcaaaaccgactgagggtcttcctgtccctcatggagactggctggtttgataaccttctcctggacatagacaaagctgatgccattgtcaagatgctggatgcagccgtgattaagatggaaggaggcacggagaatgatcttcgcatcctggagcaggaggaggaggaggagcaggcaggaaagcctggggagcccagcaagaaagaagaaggacgggctggagcaggcctaggggacggggagcgcaaaaccaacgacaaggatgagaagaaggaagacggcaagcaggctgagaatgacagttctaatgatgacaaaacaaagaagtcggagggtgatggggacaaggaagagaagaaagaagactccgagaaggaagccaaaaagagtagcaagaagcggaaccggaagcacagtggtgacgacagctttgacgagggcagcgtgtcagagtctgagtcggagtcagagagcggccaggctgaggaggagaaggaggaggccgaagcgctcaaggagaaggagaagcccaaggaagaagaatgggagaagcccaaggacgccgcggggctggagtgcaagccgcggccgctgcataagacctgctccctcttcatgcgcaacatcgcgcccaacatctcccgggccgagatcatctccctttgtaaaaggtacccaggctttatgcgggtggcgctctcagagccccagccagagaggaggtttttccgtcgtggctgggtgaccttcgaccgcagtgttaacattaaagagatctgttggaacctgcagaacatccgtctccgggagtgtgagctgagccctggtgtgaacagggacctgacccggcgcgttcgcaacatcaacggcatcacccagcacaagcagattgtgcgcaacgacatcaagctggcggccaagctgatccacacgctggatgacaggacacagctttgggcctcagaaccagggacgcctcccctgcccacgagcctgccctcgcaaaacccgatcttgaagaatatcaccgactacctgatcgaggaagtaagcgccgaggaggaggagctgctggggagcagcgggggcgctcctcctgaggagcctcctaaggaagggaacccggcagagatcaacgtggagcgggatgagaagttgattaaggtcttggacaagctcctcctttacctgcgcatcgtgcattccttggattattacaacacctgtgagtaccccaacgaggacgagatgcccaatcgctgtgggatcatccacgttcgggggcccatgccacccaaccgcatcagtcacggggaagtgctggagtggcagaagacttttgaggagaagctcacgccgttgctgagtgtgcgggagtcactctcagaggaagaggcccagaagatggggcgcaaagacccagagcaggaagtggagaagttcgtcacctccaacacgcaggaactgggcaaggataagtggctgtgtcctctcagtggcaagaaattcaagggtcctgagtttgtgcgcaaacatatcttcaacaagcatgcagagaaaattgaggaagtgaaaaaggaagtcgcgttttttaacaacttcctcactgatgctaagcgcccagctctgcctgagatcaagccagcccagccacctggccccgcccagatactccccccaggtttgaccccaggactcccctacccacaccagactccccagggcctgatgccctatggtcagccccggcccccgatcttgggctatggagctggtgctgtccgccctgcagtccccacaggaggccctccatacccccatgccccgtatggtgctggtcgagggaactatgatgccttccgaggccagggaggttatcctgggaaacctcgcaacaggatggttcgtggagacccaagggccattgtggaatatcgggacctggatgccccagacgatgttgatttcttttgagccgtcccccgttcctcagtcctgtatcatccatacttgtactaccttgtcctatgaagctctgagaattttttgtacgatcagccttactgctaataaaagcacttccacaggg

SEQ ID NO: 4299 - DNA, 1832 bp, Homo sapiens
  source 1..1832: mol_type = genomic DNA
gaaaggcttggaacagctgccggaggtgacggagcggcggccccgcccggtgcgctggaggtcgaagcttccaggtagcggcccgcagagcctgacccagggtacgacgaagcagtcggcgggagcccacggtcgctgggcggtgtctttaagggagggggcggagccacgtctctggacatcctgagcccaagtcccccacactcagtgcagtgatgagtgcggaagtgaaggtgacagggcagaaccaggagcaatttctgctcctagccaagtcggccaagggggcagcgctggccacactcatccatcaggtgctggaggcccctggtgtctacgtgtttggagaactgctggacatgcccaatgttagagagctggctgagagtgactttgcctctaccttccggctgctcacagtgtttgcttatgggacatacgctgactacttagctgaagcccggaatcttcctccactaacagaggctcagaagaataagcttcgacacctctcagttgtcaccctggctgctaaagtaaagtgtatcccatatgcagtgttgctggaggctcttgccctgcgtaatgtgcggcagctggaagaccttgtgattgaggctgtgtatgctgacgtgcttcgtggctccctggaccagcgcaaccagcggctcgaggttgactacagcatcgggcgggacatccagcgccaggacctcagtgccattgcccgaaccctgcaggaatggtgtgtgggctgtgaggtcgtgctgtcaggcattgaggagcaggtgagccgtgccaaccaacacaaggagcagcagctgggcctgaagcagcagattgagagtgaggttgccaaccttaaaaaaaccattaaagttacgacggcagcagcagccgcagccacatctcaggaccctgagcaacacctgactgagctgagggaaccagctcctggcaccaaccagcgccagcccagcaagaaagcctcaaagggcaaggggctccgagggagcgccaagatttggtccaagtcgaattgaaaggactgtcgtttcctccctggggatgtggggtcccagctgcctgcctgcctcttaggagtcctcagagagccttctgtgcccctggccagctgataatcctaggttcatgacccttcacctcccctaaccccaaacatagatcacaccttctctagggaggaggcaaatgtaggtcatgtttttgttggtactttctgttttttgtgacttcatgtgttccattgctccccgctgccatgctctctcccttgtttccttaagagctcagcatctgtccctgttcattacatgtcattgagtaggtgggtagccctgatgggggtcgctctgtctggagcataacccacaggcgttttttctgccaccccatccctgcatgcctgatccccagttcctataccctacccctgacctattgagcagcctctgaagagccatagggcccccacctttactcacaccctgagaattctgggagccagtctgccatgccaggagtcactggacatgttcatcctagaatcctgtcacactacagtcatttcttttcctctctctggcccttgggtcctgggaatgctgctgcttcaaccccagagcctaagaatggcagccgtttcttaacatgttgagagatgattctttcttggccctggccatctcgggaagcttgatggcaatcctggaagggtttaatctccttttgtgagtttggtggggaagggaagggtatatagattgtattaaaaaaaaaaaggtatatatgcatatatctatatataatat

SEQ ID NO: 4300 - DNA, 1729 bp, Homo sapiens
  source 1..1729: mol_type = genomic DNA
gccctctcaagctgcttccagtgaatgctacacacctgcaccatggtttgtccgacatccttagccaagatcaggattggctatgttgaagagaagacaaacttggagtatattctttagtacatttttccccaaagatgttgggttcagttgccacaacactgccattgtcatcttcaaattccagtggaatgcctcttggttactatctgtctagtcctcagattagtagagtaactatatcaacaactggacaattgacttctaaagctactgtaggtagctgttccagagtggaaaacagcttgggaaaacggaaacttggaaaacttacatcacgtggcttagtaaatggcagaactgaaatataattacaagtctgtctaaatgcaagacacgttgttctttccacttcatcacgacgcgtctttgtaatatgccagccccttctcagttccgaagaaacaggatgaatcacccatgattggggatggagaagattatttcctttctttgtttggtgattcaaagaaacttacagcacactcaaactacactcagaaaactttaaaatacttttctatgattcttgaagaagttggccaatttacctccagttctcttggagatgttgaaatagctgaagtgaatgtcaagggtttgttcgtgaagctcattaactcttcccttgacaaagaaatggcaattggagatcatattctccagcaaaatgtgaatggacaaaccatttctttgtaccgattccttccaaacatcgtaatgcaggcaaattccacagtaacagtgtgggcagcagcatctgaagcaaagcatcaacctccatcagattttctttggaaggaacaagacaagtttagagcaagtcctgattgtataacaatcctgtgcaaaccgaacggtcaagccattgcgtggtacacccctatccactggaagcaagcgtgggaaaaattagatgctgacgttgaatttaacagatgttcagtagtatctccaacattccgaaagcgtgtgtttcagtggacagcatctacagctacaataactaaagaaaaacaagatcaacctaagaaagatatctcaaattatcaggtggaacaagctcaagttcttcttaagagagagaaggaaatcccaccaaccgttttccctaatcgcagcccttggtgccagaatccctatgtctctgcacatccttactgtcctctgattgaaccacacaatacatccaccgctggaggcagattggatagacagcccaggactcggtcaaccagacctaatcgagcctcagggtctaagaaaaagaagacatctgagtcacaaaagcaataagcagtcaactcaacctttaaagtaatctagtccaccctcaaccagctactagaaaagcaaaagagaactcaaatccctgaggcctgctctgcaacctccctgctattccatgagagggtgaagacatcacatttctatatggaaaaaggatccaaaatttgtattgctgtagaattggtgaattatagatgcttgatgaaatcacaagtcctaccactcctgccttccaaatccctgcagaaaacaagcagatggttagtattattcaatggataaaattgctatttgccttagatttctctttttgtaaacaaagttattttgggtacagaactcacaaaagaagagcacgtgcaattgtttaaccatttta

SEQ ID NO: 4301 - DNA, 6149 bp, Homo sapiens
  source 1..6149: mol_type = genomic DNA
ggaaaagctcctcggagatgagcgtgaccccctggctcgtggtggccgcctgttctcactaacgccatggcggggaccggagtgagaaaccggtgtctgtcactgactgcaaagtgagcgagaagcaggctgcgggccgtcccagcacgacgtggagccccgcggagacctcgagatgccccgcggggaagctcctggccccgggagacggggggctaaggacgaggccctgggcgaagaatcgggggagcggtggagccccgagttccatctgcagaggaaattggcggacagcagccacagtgaacagcaagatcgaaacagagtttctgaagaacttatcatggttgtccaagaaatgaaaaaatacttcccctcggagagacgcaataaaccaagcactctagatgccctcaactatgctctccgctgtgtccacagcgttcaagcaaacagtgagtttttccagattctcagtcagaatggagcacctcaggcagatgtgagcatgtacagtcttgaggagctggccactatcgcttcagaacacacttccaaaaacacagatacctttgtggcagtattttcatttctgtctggaaggttagtgcacatttctgaacaggctgctttgatcctgaatcgtaagaaagatgtcctggcgtcttctcactttgttgacctgcttgcacctcaagacatgagggtattctacgcgcacactgccagagctcagcttcctttctggaacaactggacccaaagagctgcacggtatgaatgtgctccggtgaaaccttttttctgcaggatccgtggaggtgaagacagaaagcaagagaagtgtcactccccattccggatcatcccctatctgattcatgtacatcaccctgcccagccagaattggaatcggaaccttgctgtctcactgtggttgaaaagattcactctggttatgaagctcctcggatcccagtgaataaaagaatcttcaccaccacacacaccccagggtgtgtttttcttgaagtagatgaaaaagcagtgcctttgctgggttacctacctcaggacctgattggaacatcgatcctaagctacctgcaccctgaagatcgttctctgatggttgccatacaccaaaaagttttgaagtatgcagggcatcctccctttgaacattctcccattcgattttgtactcaaaacggagactacatcatactggattccagttggtccagctttgtgaatccctggagccggaagatttctttcatcattggtcggcataaagttcgaacgagcccactaaatgaggatgtttttgctaccaaaattaaaaagatgaacgataatgacaaagacataacagaattacaagaacaaatttacaaacttctcttacagccagttcacgtgagcgtgtccagcggctacgggagcctggggagcagcgggtcgcaggagcagcttgtcagcatcgcctcctccagtgaggccagtgggcaccgtgtggaggagacgaaggcggagcagatgaccttgcagcaggtctatgccagtgtgaacaaaattaaaaatctgggtcagcagctctacattgagtcaatgaccaaatcatcattcaagccagtgacggggacacgcacagaaccgaatggtggtggtgaatgtaagacctttacttccttccaccaaacactgaaaaacaatagtgtgtacactgagccctgtgaggatttgaggaacgatgagcacagcccatcctatcaacagatcaactgtatcgacagtgtcatcagatacctgaagagctacaacattccagctttgaaaagaaagtgtatctcctgtacaaatacaacttcttcctcctcagaagaagacaaacagaaccacaaggcagatgatgtccaagccttacaagctggtttgcaaatcccagccatacctaaatcagaaatgccaacaaatggacggtccatagacacaggaggaggagctccacagatcctgtccacggcgatgctgagcttggggtcgggcataagccaatgcggttacagcagcaccattgtccatgtcccacccccagagacagccagggatgctaccctcttctgtgagccctggaccctgaacatgcagccagcccctttgacctcggaagaatttaaacacgtggggctcacagcggctgttctgtcagcgcacacccagaaggaagagcagaattatgttgataaattccgagaaaagatcctgtcatcaccctacagctcctatcttcagcaagaaagcaggagcaaagctaaatattcatattttcaaggagattctacttccaagcagacgcggtcggccggctgcaggaaagggaagcacaagcggaagaagctgccggagccgccagacagcagcagctcgaacaccggctctggtccccgcaggggagcgcatcagaacgcacagccctgctgcccctccgcggcctcctctccgcacacctcgagcccgaccttcccacctgccgccatggtgcccagccaggccccttacctcgtcccagcttttcccctcccagccgcgacctcacccggaagagaatacgcagcccccggaactgcaccggaaggcctgcatgggctgcccttgtccgagggcttgcagccttacccagctttcccttttccttacttggatacttttatgaccgttttcctgcctgacccccctgtctgtcctctgttgtcgccatcgtttttgccatgtccattcctgggggcgacagcctcttctgcgatatcaccctcaatgtcgtcagcaatgagtccaactctggacccacccccttcagtcaccagccaaaggagagaggaggaaaagtgggaggcacaaagcgaggggcacccgttcattacttcgagaagcagctcacccttgcagttaaacttacttcaggaagagatgcccagaccctctgaatctccagatcagatgagaaggaacacgtgcccacaaactgagtattgtgttacaggcaacaatggcagtgagagcagtcctgctactaccggtgcactgtccacggggtcacctcccagggagaatccatcccatcctactgccagcgctctgtccacaggatcgcctcccatgaagaatccatcccatcctactgccagcacactgtccatgggattgcctcccagcaggactccatcccatcctactgccactgttctgtccacggggtcacctcccagcgaatccccatccagaactggttcagcagcatcaggaagcagcgacagcagtatataccttactagtagtgtttattcttctaaaatctcccaaaatgggcagcaatctcaggacgtacagaaaaaagaaacatttcctaatgtcgccgaagagcccatctggagaatgatacggcagacacctgagcgcattctcatgacataccaggtacctgagagggttaaagaagttgtactaaaagaagacctggaaaagctagaaagtatgaggcagcagcagccccagttttctcatgggcaaaaggaggagctggctaaggtgtataattggattcaaagccagactgtcactcaagaaatcgacattcaagcctgtgtcacttgtgaaaatgaagattcagctgatggtgcggccacatcctgtggtcaggttctggtagaagacagctgttgagtgactgtgaggatgaaccttcataccctttccaagacgtgttacacagacagacctttttaagtcctggacttttaaatgaccatgaagttatcattgaatgttaagattttttcttcttgattttttaatacacgtaatctttttgaagcagacattgtatacagaatcttacttctctttgttcctgatatattaaaatggccagttaggctctttttgtagttgaattgtcttctaaagagattggatggcctctaaagaggtatgtgtatctttatttcagatgtcacccagagtaaattataattagaagtatagctagaatgagccccaaaccttagcctcatttattttgttctgttacataagtcattttccccttagagtgcttgaagaaatgccacctacaggttgtgtacttttcataatggtttccatgaatgtagtacgttcatacaggcttcattcaacctggcgttcccctccataattaagatgaaacattccggttttctcacaacacattagcacatactgtccattagcatatctgggataaccaggttttgggggttgagttttggccttcatccttgtagatccctttcctattgatttcccaccttccagtgaaattctgaaagtcttatcttaaaaatcgatccgcttaccatgggcctattcttgtaagtttcagttagcatttgcatgtgtaatattaaaatgaaagagcttcttacccagtgctgttgcccttttgagtatttttgtttttaaaataatgattgtaaaatgttttacaagtaatgtaaaagctagtatcattcttacatacttctgtgtttaaattttcattcttaccaaaacagttaactctttctttccaatcaatttatacaaaagaggtcgctccagccctaccacaggtctgactggcactgccttttgtttgcccttgaacagggcagtgttgtggggactgcaaaagagaaaacgtccaggcgagcccagttgtcctcgcccacagggtcctgcaggctccatcagtcaccgctttctatggcgtttgtagttgtgtcttttaagaagtgagtgtgattgtttacttgataaatcagctcactctctggtgctttttagagaagtccctgattccttcttaaacttggaatgatagatgaaattcacacccctgcagatcagaaaaaacaaatagaagaaaatgagggttacagtaacctgttgtctttatataacttgcaacaaactaatttatttttttttcctttttttgtttttggttttttatggttttttaaggaaaatacttttctcctttgaagttttacagctttttgtaaatgcgtcctgataatgattaggaaaatcgaccttttcatccatgatgaccatcctcatagctcagatctcctttcaaagtagtggctttctggatggtaattccatcttaaggtgtcagaactattttcaaatgctgcctttgacagttcttggaattttctgatattaagcagttccatgcaaatattcgtgttttataaatagctctcatagtctgctccatcttgatagttaagtgatttctgaagcgtttgtgtgtgtgttgatcaggttgtgtgatatttttgcttgatagagaatcaaatttgaaacaattaaccagccagtagattgtctgtcagtgaccttctgtagtaataaagtttttgccactgtaaataaaaacagtatccgtagctatcaggatcattgcgcactcatatatgctaagccttctgttctctaatagaagcctttcttttccattgtttctggatatttgtattatccaaatgtgcttatttctttgccttagcacacgttttatggagtacttgttatactaggtttgatttgaaactggtgcttgtcgcagaactgtcagagcatgaggagcgctcctcctgtgggtggacgcattcacgcactcccaggttgcacctgctgctggcggtgagcagggggttcagcagcttgaccgatgccccccgagggggctctccccagcttaaactttgttgtttaaatttgttaactttttatattaatgactattgaaagtggtaataaaaatttatattataggcttcaatgttttcatgaatgttacccaaaaagctgtgttttctttggtcagaggtcaaaatttatgaaaaacaaaatgctgtatgaatggaaatcattttgcaattgagtgacacttcattgtaattcacagtgtaaatttaatccaaactgaaattttgtttcaactgaatttgtaattaactctgaatttgtttttaatcattagtaatatttcagttgggtatctttttaagtaaaaacaacaaataaactctgtacatgtaaaacgtga

SEQ ID NO: 4302 - DNA, 8189 bp, Homo sapiens; identical to SEQ ID NO: 1244
  source 1..8189: mol_type = genomic DNA

SEQ ID NO: 4303 - DNA, 2191 bp, Homo sapiens
  source 1..2191: mol_type = genomic DNA
aacaagttaagctgaagaccgaagcaagagctggttcaggtggcagccacagcagcctcagggacctcagcaactatggcctcctgcccagactctgataatagctgggtgcttgctggcggggagctgggcatctccctcaacatgtgcctccttggggccctggttctgcttggcctgggggtcctcctcttctcaggtggcctctcagagtctgagactgggcccatggaggaagtggagcggcaggtcctcccagaccccgaggtgctggaagctgtgggggacaggcaggatgggctaagggaacagctgcaggccccagtgcctcctgacagtgtccccagcctgcaaaacatgggtcttctgctggacaagctggccaaggagaaccaggacatccggctgctgcaggcccagctgcaggcccaaaaggaagagcttcagagcctgatgcaccagcccaaagggctagaggaggagaatgcccagctccggggggctctgcagcagggcgaagccttccagcgggctctggagtcagagctgcagcagctgcgggcccggctccaggggctggaggccgactgtgtccggggcccagatggggtgtgcctcagtgggggtagaggcccacagggtgacaaggccatcagggagcaaggccccagggagcaggagccagaactcagcttcctgaagcagaaggaacagctggaggctgaggcacaggcattaaggcaagagttagagaggcagcgacggctgctggggtctgtacagcaggatctggagaggagcttgcaggatgccagccgcggggacccagctcatgctggcttggctgagctgggccacagattggcccagaaactgcagggcctggagaactggggccaggaccctggggtctctgccaatgcctcaaaggcctggcaccagaagtcccacttccagaattctagggagtggagtggaaaggaaaagtggtgggatgggcagagagaccggaaggctgagcactggaaacataagaaggaagaatctggccgggaaaggaagaagaactggggaggtcaggaggacagggagccagcaggaaggtggaaggagggcaggccaagggtggaggagtcggggagcaagaaggagggcaagcgacagggcccgaaggaacccccaaggaaaagtggtagcttccactcctctggagaaaagcagaagcaacctcggtggagggaagggactaaggacagccatgaccccctgccatcctgggcagagctgttgaggcccaagtaccgggcaccccagggctgctcaggtgtggacgagtgtgcccggcaggagggcctgactttctttggcacagagctagccccagtgcggcaacaggagctggcctctctgctaagaacatacttggcacggctgccctgggctgggcagctgaccaaggagctacccctctcacctgctttctttggtgaggatggcatcttccgtcatgaccgcctccgcttccgggattttgtggatgccctggaggacagcttggaggaggtggctgtgcaacagacaggtgatgatgatgaagtagatgactttgaggacttcatcttcagccacttctttggagacaaagcactgaagaagaggtcagggaagaaggacaagcactcacagagcccaagagctgcggggcccagggaggggcacagccatagccaccaccaccaccaccggggctgacaccctgccccacagggaatggccttggcctggcccagcccaagatcccagcgttatctaactcctggagggtggactctgtcctggcttgtttggtgtcctcagatatctttcacacagtagagcaaaatcaccagccctgcactgatgtcactttatgtagaaaaaggccttagctggacctgcgttgccgtctatgcaaatgcatgcaaatactccaggccctgggatgtgggcttgtgttttgtcactgtgaagggggagatgggagaggagcctgttttggggtggggtctggggaaggcaatctgattctgaagctaaagagctttcatcctcttgagtgtatgtccccatagtgggccccttgacccacatgctgaccggtgccttgggatttgactagagttgctggctcgaggcccagcacgaggactta

SEQ ID NO: 4304 - DNA, 2330 bp, Homo sapiens
  source 1..2330: mol_type = genomic DNA
ctggatttccgaggctggaggcgcctggccggctgggtggggaccaccatgggcaacgcggccggcagcgccgagcagcccgcgggccccgccgcgccgccccccaagcagcaccgctttgaaaagctgatggaatatttccggaatgaggacagcaacatcgacttcatggtggcctgcatgcagttcatcaacattgtggtacattcggtggagaacatgaacttccgtgtcttcctgcaatatgagttcacccacttgggcctggacctgtacttggagaggcttcggctcaccgagagtgacaagctgcaggtgcagatccaggcgtacctggacaatatttttgatgtgggggcgctgctggaggacacagagaccaagaacgctgtgctggagcacatggaggaactgcaggagcaagtggcgctgctgacagagcggcttcgggacgcggagaacgaatccatggccaagattgcagaactggaaaaacagctaagccaggcgcgcaaggagttggagaccctgcgggagcgcttcagcgaatcgaccgccatggggccctccaggcgtcccccagagcctgagaaagcgcctcccgctgccccgacgcggccctcggccctggagctgaaggtggaggagctggaggagaaggggttaatccgtattctgcgggggccgggggatgctgtctccatcgagatcctccccgtcgctgtggcaactccgagcggcggtgatgctccgactccgggggtgccgaccggctcccccagcccagatctcgcacctgcagcagagccggctcccggagcagcgccaccgccgccgccgccgcctcccggaggtcctcctgatgccctaggaagacgcgactcagaattgggcccaggagtgaaggccaagaagcccatccagactaagttccgaatgccactcttgaactgggtggcactgaaacccagccagatcaccggcactgtcttcacagagctcaatgatgagaaggtgctgcaggagctagacatgagtgattttgaggaacagttcaagaccaagtcccaaggccccagcctggacctcagcgctctcaagagtaaggcagcccagaaggcccccagcaaggcgacactcattgaggccaaccgggccaagaacttggccatcaccctgcggaagggcaacctgggggccgagcgcatctgccaagccattgaggcgtacgacctgcaggctctgggcctggacttcctggagctgctgatgcgcttcctgcccacagagtatgagcgcagcctcatcacccgctttgagcgggagcagcggccaatggaggagctgtcagaggaggaccgcttcatgctatgcttcagccgcatcccgcgcctgccggagcgcatgaccacactcaccttcctgggcaacttcccggacacagcccagctgctcatgccgcaactgaatgccatcattgcagcctcaatgtccatcaagtcctctgacaaactccgccagatcctggagattgtcctggcctttggcaactacatgaacagtagcaagcgtggggcagcctatggcttccggctccagagcctggatgcgctgttggagatgaagtcgactgatcgcaagcagacgctgctgcactacctggtgaaggtcattgctgagaagtacccgcaactcacaggcttccacagcgacctgcacttcctggacaaggcgggctcagtgtccctggacagtgtcctggcggacgtgcgctccctgcagcgaggcctagagttgacacagagagagtttgtgcggcaggatgactgcatggtgctcaaggagttcctgagggccaactcgcccaccatggacaagctgctggcagacagcaagacggctcaggctgtgcccacaggaggcctttgagtctgtggtggagtacttcggagagaaccccaagaccacatccccaggcctgttcttctccctctttagccgcttcattaaggcctacaagaaagctgagcaggaggtggaacagtggaaaaaagaagccgctgcccaggaggcaggcgctgataccccgggcaaaggggagcccccagcacccaagtcaccgccaaaggcccggcggccacagatggacctcatctctgagctgaaacggaggcagcagaaggagccactcatttatgagagcgaccgtgatggggccattgaagacatcatcacagatctgcggaaccagccctacatccgcgcagacacaggccgccgcagtgcccgtcggcgtcccccgggccccccactgcaggtcacctccgacc

SEQ ID NO: 4305 - DNA, 2031 bp, Homo sapiens
  source 1..2031: mol_type = genomic DNA
atagagtagcggaagtggtccgttctcttcctctcccggcccaagcttctgggtatttctattgcgcgaggcattgtgggttgctgggcggcccggtctcggagaagaggggagagtggcgggccgctgaataagcttccaaaatgatgcattgctcattcttgaagtcgtcttcatcttctgtgcagaggcagcatagtacagcagttgagagtaaggcctctggagctacactgaatgcctagcccacaccagttatcctattgaaagaggggactgatagctcccaaggcatcccccagcttgtgagtaacatcagtgcctgccaggtgattgctgaggctgtaagaactaccctgggtccccgtggcatggacaagcttattgtagatggcagaggcaaagcaacaatttctaatgatggggccacaattctgaaacttcttgatgttgtccatcctgcagcaaagactttggtagacattgccaaatcccaagatgctgaggtgggtgatggcaccacctcagtgaccttgctggctgcagagtttctgaagcaggtgaaaccctatgtggaggaaggtttacacccccagatcatcattcgagctttccgcacagccacccagctggcagttaacaagatcaaagagattgctgtgaccgtgaagaaggcagataaagtggagcagaggaagctgctggaaaagtgtgccatgaccgctctgagctccaagctgatctcccagcagaaagctttctttgctaagatggtggtggatgcagtgatgatgctcgatgatttgctgcagcttaaaatgattggaatcaagaaggtacagggtggagccctcgaggattctcagctggtagctggtgttgcattcaagaagactttctcttacgctgggtttgaaatgcaacccaaaaagtaccacaatcccaagattgcccttttgaatgtcgagctcgagttgaaagctgagaaagacaatgctgagataagagtccacacagttgaggattatcaggcaattgttgatgctgagtggaacattctctatgacaagttagagaagatccatcattctggagccaaagttgtcttgtccaaactccccattggggatgtggccacccagtactttgctgacagggacatgttctgtgctggccgagtacctgaggaggatctgaagaggacaatgatggcctgtggaggctcaatccagaccagtgtgaatgctctgtcagcagatgtgctgggtcgatgccaggtgtttgaagagacccagattggaggcgagaggtacaatttttttactggctgccccaaggccaagacatgcaccttcattctccgtggcggcgccgagcagtttatggaggagacagagcggtccctgcatgatgccatcatgatcgtcaggagggccatcaagaatgattcagtggtggctggtggcggggccattgagatggaactctccaagtacctgcgggattactcaaggactattccaggaaaacagcagctgttgattggggcatatgccaaggccttggagattatcccacgccagctgtgtgacaatgctggctttgatgccacaaacattctcaacaagctgcgggctcggcatgcccaggggggtacatggtatggagtagacatcaacaacgaggacattgctgacaactttgaagctttcgtgtgggagccagctatggtgcggatcaatgcgctgacagcagcctctgaggctgcgtgcctgatcgtgtctgtagatgaaaccatcaagaacccccgctcgactgtggatgctcccacagcagcaggccggggccgtggtcgtggccgcccccactgagaggcaccccacccatcacatggctggctggctgctgggtgcacttaccctccttggcttggttacttcattttacaaggaaggggtagtaattggcccactctcttcttactggaggctatttaaataaaatgtaagacttcagataactttgtaaatt

SEQ ID NO: 4306 - DNA, 566 bp, Homo sapiens
  source 1..566: mol_type = genomic DNA
aaaactctctgaagtttttatttacccagcgctctggctcccacttctgttttaaaagattataagtaaatactctgctctttcaagtgaaccaaacctatcaaacctgtttagaaaataaaccaggctttcagtccagtgtaaagctgttggagcgcgggagcaaaggtaaagaatgatgtaatgcgctggctgctccaaagcatcttttgttgtggaatggttattccagtcatctctttatgaatcaaatgtgaggggctgctttgtggacggagtcctttgcaagagcacatcaacgggaaagagaaagagacattcacttggagggctcttgctgaaaatgggtttaactctccttttgccagtcaccaccagcctgacctcatacacttttagtacaatggagtggctgagcctttgagcacaccaccattacatcatcgtggcaaattaaagaaggaggtgggaaaagaggacttattgttgtcatggcccatgagatgattggaactcaaattgttactgagaggttggtggctctgctggaaagtggaacggaaaaa

SEQ ID NO: 4307 - DNA, 1651 bp, Homo sapiens
  source 1..1651: mol_type = genomic DNA
atggagaagactgagctgatccagaaggccgtggcctacaagaacgtggtcgggggccgcaggtccgcctggagggtcatctctagcatcgagcagaagaccgacacctccgacaagaagttgcagctgattaaggactatcgggagaaagtggagtccgagctgagatccatctgcaccacggtgctggaattgttggataaatatttaatagccaatgcaactaatccagagagtaaggtcttctatctgaaaatgaagggtgattacttccggtaccttgctgaagttgcgtgtggtgatgatcgaaaacaaacgatagataattcccaaggagcttaccaagaggcatttgatataagcaagaaagagatgcaacccacacacccaatccgcctggggcttgctcttaacttttctgtattttactatgagattcttaataacccagagcttgcctgcacgctggctaaaacggcttttgatgaggccattgctgaacttgatacactgaatgaagactcatacaaagacagcaccctcatcatgcagttgcttagagacaacctaacactttggacatcagacagtgcaggagaagaatgtgatgcggcagaaggggctgaaaactaaatccatacagggtgtcatccttctttccttcaagaaacctttttacacatctccattccttattccacttggatttcctatagcaaagaaacccattcatgtgtatggaatcaactgtttatagtcttttcacactgcagctttgggaaaacttcattccttgatttgtgtttgtcttggccttcctggtgtgcagtactgctgtagaaaagtattaatagcttcatttcatataaacataagtaactcccaaacacttatgtagaggactaaaaatgtatctggtatttaagtaatctgaaccagttctgcaagtgactgtgttttgtattactgtgaaaataagaaaatgtagttaattacaatttaaagagtattccacataacttcttaatttctacattccctcccttactcttcgggggtttcctttcagtaagcaacttttccatgctcttaatgtattcctttttagtaggaatccggaagtattagattgaatggaaaagcacttgccatctctgtctaggggtcacaaattgaaatggctcctgtatcacatacggaggtcttgtgtatctgtggcaacagggagtttccttattcactctttatttgctgctgtttaagttgccaacctcccctcccaataaaaattcacttacacctcctgcctttgtagttctggtattcactttactatgtgatagaagtagcatgttgctgccagaatacaagcattgcttttggcaaattaaagtgcatgtcatttcttaatacactagaaaggggaaataaattaaagtacacaagtccaagtctaaaactttagtacttttccatgcagatttgtgcacatgtgagagggtgtccagtttgtctagtgattgttatttagagagttggaccactattgtgtgttgctaatcattgactgtagtcccaaaaaagccttgtgaaaatgttatgccctatgtaacagcagagtaacataaaataaaagtacattttataaacc

SEQ ID NO: 4308 - DNA, 2035 bp, Homo sapiens
  source 1..2035: mol_type = genomic DNA
aaggcctaagccggcgccgagagagccagccgcgttacgatggagaccgaaagtggagaaaaggccagctgtgggcaaggagtgcacggccgccatcttggttgtgggaagtctcgtctaggctgtcctctctccagttgggaggaccaagatggagcgaaggatgaagtagcaagtgcacgtctttcttgggagcaggatgttgcgcaagtttacacttctgaccccatcacactgcttcccactgagatgcaagagacctgccccgaatacagtacaggagcatcttcaaagtacttccagtgggtgccctggacagcagctaagaaccccggggtaaaacgagtttcctctctactgttacaaatcagaaacctcctccgtaaaagcctcagatctgggaaacgcggatgcatatgccaacttttgagtctcagtctgcgcctgcgcacgtgacctctacacgtctcctctgcgcctgcgccgctcaagttagcgcgaggctactcagtcgagggtgggactacgcttcgcgttttgggattgggcgctgaaggccaaaccggacgacgcggaaatgacgtcacgccgggggccctgccgcgcggtggctgctgggtgccgcacgccttcccatcctcctcctctcccctcccccatccctccccgccccctcggccgctccgctccctggcgtgactcggcactgagagtcccgggagaagactcggcggtcgccacctcttctgtccaggcctcggccttcctgagcatctctccttcctctcccagatcgtcttctccttcagtttcaaagccagtggcgtcgcggccaccctgccgggctctctgtgaggatggtgggggtgaagcccgtcgggagcgacccggatttccagccagagctgagcggcgcgggctccagactcgccgtggtcaagttcaccatgagagggtgtgggccatgtttgaggattgccccagcattcagttctatgagtaataaatatccacaggctgttttcttggaagtcgatgtacatcagtgtcagtacttattcctttgaagataggaagatgttatgttgatgtcattattacagatgtcattatggctgcattagttaagaagagtagcacattattaattgcttcagggaacagctgccaccaacaatatatcagcaacacctacatttttgttttttcgaaacaaagtgagaattgatcaatatcaaggagcagatgctgtgggattagaagaaaaaatcaagcagcacttagaaaatgaccctggaagcaatgaggacacagatattccaaaaggctatatggatttaatgccttttattaacaaagctggttgtgaatgtcttaatgaaagtgatgagcatggatttgacaactgtttacgaaaagacacaaccttcttggaatctgactgtgatgaacagctgcttattactgtggcattcaatcaacctgttaagctttattccatgaaatttcaagggccagataatggtcagggccctaaatatgtaaaaatttttatcaacctaccccgatctatggattttgaagaggcagaaagaagtgaaccaactcaagctctggaactgacagaggatgatattaaagaagatggcattgttccacttcgttatgttaagtttcagaatgttaacagtgtaactatatttgttcagtcgaatcaaggtgaagaggaaacaacaagaatttcatattttacttttattggtactccagtccaggcaacaaatatgaatgacttcaaacgagtagttggcaaaaaaggagaaagccactaaggtacaaaagacactggacaaccatattgcaatcagatctacagctcctggataattgcttgattctcgccagagactgtcaatgtttcattcattgccattaccaataaatcattgcttttgttcagatggtatcactagtgtttccattgtaatcttgacacatgcaattgtaaataaaagtcaccacttttgccaagctt

SEQ ID NO: 4309 - DNA, 912 bp, Homo sapiens
  source 1..912: mol_type = genomic DNA
aggagcgtagaggcggcggcaaaatggcggcgcctgaggagcgggatctaacccaggagcagacagagaagctgctgcagtttcaggatctcactggcatcgaatctatggatcagtgtcgccataccttggaacagcataactggaacatagaggctgctgtacaggacagattgaatgagcaagagggcgtacctagtgttttcaacccacctccatcacgacccctgcaggttaatacagctgaccacaggatctacagctatgttgtctcaagacctcaaccaagggggctgcttggatggggttattacttgataatgcttccattccggtttacctattacacgatacttgatatatttaggtttgctcttcgttttatacggcctgaccctcgcagccgggtcactgaccccgttggggacattgtttcatttatgcactcttttgaagagaaatatgggagggcacaccctgtcttctaccagggaacgtacagccaggcacttaacgatgccaaaagggagcttcgctttcttttggtttatcttcatggagatgatcaccaggactctgatgagttttgtcgcaacacactctgtgcacctgaagttatttcactaataaacactagttctcattcattcttgcttttatgaaaaataaaagtgaaaaacctccatcaaccagctacttgcagcatctcctgaggacttgcttctcctgcctctggggaagagagggaagagaaagcacagagcagagaagcagagatgttccttgaactgcccacaagttttcaataacttttatttctgttttgtaatgaccaaaggaatgaggctgacataggtatatatatatatttttttcctttatttgataaagagccaattctttaaacccatg

SEQ ID NO: 4310 - DNA, 1652 bp, Homo sapiens
  source 1..1652: mol_type = genomic DNA
gaatccttccgcagctgcacgacgcctgtgtgtctggcctttccttcttcttctcttccccggcagcacagtgtggctgtttgtctccttgcccgccaaagttctgcccagtccaacgactccacgcagctcgcccttggcgaacagttgtctccaaacgtggtgttgccgtcagtggtcccaccaagaggaggggaatggcagattcactggagtcaacccccttgccttcccccgaagatcgtctggccaaactccatccttctaaggagctcctggaatattatcaaaagaagatggctgagtgtgaggcagaaaatgaggacttgctgaagaaactggaactctacaaagaagcttgtgaaggacagcataaacttgaatgtgatttgcagcagagggaggaagagattgctgaattgcagaaagctctaagtgatatgcaggtctgcctcttccaggaacgggaacatgttttacgcctctactcagaaaatgaccgactgagaatcagggagctagaagacaagaaaaagattcagaatctcttggctcttgtgggaacagatgctggagaagtgacctatttttgtaaggagcctcctcacaaagtcaccattctccaaaagactatccaggctgtaggtgaatgtgagcagagtgaatcttcagctttcaaagcagatcctaaaataagcaaaagaagaccatcgagagagagaaaagaaagttctgagcattaccaaagagacatacagacactcatcctacaggtggaagcactgcaggctcagctgggagagcagaccaaactttctcgagaacaaattgaagggctcatcgaggacagacggattcaccttgaggaaatacaagttcagcaccagagaaatcagaacaaaatcaaagagctaaccaaaaatcttcaccacacccaagaactgctctatgagagcaccaaagattttctgcaactcagatctgaaaaccaaaataaagagaagtcatggatgcttgaaaaagataatttgatgtcaaagattaagcaatatagggtgcagtgtaagaagaaagaagataaaattggaaaagtgttgcccgttatgcatgagagtcaccatgctcaaagtgaatatattaagtccctaaaagataagttagtacaagagaaaaagctgtccaatatgtaccaagagcagtgcatttccttagaagaagaacttgcccgaattcgtgaggaagagggaatgaggagagagatcttcaaggatcgcactaacaagatggggaagcgtttacagataatgacaaaacgctatgaggcattggagcgtcgacgtatcctggaagtagaaggctttaagacagatattaaagttctccgacagaaactgaaagacttggagcaaatgttgtataaggcaacagttaatgcccgggcaaaccaggatcttgcccttctgtgtgaggtccgtgacagcaatagacgggcacataagatacaaggagaactgaagaatcttaagtcgaaagtgtttggtctggagaatgaacttagactctgttaatgtctacttttggaaatggcccccatttagaagaggtgtgcttcttgaaacctgaggacaaggtcatctgctgccagaaaatgt

SEQ ID NO: 4311 - DNA, 548 bp, Homo sapiens
  source 1..548: mol_type = genomic DNA
acccgaattgccacgaggcttcctttaggggagggatcgggggagggatgggagcaaggctagcagaggagggtcggcatcgcctgtggttccgaagcccgttagtcatcgttgtagcgttatcaactgtggagacctcaaacttgattcttcccccacccctggacaaaaaggaaaagtgttatttctgtgcagtaattggccagcacggacgctccatttcttctcaaaccttcctcaccatcctgcaggactagagaagcatgaggtttccctgtaaccagaaaaacgaatgtttataaattcttctgtgggatcagagggcacgcctattacaaccagaaaactacaagtataacagcgaggatggatgaacaggctctattagggctaaatccaaatgctgattcagactttagacaaagggccctggcctattttgagcagttaaaaatttccccagatgcctggcaggtgtgtgcagaagctctagcccagaggacatacagtgatgatcatgtgaagtttttctgctttcaagtactgga

SEQ ID NO: 4312 - DNA, 561 bp, Homo sapiens
  source 1..561: mol_type = genomic DNA
aattcggtgagtgcggtccttggagtgggtctacagccaggtttcctaacccaggtaccggacctaccgggattgctgcgatctgtttagagcccgtgcagaaagtgacaccgcacgtccttgcgtttcgtgcccttgccccccgccccctagcctcagcgagacagctgccgcgggccctcccgcagcaggcagtttggagcatgtgaacaccttgagccttgatgagttccagtatgtggtatattatgcagagcattcagagcaaatactctctctccgagcgcttaatccgaacaattgctgccatccgttccttcccacatgataatgtagaggacctcatcagagggggagcagatgtgaactgcactcatggcacactgaagcccttgcactgtgcctgtatggtgtcagatgctgactgtgtggagttacttctggaaaaaggagccgaggtgaatgccctggatgggtataaccgaacagccctccactatgcagcagagaaagatgaggcttgtgtggaggtcctattggagtatggtgcaaaccccaatg

SEQ ID NO: 4313 - DNA, 3268 bp, Homo sapiens
  source 1..3268: mol_type = genomic DNA
tcagtcggcctgcgctcctcagcctggcggttctacctccgagggttcgcccgcccttggttttccttacaccttagcctttggctcctttgaccactcgaagccccacagcgtgttccagcggacttcaccagcagacccagaagtggtgggtgaaacactgcctctgttcctccttgagcctgtcgggagctgctgcctgccaccaccatgtctgctgcaaatcctgagactccaaactcaaccatctccagagaggccagcacccagtcttcatcagctgcagctagccaaggctgggtgttaccagaaggcaaaatcgtgccaaacactgtttttgttggtggaattgatgctaggatggatgaaactgagattggaagctgctttggtagatacggttcagtgaaagaagtgaagataatcacgaatcgaactggtgtgtccaaaggctatggatttgtttcgtttgttaatgacgtggatgtccagaagatagtaggatcacagatacatttccatggtaaaaagctgaagctgggccctgcaatcaggaaacaaaagttatgtgctcgtcatgtgcagccacgtcctttggtagttaatcctcctcctccaccacagtttcagaacgtctggcggaatccaaacactgaaacctacctgcagccccaaatcacgccgaatcctgtaactcagcacgttcaggcttactctgcttatccacattcaccaggtcaggtcatcactggatgtcagttgcttgtatataattatcaggaatatcctacttatcccgattcagcatttcaggtcaccactggatatcagttgcctgtatataattatcagccatttcctgcttatccaagatcaccatttcaggtcactgctggatatcagttgcctgtatataattatcaggcatttcctgcttatccaaattcaccatttcaagtcgccactggatatcagttccctgtatacaattatcagccatttcctgcttatccaagttcaccatttcaggtcactgctggatatcagttgcctgtatataattatcaggcatttcctgcttatccaaattcaccatttcaagtcgccactggatatcagttccctgtatacaattatcaggcatttcctgcttatccaaattcaccagttcaggtcaccactggatatcagttgcctgtatacaattatcaggcatttcctgcttatccaaattcagcagttcaggtcaccactggatatcagttccatgtatacaattaccagatgccaccgcagtgccctgttggggagcaaaggagaaatctgtggaccgaagcatacaaatggtggtatcttgtctgtttaatccagagaagagactgataaattccgttgttactcaagatgactgcttcaagggtaaaagagtgcatcgctttagaagaagtttggcagtatttaaatctgttggatcctctcagctatctagtttcatgggaagttgctggttttgaatattaagctaaaagttttccactattacagaaattctgaattttggtaaatcacactgaaactttctgtataacttgtattattagactctctagttttatcttaacactgaaactgttcttcattagatgtttatttagaacctggttctgtgtttaatatatagtttaaagtaacaaataatcgagactgaaagaatgttaagatttatctgcaaggatttttaaaaaattgaaacttgcattttaagtgtttaaaagcaaatactgactttcaaaaaagtttttaaaacctgatttgaaagctaacaattttgatagtctgaacacaagcatttcacttctccaagaagtacctgtgaacagtacaatatttcagtattgagctttgcatttatgatttatctagaaatttacctcaaaagcagaatttttaaaactgcatttttaatcagtggaactcaatgtatagttagctttattgaagtcttatccaaacccagtaaaacagattctaagcaaacagtccaatcagtgagtcataatgtttattcaaagtattttatcttttatctagaatccacatatgtatgtccaatttgattgggatagtagttaggataactaaaattctgggcctaattttttaaagaatccaagacaaactaaactttactgggtatataaccttctcaatgagttaccattcttttttataaaaaaaattgttccttgaaatgctaaacttaatggctgtatgtgaaatttgcaaaatactggtattaaagaacgctgcagcttttttatgtcactcaaaggttaatcggagtatctgaaaggaattgtttttataaaaacattgaagtattagttacttgctataaatagatttttatttttgttttttagcctgttatatttccttctgtaaaataaaatatgtccagaagaggcatgttgtttctagattaggtagtgtcctcattttatattgtgaccacacagctagagcaccagagcccttttgctatactcacagtcttgttttcccagcctcttttactagtctttcaggaggtttgctcttagaactggtgatgtaaagaatggaagtagctgtatgagcagttcaaaggccaagccgtggaatggtagcaatgggatataatacctttctaagggaaacatttgtatcagtatcatttgatctgccatggacatgtgtttaaagtggctttctggcccttctttcaatggcttcttccctaaaacgtggagactctaagttaatgtcgttactatgggccatattactaatgcccactggggtctatgatttctcaaaattttcattcggaatccgaaggatacagtctttaaactttagaattcccaagaaggctttattacacctcagaaattgaaagcaccatgactttgtccattaaaaaattatccatagtttttttagtgcttttaacattccgacatacatcattctgtgattaaatctccagatttctgtaaatgatacctacattctaaagagttaattctaattattccgatatgaccttaaggaaaagtaaaggaataaatttttgtctttgttgaagtatttaatagagtaaggtaaagaagatattaagtccctttcaaaatggaaaattaattctaaactgagaaaaatgttcctactacctattgctgatactgtctttgcataaatgaataaaaataaactttttttcttc

SEQ ID NO: 4314 - DNA, 2224 bp, Homo sapiens
  source 1..2224: mol_type = genomic DNA
gccgcatcttccaccctcgccgccgccgcagctccccgcgctcgtgccaccgccgccgcgtccaccctcagcgccaccgccatgcgggagatcgtgcacctgcaggccggccagtgcggcaaccagatcggggccaagttttgggaggttatcagtgacgaacatggcatcgaccccacaggcacataccatggggacagtgacctgcaactggagaggatcaacgtgtactacaacgaggccacaggaggaaattatgtccccagagcggtgctggtggacctggaacccggcaccatggactctgtccgttctggccccttcggtcagatctttcggccggacaacttcgtgtttggccaatccggagccggcaacaactgggcaaaggggcactacacggagggcgcagagctggtggacgctgtcctggacgtagtccggaaggaggccgagagctgcgactgccttcagggcttccagctgacccactcgctggggggtggcacggggtccggaatgggcacgctgctcatcagtaagatccgcgaggagttcccagaccgcatcatgaacaccttcagcgtggtgccctcgcccaaagtgtcagacacggtggtggagccctacaacgccacgctgtctgtgcaccagctggtggagaatacggatgagacctactgcatcgacaacgaggcactctacgacatctgtttccgcaccctcaagctgaccacccccacctacggggacctcaaccacctggtgtcggccaccatgagcggggtcaccacctgcctgcgcttcccgggccagctgaacgccgacctgcgcaagctggccgtcaacatggttccctttcctcgcctgcacttcttcatgcccggcttcgcacccctgaccagccggggcagccagcagtaccgggccctgacggtgcccgagctcacccagcagatgttcgatgccaagaacatgatggcggcgtgcgacccgcgccacggccgctacctgaccgtggccgccgtgttccggggccgcatgtccatgaaggaggtggacgagcagatgctgagcgtgcagagcaagaacagcagctacttcgtggagtggatccccaacaacgtgaagacggccgtgtgcgacatcccgccccgcggcctgaagatggccgcgaccttcatcggcaacagcacggccatccaggagctgttcaagcgcatctccgagcagttcacggccatgttccggcgcaaggccttcttgcactggtacacgggcgagggcatggacgagatggagttcaccgaggccgagagcaacatgaatgacctggtatctgagtaccagcagtaccaggacgccacggccgaggagggcgagttcgaggaggaggcggaggaggaggtggcctaggctgctcccatcgcttcccacctgtcccctcgaggcttctgacctttgatccgctaggccccccatctctgaaccctagagccccgctttccctccaaggctgactccccgctgaccctaacaatacctttggagctcgctttacctctggctacttcatctccgaccctggctcccctttgagccctaatttatctttaacccccttgagctcttccaaccttgacattcccaggaggagccccgcttcaccccttctgactctggaaaccgcacctttaactttgcagaccttccttcacccctgacttctgcttcacctttgacctctgccccccatgaatcccattttacctctagacctataagttctggtttatgtttgacccctccctctgagctgcacttcaccgctgaccttgcctcacctttaaccccccacctgagccccagctcctacctctgactccaacttctctttcaccctctatgagtcccattttacttctacacctgcaagtcctggtttatattggacccctccctccgagctgcagttcacctttgaccttgcctcacctttcaccccccaccccccacagcgtcagctcctacctctgaccccagcttctctctgattcccacaggccccatgcatcctccctgcctcactcccctcagcccctgccgaccttagcttatctgggagagaaacaaggcctggtgcctgtgaggaagagaggtcacccctaccctccctccccgcttccctgcctcaccctcaataaataaattaattgttgtcatg

SEQ ID NO: 4315 - DNA, 785 bp, Homo sapiens
  source 1..785: mol_type = genomic DNA
actataaagacagtaaaaagatcagtggttatctttgcagacgccaccatcactgtgagccctgtactatcagccatggtcaactccgtcgtcttttttgacatcaccgtcgacggcaagcccttgggccgcatctccatcaaactgtttgcagacaagattctaaagacagcggaaaactttcgtgctctgagcactggagagaaaggatttcgttataagggttcctgctttcacagaattattccagggtttatgtgtcagggtggtgacttcacacgccataatggcactggtgacaagtccatctatggggagaaatttgatgatgagaacctcatccgaaagcatacaggttctggcatcttgtccatggcaaatgctggacccaacacaaatggttcccagtttttcatctgtgctgccaagactgagtggttggatggcaagcatgtggcctttggcaaggtgaaagaacgtgtgaatattgtggaagccatggagcactttgggtacaggaatagcaagaccagcaagaagatcaccattgctgactgtggacaattctaatgagtttgacttgtgttttattttcaccaccagacccattccttctgtagctcaggagagcacccctccaccacatttgcttgcaatatcctagaatctttgtgctcttgctgcagttccctttgggttccatgttttccttgttcccttccatgcctagctggattgcagagttgagttaagtttatgattatgaaataaaaactaagtaacaa

SEQ ID NO: 4316 - DNA, 3468 bp, Homo sapiens
  source 1..3468: mol_type = genomic DNA
agcacgggctgccgcggcagcagcggcggagcagcagagaggccggggagcggcggctggctcacgcgcgtcgcgcgggccgggatgagggactgtggcggcgcggcccgcgcgcagccggccgtgcggcaccttcccgtctgatgctggcgttgtgcgtatggtgccctgacgtctgtccacgtgggcgcggaagcaaacagcgatgtcccagacgcaggactacgagtgcaggagccataatgtcgacctgccggagtcgaggattccagggtcgaacactcggttggagtgggtggagatcatcgaaccgcgcacccgcgagcgcatgtacgccaacctggtcaccggtgagtgcgtgtgggacccgccggccggcgtccgcatcaagcgcaccagcgagaaccagtggtgggagctgttcgaccccaacacgtcccgcttctactactacaatgccagcacgcagcgcacggtgtggcaccggccgcagggctgcgacatcatcccgctggccaagctgcagacgctgaagcagaacacggagtccccgcgcgcctcggcggagagcagccccgggcgcggcagcagcgtcagccgtgagggcagcaccagctcctccctggagcccgagcccgacactgagaaagcgcaggagttgccagcgagggccgggcggcccgcggcgtttgggacagtgaaggaggacagcggcagctcttcaccaccaggagtgttccttgagaaggactatgagatttaccgggattacagtgcggacggccagcttcttcactacaggacctcctcgctgcggtggaactcgggcgccaaagagcgcatgctcatcaaggtcgctgatcgggagcccagcttcctcgccgcccagggcaatggctacgccccagacggcccacctggggtccgctcccgcagaccctccggcagccagcactcacccagcctgcagaccttcgccccggaggctgacggcaccatcttcttcccagagaggaggccgtcacccttcctgaagagggccgagctcccagggagcagctccccgctgctggcccagccccgaaagccctccggggactcgcagccctcctccccgcgctatggctatgaacccccgctctacgaggagcccccagtggagtaccaggcccccatctacgatgagccccccatggacgtgcaattcgaggctggcgggggctaccaggccggctctccccagcggtcgccgggccgtaagccccggccgttcctccagcccaacaagcagggccccccctcgccctgccagcagctggtgctcaccaagcagaagtgtcccgagcgcttcctgagcctggagtacagtcccgccggcaaggagtacgtgcggcagctggtctacgtggagcaggcgggctccagccccaagctgcgcgccggcccgcggcacaagtacgcgcccaaccccggcggtggttcgtactccttgcagcccagcccctgcctgctgagggaccagcgcctgggcgtcaagtccggagactacagcaccatggagggacctgagctgcggcacagccagccgcccacgccgctgccacaggcccaggaggatgccatgtcctggtccagccagcaggacaccctgtcctccacaggctactccccgggcacgcgcaagcggaagagcagaaagccctctttgtgccaagccaccagcgccacccccactgagggccccggggacctgcttgtggagcagcccctggccgaggaacagcccccgtgcgggaccagcctcgcccccgtgaagcgagcggaaggtgaggccgaaggggcgcggggcgcggccgagcccttcctggcgcaggctcggctggcctgggaggcgcagcaggcccacttccacatgaagcagaggagcagctgggactcccagcaggacggctctggctacgagagcgacggcgccctgccactgcccatgcccgggccggtggtgcgggccttcagcgaggacgaggcgctggcccagcaggagaacaggcactggaggaggggcaccttcgagaagctaggcttcccccagatcctgctggagaagagcgtctccgtgcagaccaacctggcctcaccagagccctacctccacccctcacagtctgaggacctcgctgcctgtgcccagttcgagagcagccggcagagccgcagcggcgttcccagctccagctgcgtcttccccactttcacgctgcgcaagccctcctcggagacggacatcgagaactgggcctccaagcacttcaacaagcacacgcagggcctcttccggcggaaggtgtccatcgccaacatgctggcctggagcagcgagtccatcaagaagcccatgatcgtgacaagcgaccggcacgtgaagaaggaggcctgcgagctcttcaagctgatccagatgtacatgggtgaccggcgggccaaggccgacccactgcacgtggccctggaggtggccaccaagggctggagcgtgcagggcctgcgggacgagctctacatccagctgtgccggcagaccaccgagaacttccgcctggagagcctggcccgcggctgggagctcatggccatctgcctggcctttttcccgcccacccccaagttccactcctacctggaaggctacatctaccggcacatggaccccgtcaatgacactaaaggggtggcgataagcacgtatgccaagtactgttaccacaagctacagaaggcagccctgaccggggccaagaaggggctgaagaagcccaacgtggaggagatccggcatgccaagaacgccgtgttcagcccgtccatgttcggcagcgcactgcaggaggtcatgggcatgcagagagagcgctaccccgagcgccagctgccctgggtgcagacacggctctctgaggaggtgctggcgctcaacggtgaccagacagagggcatcttcagggtccctggggacattgacgaggtgaatgccctgaagctgcaggtggaccagtggaaggtgcccacaggcctggaagacccccacgtccctgcgtccctgctgaagctgtggtaccgggagctggaggagcccctgatcccgcacgagttctacgagcagtgcatcgcgcactacgacagccccgaggcggcggtggccgtggtgcacgcgctgccccgcatcaaccgcatggtgctgtgctacctcatccgcttcctgcaggtcttcgtgcagccggccaacgtcgcggtcaccaagatggatgtcagcaacctggccatggtgatggcgcccaactgcttgcgctgccagtccgacgacccgcgcgtcatcttcgagaacacccgcaaggagatgtccttcctgcgggtgctcatccagcacctggacaccagcttcatggagggtgtgctgtagcgggggcgccc

SEQ ID NO: 4317 - DNA, 1894 bp, Homo sapiens
  source 1..1894: mol_type = genomic DNA
ggatagttcctcccggccacgccgcgccggctctgggcactcagcatcgtttccttttcctccgctggagcagctatggcggcggtgaagaccctgaaccccaagggcaccatgaagatgctcgtttctggcgctggagacatcaaacttactaaagacggcaatgtgctgcttcacgaaatgcaaattcaacacccaacagcttccttaatagcaaaggtagcaacagcccaggatgatataactggtgatggtacgacttctaatgtcctaatcattggagagctgctgaaacaggcggatctctacatttctgaaggccttcatcctagaataatcactgaaggatttgaagctgcaaaggaaaaggcccttcagtttttggaagaagtcaaagtaagcagagagatggacagggaaacacttatagatgtggccagaacatctcttcgtactaaagttcatgctgaacttgcagatgtcttaacagaggctgtagtggactccattttggccattaaaaagcaagatgaacctattgatctcttcatgattgagatcatggagatgaaacataaatctgaaactgatacaagcttaatcagagggcttgttttggaccacggagcacggcatcctgatatgaagaaaagggtggaggatgcatacatcctcacttgtaacgtgtcattagagtatgagaaaacagaagtgaattctggctttttttacaagagtgcagaagagagagaaaaactcgtgaaagctgaaagaaaattcattgaagatagggttaaaaaaataatagaactgaaaaggaaagtctgtggcgattcagataaaggatttgttgttattaatcaaaagggaattgaccccttttccttagatgctctttcaaaagaaggcatagttgctctgcgcagagctaaaaggagaaatatggagaggctgactcttgcttgtggtggggtagccctgaattcttttgacgacctaagtcctgactgcttgggacatgcaggacttgtatatgagtatacattgggagaagagaagtttacctttattgagaaatgtaacaaccctcgttctgtcacattattgatcaaaggaccaaataagcacacactcactcagatcaaagatgcagtgagggacggcttgagggctgtcaaaaatgctattgatgatggctgtgtggttccaggtgctggtgccgtggaagtggcaatggcagaagccctgattaaacataagcccagtgtaaagggcagggcacagcttggagtccaagcatttgctgatgcattgctcattattcccaaggttcttgctcagaactctggttttgaccttcaggaaacattagttaaaattcaagcagaacattcagaatcaggtcagcttgtgggtgtggacctgaacacaggtgagccaatggtggcagcagaagtaggcgtatgggataactattgtgtaaagaaacagcttcttcactcctgcactgtgattgccaccaacattctcttggttgatgagatcatgcgagctggaatgtcttctctgaaaggttgaattgaagcttcctctgtatctgaatcttgaagactgcaaagtgatcctgaggattacagctgtggaatttttgtccaagcttcaaataattttgaaagaaattttcccatatgaaaaaaggagagaacactggcatctgttgaaatttggaagttctgaaattatagtatttttaaaaattgcactgaagtgtatacacataaagcaggtcttttatccagtgaacaggatgttttgctttagcagcagtgacataaaattccatgttagataagcatatgttacttaccttgttattaaatatttcttgaaaagc

SEQ ID NO: 4318 - DNA, 2315 bp, Homo sapiens
  source 1..2315: mol_type = genomic DNA
tgggctccttcctcatcaaaccagtacagagagtaatgcgttacccgctgttgctaatggagttgctgaattccaccccagaatcccacccagataaagtgcctttaaccaatgcagtccttgcggtcaaggaaatcaacgttaacattaatgaatataaacggcgaaaggacctggataaaagatgaagtatttgaagaaacagaaaaaaacttccgaatgcaagaaagattgattaagtcttttatccgagacctgtctctctacctccagcacatccggttcattttatcaaaaccagtttgaaaatcaaatattgaatgcaaaagctaggaagctgtaaacaggaaacgtaaacgagaaagaacaagcagtgaatacgagagtccgcatgtgtgaaagtggtggctgctgtgagcatgtgggatgtgtgcatggagagaggacaccgggacctggagcagtttgagagggtgcatcgctacatcagtgaccagctcttcacaaactttaaggagaggacagagcggcttgtcatctcccccttaaatcagttactgagcatgtttacagggccccataagctggtacagaaacgctttgacaagctcctggacttctataactgtacagaacgggcagaaaagctaaaggacaagaagaccctggaggagctgcagtcggcccggaacaactatgaggccctgaatgcacagctgctggatgagctgcccaagttccaccagtacgcccagggcctcttcaccaactgtgtccacggctatgctgaagcccactgtgactttgtgcaccaggctctggagcaattaaagccactgctttcgttactcaaagtggctggcagagagggaaaccttattgccatcttccacgaagagcacagcagagttctgcagcaactccaggtttttaccttcttcccggagtctcttccagctaccaagaagccatttgagaggaaaaccattgaccgccagtctgctcgaaagccactcctgggcctgccaagttacatgctacagtcagaagaactccgggcctccctcctggccaggtatccccctgaaaaactcttccaggcagaacggaacttcaatgctgctcaagacttggatgtctcacttttggaaggtgacctggtgggtgtgattaagaaaaaagaccccatgggcagccagaaccgctggctgattgacaatggagtcaccaaaggcttcgtgtacagctctttcctaaagccctacaatcctcgccgcagccactccgatgcctccgtgggtagccactcctccacagagtctgagcacggcagctcctcccccaggttcccacgccagaacagcggcagcaccctgaccttcaaccccagcagcatggctgtatcctttacctcggggtcttgccagaagcagcctcaagatgcatctcctccgccaaaagaatgtgaccaaggaactctcagtgcatccctaaatccgagtaattcagagagtagtccttccagatgcccttcagacccagactccacctcccagccaaggtcaggggactctgcagatgtagctagagatgtaaagcaacccactgccacgccgaggagctaccggaacttcaggcatccagaaatagttggctactccgtaccaggacgaaatgggcaaagtcaagacctcgtcaaaggatgtgcaagaacagcccaggctccggaagacagaagtacagagccagatggcagtgaggcagaaggcaaccaggtctattttgctgtctacaccttcaaggcacgaaacccaaatgagctgagcgtgtcagccaatcagaaactcaagatcctcgagtttaaagatgttacaggaaatacagagtggtggttagctgaggttaacgggaagaagggctacgttccctccaattatatccgcaaaaccgagtacacctgagcccacgttgcctgccacccagccttgctgcctttgctttcagtccgccgagggttctggcggcccaccgagagggcgcctgctcctgagacacaggccctgtctgcgttgcttaaccatggcatggtggagcacaccacagatcttgttctcctcgattgggttgtaaaccttgatgctcactagaatctctagaatttgaaatggaccctggggctttgcaaatgacttagtgactatgagaagagagacaagtcttagagctggcttttggaaaggagaaacttgcagtcagaagcccagtgtcctatgtatgcaggaagctgtgctctagcaatagacagtgttggtaat

SEQ ID NO: 4319 - DNA, 1042 bp, Homo sapiens
  source 1..1042: mol_type = genomic DNA
attccgcgcttggcaacggctcggcgtcgcgctttggccaaccgctgcgtcgtccctgggcccgaataactgtcgcccgcttccctcagcgtgaggtacaaatgatgcaaaatgtgcacctggctccagagacagatgaagatgatctttattccggctataatgactacaatccaatctatgatatcgaggaattggagaatgatgcagcttttcagcaagctgtgaggactagtcatggcagaagacctccaataactgctaaaatatcaagcacggcagttactagacctatagctactggatatgggtccaagacatctctggcatcatcaataggaagaccaatgacaggggctattcaggatggagttactagacccatgacagcagtgagagcagctggttttaccaaagcagctttgagagcccagaggaaaaaataaagcaattagagaaggaagtaaatgagttggtagaagaaagctgtattgccaatagttgtggagacttaaaattggccttagaaaaggcaaaagatgcaggaagaaaagagagagtcctggtgagacagcgagaacaagttacaactccagaaaatatcaatttggatttaacttactcagttcttttcaatttggccagtcagtattcagttaatgaaatgtatgccgaagcacttaacacttatcaagttatagtcaaaaataagatgtttagcaatgcaggattaaaataatgcagaatattggagttacatttattcaggctggtcagtattcagatgctattaattcatatgagcacataatgagcatggcaccaaatctgaaggcaggctacaacctaactatctgttattttgctattggagaccgagaaaaaatgaagaaggcattccaaaaattgattactgttccattagaaattgatgaagataaatatatttcaccaagtgatgatcctcatactaacttagtaactgaagctataaaaaatgatcacctcaggcaaatggaacgtgaaaggaaagccatggcag

SEQ ID NO: 4320 - DNA, 4400 bp, Homo sapiens
  source 1..4400: mol_type = genomic DNA
tggcaacaggcaaaggagaaacagctctgacatacaaagaaaatgagtatgctaaagccaagtgggcttaaggcccccaccaagatcctgaagcctggaagcacagctctgaagacacctacggctgttgtagctccagtagaaaaaaccatatccagtgaaaaagcatcaagcactccatcatctgagactcaggaggaatttgtggatgactttcgagttggggagcgagtttgggtgaatggaaataagcctggatttatccagtttcttggagaaacccagtttgcaccaggccagtgggctggaattgttttagatgaacccataggcaagaacgatggttcggtggcaggagttcggtatttccagtgtgaacctttaaagggcatatttacccgaccttcaaagttaacaaggaaggtgcaagcagaagatgaagctaatggcctgcagacaacgcccgcctcccgagctacttcaccgctgtgcacttctacggccagcatggtgtcttcctccccctccaccccttcaaacatccctcagaaaccatcacagccagcagcaaaggaaccttcagctacgcctccgatcagcaaccttacaaaaactgccagtgaatctatctccaacctttcagaggctggctcaatcaagaaaggagaaagagagctcaaaatcggagacagagtattggttggtggcactaaggctggtgtagtccggtttcttggggagaccgactttgccaagggggagtggtgtggcgtggagttagatgagccacttgggaagaatgatggcgctgttgctggaacaaggtattttcagtgtcaacccaaatatggcttgttcgctcctgtccacaaagttaccaagattggcttcccttccactacaccagccaaagccaaggccaacgcagtgaggcgagtgatggcgaccacgtccgccagcctgaagcgcagcccttctgcctcttccctcagctccatgagctcagtggcctcctctgtgagcagcaggcccagtcggacaggactattgactgaaacctcctcccgttacgccaggaagatctccggtaccactgccctccaggaggccctgaaggagaagcagcagcacattgagcagctgctggcggaacgggatctggagagggcggaggtggccaaggccacgagccacgtgggggagatagagcaggagctagctctggcccgggacggacatgaccagcatgtcctggaattggaagccaaaatggaccagctgcgaacaatggtggaagctgctgacagggagaaggtggagcttctcaaccagcttgaagaggagaaaaggaaggttgaggaccttcagttccgggttgaagaagaatcaattaccaaaggtgatcttgagcaaaagagccagatttctgaagatcctgagaatacgcagaccaaactggagcatgcccgcattaaggagcttgaacagagcctgctctttgaaaagaccaaagctgacaaactccagagggagttagaagacactagggtggctacagtttcagaaaagtcacgtataatggaactggagaaagacctagcattgagagtacaggaagtagctgagctccgaagaaggctagagtccaataagcctgctggggatgtggacatgtcactttcccttttgcaagagataagctctttgcaagaaaagttagaagtcacccgtactgaccaccagagagaaataacttctctgaaggagcattttggagcccgggaagaaactcatcagaaggagataaaggctctgtataccgccacggaaaagctttccaaagagaacgagtcattgaaaagcaagctggagcatgccaacaaagagaactcagatgtgatagctctatggaagtccaaactggagactgccatcgcatcccaccagcaggcgatggaagaactgaaggtatctttcagcaaagggcttggaacagagacggcagaatttgctgaactaaaaacacaaatagagaaaatgagactagattaccaacacgaaatagaaaatttgcagaatcaacaagactctgaacgggctgcccatgctaaagagatggaagccttgagggctaaactgatgaaagttattaaagaaaaggaaaacagtctggaagccatcaggtcgaaactggacaaagcagaagaccagcatctcgtagaaatggaagacacgttaaacaaattacaggaagctgaaataaaggtaaaggagctagaggtactgcaagccaaatgcaatgaacaaaccaaggttattgataattttacatcacagctcaaggctactgaagaaaagctcttggatcttgatgcacttcggaaagccagttccgaaggtaaatcggaaatgaagaaacttagacagcagcttgaggcagctgagaaacagattaaacatttagagattgaaaagaatgctgaaagtagcaaggctagtagcattaccagagagctccaggggagagagctaaagcttactaaccttcaggaaaatttgagtgaagtcagtcaagtgaaagagactttggaaaaagaacttcagattttgaaagaaaagtttgctgaagcttcagaggaggcagtctctgttcagagaagtatgcaagaaactgtaaataagttacaccaaaaggaggaacagtttaacatgctgtcttctgacttggagaagctgagagaaaacttagcagatatggaggcaaaatttagagagaaagatgagagagaagagcagctgataaaggcaaaggaaaaactggaaaatgacattgcagaaataatgaagatgtcaggagataactcttctcagctgacaaaaatgaacgatgaattacgtctgaaagaaagagatgtagaagaattacagctaaaacttacaaaggctaatgaaaatgcaagttttctgcaaaaaagtattgaggacatgactgtcaaagctgaacagagccagcaagaagcagctaaaaagcatgaggaagaaaagaaagaattggagaggaaattgtcggacctggaaaagaaaatggaaacaagccacaaccagtgtcaggagctgaaagccaggtatgagagagccacttctgagacaaaaaccaagcatgaagaaatcctacagaacctccagaagacgctgctggacacagaggacaagctgaagggcgcacgggaggagaacagtggcttgctgcaggagctggaggagctgagaaagcaagccgacaaagccaaagctgctcaaacagcggaagatgccatgcagataatggaacagatgaccaaagagaagactgagactctggcctccttggaggacaccaagcaaacaaatgcaaaactacagaatgaattggacacacttaaagaaaacaacttgaaaaatgtggaagagctgaacaaatcaaaagaactcctgactgtagagaatcaaaaaatggaagaatttaggaaagaaatagaaaccctaaagcaggcagcagctcagaagtcccagcagctttcagcgttgcaagaagagaacgttaaacttgctgaggagctggggagaagcagggacgaagtcacaagtcatcaaaagctggaagaagaaagatctgtgctcaataatcagttgttagaaatgaaaaaaagagaatccaagttcataaaagacgcagatgaagagaaagcttccttgcagaaatccatcagtataactagtgccttactcacagaaaaggatgccgagctggagaaactgagaaatgaggtcacagtgctcaggggagaaaacgcctctgccaagtccttgcattcagttgttcagactctagagtctgataaggtgaagctcgagctcaaggtaaagaacttggagcttcaactcaaagaaaacaagaggcagctcagcagctcctcaggtaatacagacactcaggcagacgaggatgaaagagcccaggagagtcagattgatttcctaaattcagtaatagtggaccttcaaaggaagaatcaagacctcaagatgaaggtggagatgatgtcagaagcagccctgaatgggaacggggatgacctaaacaattatgacagtgatgatcaggagaaacagtccaagaagaaacctcgcctcttctgtgacatttgtgactgctttgatctccacgacacagaggattgtcctacccaggcacagatgtcagaggaccctccccattccacacaccatggcagtcggggtgaggaacgcccatactgtgaaatctgtgagatgtttggacactgggccaccaactgcaatgacgacgaaaccttctgatgaagcctccagtggagaactgggcttgctcagacgcactc

SEQ ID NO: 4321 - DNA, 636 bp, Homo sapiens
  source 1..636: mol_type = genomic DNA
atggcctttgcagactctcatttatggaaactcctggatcggcatgcaaatacaatcagattatttgttttgctacctgaacaatccccagtatcttattccaaaaggacagcataccagaaagctggaggcgattctggtaatgtggatgatgactgtgaaagagtcaaaggacctgtaggaagcctaaagtctgtggaagctattctagaagaaagcactgaaaaactcaaaagcttgtcactgcagcaacagcaggatggagataatggggacagcagcaaaagtactgagacaagtgactttgaaaacatcgaatcacctctcaatgagagggactcttcagcatcagtggataatagagaacttgaacagcatattcagacttctgatccagaaaattttcagtctgaagaacgatcagactcagatgtgaataatgacaggagtacaagttcagtggacagtgatattcttagctccagtcatagcagtgatactttgtgcaatgcagacaatgctcagatccctttggctaatggacttgactctcacagtatcacaagtagtagaagaacgaaagcaaatagggaaaaaagaaacatgggatacagcagaagaagactctggaactga

SEQ ID NO: 4322 - DNA, 2280 bp, Homo sapiens
  source 1..2280: mol_type = genomic DNA
actgaccccgctgtaccacggccctcttgcggacagccccggggacgtcgttgggacatcgctgggaccccgggctctgcagccacaaccatgtttggccggaagcgcagtgtctcctttgggggcttcggatggatcgacaagaccatgctggcaagtctgaaggtcaagaagcaggagctggccaacagctcggatgcgaccctcccagaccggccgctctcccctcctctcacggcacctcccaccatgaagtcgtcggagttctttgagatgctggagaaaatgcaggggatcaagcttgaagagcagaagccgggaccccagaagaacaaggacgactatatcccataccccagcatcgacgaggttgtggagaagggaggcccgtaccctcaggtcatcctgccacagtttgggggctattggatcgaggacccggagaacgtgggcaccccaacatcgctggggagcagcatctgtgaggaggaggaagaggacaacctcagccccaacacatttggctacaagctcgagtgcaagggtgaagccagggcctaccggaggcacttcctggggaaggatcatctaaacttttactgtaccggcagcagcctggggaacttgatcctgtccgtcaagtgcgaggaagcagaggggatcgagtacctccgggtcatccttaggtccaaactgaagacggtacatgagcggatccccttggctggactgagcaagcttcccagtgtccctcagattgcaaaggctttctgtgatgatgcagtgggactgagattcaatcctgtcctgtaccccaaggcctcccaaatgattgtgtcctatgatgagcatgaagtcaacaacacattcaaattcggagtcatttatcaaaaagccaggcagaccctggaggaggagctatttgggaacaatgaggagagcccagcttttaaggagttcttggacctgctgggggacacgatcacactgcaggatttcaaaggtttccgaggaggcctggacgtgacccacggacagacaggggtggaatcagtgtacacaacattccgggacagggagatcatgtttcacgtttccacaaagctgccatttaccgacggagacgcccagcagctccagagaaagagacacattggaaatgacatcgtggccatcatcttccaagaggaaaacacgccgtttgtcccagacatgatagcctccaatttcttacatgcctacatcgtcgtgcaggtcgagaccccaggcacagagaccccatcctacaaggtctctgtcactgcgcgggaagatgtgcccacctttggtccacctctgcccagtccccccgttttccagaagggcccggaattcagggagtttctgctcaccaagctcaccaatgccgagaacgcctgctgcaagtcggacaagtttgcaaagctggaggaccggaccagggctgccctcctggacaaccttcacgatgagctccacgcccacacacaggccatgctgggactgggcccagaggaggacaagtttgagaatggaggccacggggggttcctggagtcttttaagagggccatccgcgtacgcagccactccatggagaccatggtgggcggccagaagaagtcgcacagtgggggcatccctggcagcctcagcgggggcatctcccacaacagcatggaggtcaccaagaccaccttctcgcctccagtggtggcggcaacggtgaagaaccagtcacggagtcccatcaagcgacgctcggggctcttcccccgcctgcacacgggctcagaaggccagggcgacagccgggcacgatgtgacagcacatccagcacacccaagaccccagatggtggacactcctctcaggagataaagtctgagacctcatccaatcccagctctccggaaatctgccccaacaaggagaagcccttcatgaagttgaaggaaaacggccgtgccatctcccgctcctcctccagcaccagcagcgtcagcagcactgcaggggagggcgaggccatggaggagggcgacagtgggggcagccagccgtccacgacctcacccttcaagcaggaggtgtttgtctacagcccgtccccgagcagcgagagccccagcctgggggcagctgccaccccgatcatcatgagccggagtcccacagatgccaaaagcagaaactccccgagatcgaacctgaaattccgctttgacaagctcagccatgccagctctggtgcggggcac

SEQ ID NO: 4323 - DNA, 1644 bp, Homo sapiens
  source 1..1644: mol_type = genomic DNA
gtgaggcggaagctgtgtatggcgggaggctgtggcggtcccttggtggggaagctgttgctgttgctagacgacgggaactagctctcgtcacttcctcagcccgccgtctgcccactcctctagccggaacctgggggcccggagccggggtaggcacagagttgtcctcggaggtccaggacagcggccagcccggcggcgggagtcagggccacgccacctgcagggaagaacccgagtcgaagcgggaagatggctgcagacaagcctgcagatcagggagcagagaaacatgaaggcacaggtcagtcctctgggatcactgatcaagagaaggagttatccaccaatgctttccaagctttcacatctggaaattatgatgcctgtctacaacaccttgcctgtctacaagatataaacaaagatgattataaaataattttgaatacagcagtagctgagttttttaaaagtaaccaaacaacaacagataatttgagacaaacacttaaccagctgaagaatcaggtccactcagctgttgaagaaatggatggattagatgatgttgaaaacagcatgttgtactataatcaagcagtcattctttatcatctgcggcagtatacagaagccatatcagttggtgaaaaactttatcagttcatagagccttttgaagaaaaatttgcccaagcagtgtgttttttgcttgtagacctgtatatattaacctaccaagctgagaaagctttgcatcttcttgctgtcctagaaaaaatgatttcacagggtaacaataacaaaaatggaaagaatgagactggtaataacaacaacaaagatggatctaatcataaagctgaaagtggagctctaatagaagctgcaaaatcaaagatacatcagtacaaagtacgagcttatatccaaatgaagtctctgaaagcatgtaaaagggaaatcaagtcagtcatgaatacagctggaaattccgcaccctctctctttcttaaaagcaattttgagtacttaagaggtaattatcgaaaagccgtgaagctattaaatagttcaaacattgctgagcatccaggattcatgaaaacaggtgaatgcttgagatgcatgttctggaataaccttggttgcatccattttgccatgagcaagcacaatttgggaatattctactttaaaaaggctctgcaagagaatgacaatgtctgtgcacagctcagtgcaggtagcactgatccaggtaaaaaattttcaggaagacccatgtgtacgttactaaccaataagagatatgagttgctgtataactgtggaattcagcttcttcacattggaaggcctcttgctgccttcgaatgtctgattgaagctgttcaggtttatcatgcaaatcctcgcctctggctacggctggctgaatgctgcattgctgccaataaggggacttctgaacaagaaactaaaggccttcccagcaaaaaaggaattgtacagtctattgttggtcaaggctatcatcgtaaaatagttttggcatcacagtctatacagaatactgtttataatgatgggcagtcttcggccattcctgtagccaaagcaggaaaatggggctaa

SEQ ID NO: 4324 - DNA, 2530 bp, Homo sapiens
  source 1..2530: mol_type = genomic DNA
gatgcctgagatcagagtcacgcccttgggtgcctgccctgtgctgtcctggaacctggtccttccaccgggcagggggtcgagggcaccttccagcacagacaccaggacgggattccatgtcctcccccatggcgtgagcgcttcctcggagggtgccccccgccccggtgtggacactgtgctgtgaacacccctggcctgtgcacaccccatggcattttgcagctgtttgcatgggccccactgccctcccctgctctctgggtcctccgtggggtcctcccagcctgcccctttcccatttggcctcttggctgcctgttctgcccactctctggacatctgatctttctgatctttcatgtggcttcaattacccgcaatctgtacctgggtatattctcaaggtcacctcagccaaggcagcccctcggctgtggccccgtcatcctgatgtgtggtgctggctttggacacttcgagtggctggcagggggaggggccggccaggacgtgggccgaagctgcatcctggtctccattgcgggcaagaatgtcatgctggactgtggaatgcacatgggcttcaatgacgaccgacgcttccctgacttctcctacatcacccagaacggccgcctaacagacttcctggactgtgtgatcattagccacttccacctggaccactgcggggcactcccctacttcagcgagatggtgggctacgacgggcccatctacatgactcaccccacccaggccatctgccccatcttgctggaggactaccgcaagatcgccgtagacaagaagggcgaggccaacttcttcacctcccagatgatcaaagactgcatgaagaaggtggtggctgtccacctccaccagacggtccaggtagatgatgagctggagatcaaggcctactatgcaggccacgtgctgggggcagccatgttccagattaaagtgggctcagagtctgtggtctacacgggtgattataacatgaccccagaccgacacttaggagctgcctggattgacaagtgccgccccaacctgctcatcacagagtccacgtacgccacgaccatccgtgactccaagcgctgccgggagcgagacttcctgaagaaagtccacgagaccgtggagcgtggtgggaaggtgctgatacctgtgttcgcgctgggccgcgcccaggagctctgcatcctcctggagaccttctgggagcgcatgaacctgaaggtgcccatctacttctccacggggctgaccgagaaggccaaccactactacaagctgttcatcccctggaccaaccagaagatccgcaagactttcgtgcagaggaacatgtttgagttcaagcacatcaaggccttcgaccgggcttttgctgacaacccaggaccgatggttgtgtttgccacgccaggaatgctgcacgctgggcagtccctgcagatcttccggaaatgggccggaaacgaaaagaacatggtcatcatgcccggctactgcgtgcagggcaccgtcggccacaagatcctcagcgggcagcggaagctcgagatggaggggcggcaggtgctggaggtcaagatgcaggtggagtacatgtcattcagcgcacacgcggacgccaagggcatcatgcagctggtgggccaggcagagccggagagcgtgctgctggtgcatggcgaggccaagaagatggagttcctgaagcagaagatcgagcaggagctccgggtcaactgctacatgccggccaatggcgagacggtgacgctgcccacaagccccagcatccccgtaggcatctcgctggggctgctgaagcgggagatggcgcaggggctgctccctgaggccaagaagcctcggctcctgcacggcaccctgatcatgaaggacagcaacttccggctggtgtcctcagagcaagccctcaaagagctgggtctggctgagcaccagctgcgcttcacctgccgcgtgcacctgcatgacacacgcaaggagcaggagacggcattgcgcgtctacagccacctcaagagcgtcctgaaggaccactgtgtgcagcacctcccagacggctctgtgactgtggagtccgtcctcctccaggccgccgccccttctgaggacccaggcaccaaggtgctgctggtctcctggacctaccaggacgaggagctggggagcttcctcacatctctgctgaagaagggcctcccccaggcccccagctgaggccggcaactcacccagccgccacctctgccctctcccagctggacagaccctgggcctgcacttcaggactgtgggtgccctgggtgaacagaccctgcaggtcccatccctggggacagaggccttgtgtcacctgcctgcccaggcagctgtttgcagctgaagaaacaaactggtctccaggctgtcttgcctttattcctggttagggcaggtggtcctagacagcagtttccagtaaaagctgaac

SEQ ID NO: 4325 - DNA, 932 bp, Homo sapiens
  source 1..932: mol_type = genomic DNA
gcttccggcaccggccgaggtgcgggtcgcctccagagatcctgtgccttcaaaccctacgagtccatactttaaaacaaaatgaagaaagtaaggcttaaggaactagagagtcgcctgcaacaagtggatggatttgaaaagcccaagctacttctggaacagtatcctaccaggccgcacattgcagcatgtatgctctatacaatccataacacttatgatgacattgaaaataaagtcgttgcagatctaggatgtggttgtggagtacttagcatcggaactgcaatgttaggagcagggttgtgtgttggatttgacatagatgaagacgcattggaaatatttaataggaatgcagaagagtttgagttacaaatattgacatggttcaatgtgatgtgtgcttattatctaacagaatgtccaagtcattcgatacagaattatgaatcctccctttgggaccaaaaataataaagggacagatatggcttttctaaagactgctttggaaatggcaagaacagcagtatattccttacacaaatcctcaactagagaacatgttcaaaagaaagctgcagaatggaaaatcaagatagatattatagcagaacttcgatatgacctgccagcatcatacaagtttcacaaaaagaaatcagtctgatcatctaaatcacccgaaaatttcagcaagcatccaatcttttcttctagagatttctataaaaatatacaaagtgatcaaaaagtttcttaaaagcaacaacagaccagaaatgactcacaccaccttatagctatacaagaaaaagactagaaaccaaaatgctattttaaagtagtttcttccgccggggcagcaagagcgaaactccatctcaaaaaataataataataataaataaataaagtagtttcat

SEQ ID NO: 4326 - DNA, 1674 bp, Homo sapiens
  source 1..1674: mol_type = genomic DNA
atagagtagcggaagtggtccgttctcttcctctcccggcccaagcttctgggtatttctattgcgcgaggcattgtgggttgctgggcggcccggtctcggagaagaggggagagtggcgggccgctgaataagcttccaaaatgatggtgggtgatggcaccacctcagtgaccttgctggctgcagagtttctgaagcaggtgaaaccctatgtggaggaaggtttacacccccagatcatcattcgagctttccgcacagccacccagctggcagttaacaagatcaaagagattgctgtgaccgtgaagaaggcagataaagtggagcagaggaagctgctggaaaagtgtgccatgaccgctctgagctccaagctgatctcccagcagaaagctttctttgctaagatggtggtggatgcagtgatgatgctcgatgatttgctgcagcttaaaatgattggaatcaagaaggtacagggtggagccctcgaggattctcagctggtagctggtgttgcattcaagaagactttctcttacgctgggtttgaaatgcaacccaaaaagtaccacaatcccaagattgcccttttgaatgtcgagctcgagttgaaagctgagaaagacaatgctgagataagagtccacacagttgaggattatcaggcaattgttgatgctgagtggaacattctctatgacaagttagagaagatccatcattctggagccaaagttgtcttgtccaaactccccattggggatgtggccacccagtactttgctgacagggacatgttctgtgctggccgagtacctgaggaggatctgaagaggacaatgatggcctgtggaggctcaatccagaccagtgtgaatgctctgtcagcagatgtgctgggtcgatgccaggtgtttgaagagacccagattggaggcgagaggtacaatttttttactggctgccccaaggccaagacatgcaccttcattctccgtggcggcgccgagcagtttatggaggagacagagcggtccctgcatgatgccatcatgatcgtcaggagggccatcaagaatgattcagtggtggctggtggcggggccattgagatggaactctccaagtacctgcgggattactcaaggactattccaggaaaacagcagctgttgattggggcatatgccaaggccttggagattatcccacgccagctgtgtgacaatgctggctttgatgccacaaacattctcaacaagctgcgggctcggcatgcccaggggggtacatggtatggagtagacatcaacaacgaggacattgctgacaactttgaagctttcgtgtgggagccagctatggtgcggatcaatgcgctgacagcagcctctgaggctgcgtgcctgatcgtgtctgtagatgaaaccatcaagaacccccgctcgactgtggatgctcccacagcagcaggccggggccgtggtcgtggccgcccccactgagaggcaccccacccatcacatggctggctggctgctgggtgcacttaccctccttggcttggttacttcattttacaaggaaggggtagtaattggcccactctcttcttactggaggctatttaaataaaatgtaagacttcagataactttgtaaatt

SEQ ID NO: 4327 - DNA, 2747 bp, Homo sapiens; identical to SEQ ID NO: 3944
  source 1..2747: mol_type = genomic DNA

SEQ ID NO: 4328 - DNA, 1758 bp, Homo sapiens
  source 1..1758: mol_type = genomic DNA
cttgcgtccttccggctccgtcgtggaagcaggactgcgccgcgtcttcctcaaggttgagaacaaaaacatgcacctggagtttccccggagccctctgcgtggttgagcttcggtggaatttcggggctcttggctgccagccgcgcttgcctggtagcaacagaaaccagtcctgctcgcctccgtggacatttcattaccatccagaagtgtctcccactgaaggcatccgtggttgtttttaagccacaaaaaagccacacccaagatcacctgacacccaccctgacaagtgtccatgatgctgggccctgagggaggtgaaggctttgtggtcaagctccgtggcctgccctggtcctgctctgttgatgatgtaaaaatggccctgaaaaaagacagggaaagcatgggacaccggtacattgaggtgttcaagtcccacagaaccgagatggattgggtgttgaagcacagtggtcccaacagtgccgacagcgccaacgatggcttcgtgcggcttcgaggactcccatttggatgcacaaaggaagaaattgttcagttcttctcagggttggaaattgtgccaaacgggatcacattgcctgtggaccccgaaggcaagattacaggggaagcgttcgtgcagtttgcctcgcaggagttagctgagaaggctctagggaaacacaaggagaggatagggcacaggtacattgaggtgtttaagagcagccaggaggaagttaggtcatactcagatccccctctgaagttcatgtccgtgcagcggccagggccctatgaccggcccgggactgccaggaggtacattggcatcgtgaagcaggcaggcctggaaaggatgaggcctggtgcctacagcacaggctacgggggctacgaggagtacagtggcctcagtgatggctacggcttcaccaccgacctgttcgggagagacctcagctactgtctctccggaatgtatgaccacagatacggcgacagtgagttcacagtgcagagcaccacaggccactgtgtccacatgaggggcctgccgtacaaagcgaccgagaacgacatttacaacttcttctctcctctcaaccctgtgagagtccatattgagattggcccagatggaagagtgacgggtgaagcagatgttgagtttgctactcatgaagaagctgtggcagctatgtccaaagacagggccaatatgcagcacagatatatagaactcttcttgaattcaacaacaggggccagcaatggggcgtatagcagccaggtgatgcaaggcatgggggtgtctgctgcccaggccacttacagtggcctggagagccagtcagtgagtggctgttacggggccggctacagtgggcagaacagcatgggtggctatgactagttttgttaggaacatttgagttacttcaatcattttcacaggcagccaacaagcaattaagagcagttataatagaggaagctgggggacccattttgcaccatgagtttgtgaaaaatctggattaaaaaattacctcttcagtgttttctcatgcaaaattttcttctagcatgtgataatgagtaaactaaaactattttcagcttttctcaattaacattttggtagtatacttcagagtgatgttatctaagtttaagtagtttaagtatgttaaatgtggatcttttacaccacatcacagtgaacacactggggagacgtgc

SEQ ID NO: 4329 - DNA, 1935 bp, Homo sapiens
  source 1..1935: mol_type = genomic DNA
gagcggaccctcgcggcggccatggcgtcggtggtggaatacaagggcctcagggccggctaccactgcggctactgcgattccaaggagggcaaagcgtcctgcggcatgtgggcacattccatgacagtacaggattatcaggatctcatagaccgaggatggcgaagaagtggaaaatatgtgtacaaacctgtcatgaatcaaacatgttgtcctcagtacacaataaggtgccgacctttacaatttcagccttcaaaatctcacaagaaggttttgaaaaaaatgttgaaatttctagctaaaggggaggttcccaaaggaagttgtgaggatgagcccatggattccacaatggatgatgctgttgcgggtgactttgcattgataaataaactggatatacagtgtgatcttaaaacactcagtgatgacatcaaagagagtttagagagtgaaggaaaaaattcaaagaaagaagaacctcaggaattacttcagtcacaagatttcgtaggagagaagttgggctctggtgaaccgtcacattcagttaaagttcacacagttcctaagccaggcaaaggggctgatttgagtaagcctccatgtcgaaaagcaaaggaaatccggaaagaaaggaaaaggttaaaactaatgcagcagaacccagctggagaacttgagggtttccaggctcaaggtcacccaccatctttgtttccaccaaaggctaaatccaaccagccaaaatcactcgaagatttaatttttgagtctttaccagagaatgcatcacacaagttagaggtgaggttagtacctgtctcctttgaggacccagagttcaagtcgtctttcagccagtccttttctttgtatgtcaagtatcaagtggccatacaccaggatccacccgatgaatgtgggaagactgagttcacaagattcctttgcagttcacccttggaggcagagactccccctaatgggccagattgtggctatggctcctttcaccagcagtactggcttgacggaaagatcattgctgtgggggtgattgacatcctcccaaactgtgtatcatctgtgtatttgtactacgatcctgattattcgtttttgtctttgggcgtctactctgcactacgagaaattgcttttactaggcagcttcatgagaaaacttctcaactcagctattattatatgggtttctacattcattcatgtcccaagatgaaatataagggtcagtatagaccttctgatttgctgtgccctgagacatatgtttgggtacccattgagcaatgcctgccttcacttgaaaactccaagtactgccgtttcaaccaggacccagaagcagtggatgaggatcgcagtacggaacctgaccgattgcaggtgtttcacaagagagccatcatgccttacggtgtttataagaaacagcagaaagacccaagtgaggaggctgctgttctgcagtacgccagcctggtggggcagaagtgctccgagcggatgctgctgttcagaaactgacctgttcacctctgccgggaagttcctgtgttgtgctgatgatttgtgccaggatacatattcagtacctgtggggaaataactgtcaccacccacaaattagacattttttattttgactatctatggcttttaaaaaatattttgtggcaatgtatctgtgagaatctcatagttaatataaagattttaaaactgcattatgacctagcccccataattgggatttatcattttggaggattctttctagagcaagatacgctcaaattctcctgtttgtattttgtaaaatgaagaagtgaatctaagtaacttaatcacagttgtgcattttttttggttctgttagagaaattaaaacagactgtttcctca

SEQ ID NO: 4330 - DNA, 5697 bp, Homo sapiens
  source 1..5697: mol_type = genomic DNA
aaaaataatgccatttttttgaatgatgaactatggtataatgcatttagtgttcattccaaacgtcaatcaataaataacatgggcctctagctataagggaaattctataggtaaaagaactgattgacccccacccccataggtgctgtcctgctatggaatccctttgctcagttttctcctgtccaatcaggtggaatgtttcacaggcacatggtttatacagctcaaaataacttgggacctgtgagctgacaaatgctctggctccggtggtgacaggttgtccagcttcttacagccatcttcactgaaactaaggttaactcctcactctctatggacggctactctctatttccaagggcgtgaagaatttccctcttctcctgtgctttcatctaaaagttctccctggataattatcattgcagtggagtgcctggattggacatcctcatctgggtcaactaaaaaaagaaagcatgcaagacgacagcatagaagcttctacttccatatctcagcttctaagagagagctatttagctgaaaccagacatcggggaaacaatgagaggagtcgagcggagccctcctccaacccttgccatttcggcagtccttctggggccgctgaaggaggcggaggccaagatgaccttccagatctttcagcctttctgagccaagaagaattagacgaaagtgtcaatttggcaagactggccatcaattacgaccctttggagaaggcagatgaaactcaagctagaaaacgactttctcctgatcagatgaaacactcacctaatttaagttttgagcctaacttctgccaggataaccctcgaagtcccaccagctctaaagaaagcccccaggaggcaaaaaggccacagtattgttctgaaacccagtccaaaaaagtatttttaaataaggctgccgacttcattgaagagctatcctcccttttcaaatcccacagctccaaaaggattagacctcgtgcctgcaaaaaccacaagagtaaactggaatctcaaaacaaagttatgcaggaaaacagctccagtttctcagatctgtcagaaagacgagaaagatcttctgttcccatccctatccctgcggataccagggataatgaagtgaatcacgccctggaacagcaggaagccaagaggcgtgaagcggagcaggctgccagtgaggcggctggtggagacactacaccagggtcttccccttcatctctgtactatgaagaacctctggggcaacctccccggttcactcaaaagttacggagcagagaagttccagaaggaactcgagtacagttggattgcatagtggtaggaattccaccacctcaagtaaggtggtactgtgaaggcaaggagcttgaaaattccccagatattcacatcgtccaggcaggaaatctgcactcactgaccattgcggaagcctttgaagaggacacaggacgctattcctgctttgcttctaacatctatgggacagattcgacttctgctgagatttatatagaaggggtttcttcttctgactcagaaggcgaccctaacaaggaagagatgaatcgaatccagaagccaaatgaggtgtcatctcctcccactacctctgcagtcattcctccagcagtaccccaagcccagcatttggtggcccaacctcgtgtggcaaccatccagcagtgtcagagccccaccaattacttgcagggattggatggaaaacctatcattgcagctcctgtgtttacaaagatgctacaaaatttgtcagcttctgagggtcagctggttgtctttgaatgcagagtaaaaggagctccatctcctaaggttgagtggtatagagaagggactttaatagaagattctccagattttaggattttacagaaaaggcctgtctgcatggagcatatagaggagatttgcaccttggtcattgctgaggtgtttgcagaagattctgggtgcttcacatgtactgcaagcaacaaatacggcacagtgtcaagcattgcacagctgcacgtgagaggaaatgaggacctcagcaacaacgggtctcttcactcagccaactctaccaccaacctggcagctattgagccacagccctccccaccccactcagagcctccatctgtggaacaaccccccaaacccaaactcgagggggttctggtgaaccacaatgagccccggtccagctccaggattgggcttcgtgtgcacttcaacctgcctgaagatgacaaaggaagtgaagcatcctccgaggctggtgtggtgaccaccagacagaccaggcccgattctttccaggagaggttcaacggacaggcaacaaaaaccccagagccttcttcccccgtgaaagagccccctccagttctggccaaacccaaacttgattccactcagttacaacagcttcataaccaagtcttactggaacaacaccaattgcaaaacccacctccttcatctcctaaggagtttcctttcagcatgactgttttgaactccaatgctcccccagcggtgacaacatccagtaagcaggtgaaggctccttcatcacagacgttcagcttggcccggccgaagtatttcttcccctccacgaacaccaccgcagcaactgtggccccttccagctctccggtgttcactttgagcagcactcctcaaactattcagaggacagtgagcaaagaaagcctcttagtgtctcacccctctgtgcaaaccaaatctccaggagggctttccatccaaaatgagccactcccaccaggcccaacagaaccaacaccaccaccattcacattttccatccccagcggaaaccagtttcagccccgctgtgtgtccccaattcctgtctctcctaccagccggattcagaacccagtggctttcctcagctctgttctgccttctctccctgccatcccacccacaaatgccatggggctgcctagaagtgcaccatccatgccatcccagggattagcgaagaaaaatacaaagtctcctcaaccagtgaatgatgataacattcgtgaaactaagaacgcagtgattcgagacttggggaaaaaaataactttcagtgatgtcagaccaaaccagcaggagtacaaaatttcaagctttgagcagaggctgatgaatgaaatagagtttcgcttggaacgtactcctgttgatgaatcagatgatgaaattcaacatgatgagatccccacgggcaagtgtattgctcccatctttgacaagagactcaagcacttccgggtcacagaaggctctccagttacattcacctgcaaaattgttgggatacctgttccaaaggtttactggttcaaagatgggaagcagatttctaagagaaatgagcactgcaaaatgaggcgagaaggagatgggacatgctctctgcacattgaatccactaccagtgatgacgatggcaactacaccatcatggcagccaacccccaggggagaatcagctgttctggccacttgatggtacaaagtttgcccattcgcagtcggctaacctctgctggtcagtctcacaggggaagatcccgagtgcaagaaagagacaaagagcccctacaggaacgctttttccgaccacatttcctgcaggctcctggggatatggtagctcatgaggggcgcctctgtcggctggactgtaaggtgagtggtttaccgcccccggagctgacatggctactcaatggccaacctgtgctaccagatgcctcccacaagatgctggtcagggagaccggagtccactctctgctcattgacccactcactcagcgcgacgcagggacctataagtgcatcgctaccaacaaaaccgggcagaattcttttagtctggagctctctgtagtagccaaagaggtgaagaaagcacctgtgatcctggagaaactacagaactgcggtgttcccgaaggccaccccgtgagactggagtgccgcgtgataggcatgcccccacctgtgttctactggaagaaagacaatgagaccatcccttgcaccagagagaggatcagtatgcaccaggacacaacagggtatgcctgccttctcattcagccagccaagaaatcagacgctggatggtacacgttgtcagccaagaatgaagccggcatcgtgtcgtgcactgccaggctggatatatacgctcagtggcaccatcagatcccaccgcccatgtctgtccggcccagtggcagtcgctacggatctctcaccagtaaaggacttgacatattttctgccttttcctccatggaaagcacgatggtgtattcatgctcttctcggagtgtagtggagagtgatgaactttaagaatgtctaggtacctgctgtgtaagagagcggactgtggagggggaatgagaacaagccagacttggtggtttccaagcaaccgaagttgagtaagttcccacactgctggacctgtggcaaagagtgctttgaataagtcagctagggattcttgcagtctcagctgagggagaaaggtagggctgtgccttctaaagattccaacagagatgtgagaagataatacagatgaaccaaagatgtcacacagttgccatccactgctttgggaaaaaactagcatgctcccctgctccctgttgtgttagggatgtttaggtcatactaggagcaattaggagccatatgcctgggctgagaagagctaggcagtagtgaccttaggatatgactaactcaccaaacaatgccaaggagaaaggcggacaggtcaccatcacctttcatcgattacatgtatagcagtagttttggtgaattcaccaaatcagcttccacttagcattaggaggtcatgccatacaactcacgtatgcgggcaaacacttttgatttgcatatcctgggtgtactgagccacataataaggtgtcaaaatgtgcttgagattccaaaaacttgctgaaacacttgatattgcacagtgcacttattttgtggccaaagcatggccttaccagcttgtctgcactattttcttttgggtggtgactgtttttttctgactttgcatatccctagacactagaactaaaggattggtaataaaccaatcagaaagaaatcctctgtggggtcactttaaaaactactagcttcaactaccacttacaaaatgtgcaagagtcatcatttgcccataaaatacacctcatgggctcctacccctttccccaaaagtctgaaagtgtaggaggaaggaagagatacaaacaaggagaggaaatgatgggagagtgttgtttttgtcacttgccccagcagagcaggggttttggaaggagaggtctttaatagctttgaaatgctttgagatcattggtcaaattgcattttctatgtagagaatattctgctaggtggaaaagttgggagaaaggggaatatgcatctttattctaatcaccaattcaaaccctgcctcttaaggaatttttagacttaagttcactgtgatatccctagtacctagaagagtacctagcacaaagtagacattcaataaatatttgctggttgaatg

SEQ ID NO: 4331 - DNA, 2882 bp, Homo sapiens
  source 1..2882: mol_type = genomic DNA
aagcatgtgcacaggctgctcatgagttcctaaacgttgcgtttgcaacactaccagtgttttgtacgggcgctggcgcctgctcacagccttccacgtgaccggaaaaggccttcagcgcataaagtgggagaccggaagaggcggagacgatccgatgctcgaactccgccccctcttctccgcgtaggcccagctccctgaagcggctgtttcgagccacgcgcccatcgggttaaaaataagaagttggttgagctgctgagaaggaaagttcgtctcgcccagccttatgtcggcgtctttctaaagagagatgacagcaatgagtcggatgtggtcgagagcctggatgaaatctaccacacggggacgtttgcccagatccatgagatgcaggaccttggggacaagctgcgcatgatcgtcatgggacacagaagagtccatatcagcagacagctggaggtggagcccgaggagccggaggcggagaacaagcacaagccccgcaggaagtcaaagcggggcaagaaggaggcggaggacgagctgagcgccaggcacccggcggagctggcgatggagcccacccctgagctcccggctgaggtgctcatggtggaggtagagaacgttgtccacgaggacttccaggtcacggaggaggtgaaagccctgactgcagagatcgtgaagaccatccgggacatcattgccttgaaccctctctacagggagtcagtgctgcagatgatgcaggctggccagcgggtggtggacaaccccatctacctgagcgacatgggcgccgcgctcaccggggccgagtcccatgagctgcaggacgtcctggaagagaccaatattcctaagcggctgtacaaggccctctccctgctgaagaaggaatttgaactgagcaagctgcagcagcgcctggggcgggaggtggaggagaagatcaagcagacccaccgtaagtacctgctgcaggagcagctaaagatcatcaagaaggagctgggcctggagaaggacgacaaggatgccatcgaggagaagttccgggagcgcctgaaggagctcgtggtccccaagcacgtcatggatgttgtggacgaggagctgagcaagctgggcctgctggacaaccactcctcggagttcaatgtcacccgcaactacctagactggctcacgtccatcccttggggcaagtacagcaacgagaacctggacctggcgcgggcacaggcagtgctggaggaagaccactacggcatggaggacgtcaagaaacgcatcctggagttcattgccgttagccagctccgcggctccacccagggcaagatcctctgcttctatggcccccctggcgtgggtaagaccagcattgctcgctccatcgcccgcgccctgaaccgagagtacttccgcttcagcgtcgggggcatgactgacgtggctgagatcaagggccacaggcggacctacgtgggcgccatgcccgggaagatcatccagtgtttgaagaagaccaagacggagaaccccctgatcctcatcgacgaggtggacaagatcggccgaggctaccagggggacccgtcgtcggcactgctggagctgctggacccagagcagaatgccaacttcctggaccactacctggacgtgcccgtggacttgtccaaggtgctgttcatctgcacggccaacgtcacggacaccatccccgagccgctgcgagaccgtatggagatgatcaacgtgtcgggctacgtggcccaggagaagctggccattgcggagcgctacctggtgccccaggctcgcgccctgtgtggcttggatgagagcaaggccaagctgtcatcggacgtgctgacgctgctcatcaagcagtactgccgcgagagcggtgtccgcaacctgcagaagcaagtggagaaggtgttacggaaatcggcctacaagattgtcagcggcgaggccgagtccgtggaggtgacgcccgagaacctgcaggacttcgtggggaagcccgtgttcaccgtggagcgcatgtatgacgtgacaccgcccggcgtggtcatggggctggcctggaccgcaatgggaggctccacgctgtttgtggagacatccctgagacggccacaggacaaggatgccaagggtgacaaggatggcagcctggaggtgacaggccagctgggggaggtgatgaaggagagcgcccgcatagcctacaccttcgccagagccttcctcatgcagcacgcccccgccaatgactacctggtgacctcacacatccacctgcatgtgcccgagggcgccacccccaaggacggcccaagcgcaggctgcaccatcgtcacggccctgctgtccctggccatgggcaggcctgtccggcagaatctggccatgactggcgaagtctccctcacgggcaagatcctgcctgttggtggcatcaaggagaagaccattgcggccaagcgcgcaggggtgacgtgcatcgtcctgccagccgagaacaagaaggacttctacgacctggcagccttcatcaccgagggcctggaggtgcacttcgtggaacactaccgggagatcttcgacatcgccttcccggacgagcaggcagaggcgctggccgtggaacggtgacggccaccccgggactgcaggcggcggatgtcaggccctgtctgggccagaactgagcgctgtggggagcgcgcccggacctggcagtggagccaccgagcgagcagctcggtccagtgacccagatcccagggacctcagtcggcttaatcagagtgtggcatagaagctatttaatgattaaagtcatttgcagt

SEQ ID NO: 4332 - DNA, 1304 bp, Homo sapiens
  source 1..1304: mol_type = genomic DNA
gtggttctcaaacctggtggcccattagaaattttaaatgcctgagttccaccttggaccagttctgttagaatctctgcatgaccagccaggatatcagtacttcttaatttgcagccagggttcagaaccactggcctcgagctttttctgggacttctaacacttgtcattgtccctgggcaaagcatgagcatatacacatgtttatcaaaaagaaaaggaacttatatctagctccactggtccaactttagaaactaggaaacgagtaaatggtgtgtgtgtccccatttgtgtgtctgcatctgcataaggtggtgtgttggtgggcacccttgctaatcagagggtgtgctgtgccataccactctggtgagggtatgaatctctgtgtgactccttcctttgtttctcacagggctggttcttgtgctgaaacaccacgatggtgctgcccataaactcgtgtgttatttcaccaactgggcacacagtcggccaggccctgcctcgatcttgccccatgacctggacccctttctctgcacccacctgatatttgcctttgcctcaatgaacaacaatcagattgttgctaaggatctccaggatgagaaaattctctacccagagttcaacaaactaaaggagaggaacagagagctgaaaacactactgtccatcggcgggtggaactttggcacctcaagattcaccactatgttgtccacatttgccaaccgtgaaaagtttattgcttcagttatatcccttctgaggacacatgactttgatggtcttgaccttttcttcttatatcctggactaagaggcagccccatgcatgaccggtggacttttctcttcttaattgaagagctcctgtttgccttccggaaggaggcactgctcaccatgcgcccgaggctgctgctgtctgctgctgtttctggggtcccacacatcgtccaaacatcctatgatgtgcgctttctaggaagatttgttcctttgtctggggagcgaagaagcactggattgattaccagtatgtcccgtatgccaacaaggggaaagagtgggttggctatgacaatgccatcagcttcagttacaaggcatggtttataaggcgagagcattttgggggggccatggtgtggacattggacatggatgacgtcaggggcacgttctgtggcactggccctttcccccttgtctacgtattgaatgatatcctggtgcgggctgagttcagttcaacttctttaccacaattttggctgtcatctgctgtg

SEQ ID NO: 4333 - DNA, 1840 bp, Homo sapiens
  source 1..1840: mol_type = genomic DNA
atgttgggtctgaagcggctgctgtaggcgccgacggagcgagcgggcgtgcggagcgggcgacagtggcgtgggatctgcctctctgcgagcagctgggagcggcggcggcggcgccatgagcgggggcaccccttacatcggcagcaagatcagcctcatctccaaggcggagatccgctacgagggcatcctctacaccatcgacaccgaaaactccaccgtagcccttgccaaagttcgatcctttggtacagaagacagaccgacagatcgtccaataccacctcgagatgaagtctttgaatacattatattccgtgggagtgacattaaagaccttactgtttgtgagccaccaaaaccacagtgttctttgcctcaagacccagctattgttcagtcctcactaggctcatcgacttcttcattccagtccatgggttcttatggacctttcggcaggatgcccacatacagtcagttcagtccgagttccttagttgggcagcagtttggtgctgttggtgttggtcgctcaagccctcagttagaccctttgagaaaaagcccaaccatggaacaagcagtgcagaccgcctcagcccacttacctgctccagcagctgttgggagaaggagtcctgtatcaaccaggcctttgccatctgccagccaaaaggcaggagagaatcaggagcacaggcgagctgaagtacacaaagtttcaaggccagaaaatgagcaactcagaaatgataacaagagacaagtagctccaggtgctccttcagctccaaggagagggcgtgggggtcatcggggtggcaggggaagatttggtattcggcgagatgggccaatgaaatttgagaaagactttgactttgaaagtgcaaatgcacaattcaacaaggaagagattgacagagagtttcataataaacttaaattaaaagaagataaacttgagaaacaggagaagcctgtaaatggtgaagataaaggagactcaggagttgatacccaaaacagtgaaggaaatgccgatgaagaagatccacttggacctaattgctattatgacaaaactaaatccttctttgataatatttcttgtgatgacaatagagaacggagaccaacctgggctgaagaaagaagattaaatgctgaaacatttggaatcccacttcgtccaaaccgtggccgtgggggatacagaggcagaggaggtcttggtttccgtggtggcagagggcgtggtggtggcagaggtggtaccttcactgcccctcgaggatttcgcggtggattcagaggaggtcgtgggggccgggagtttgcggattttgaatataggaaaaccacagcttttggaccctaaaaggtctggattgatcgtactgctttctgaaagaaagacaacaaagttgctgcatagtctacaaacaagtctctgaaaataggtgaatttctagctcttcatggtcctgaacattgatttcagtctttgcaaagaatgaagaagtgaattcgctgtacatttgtcaccagcactgggtttttgttttttgtttgtttttccgcttaatttcaaagataaaatgcagttacttttgggggtggaaggctcatcttaaaacatgagcattaaatatatttggaatagcagaaggttaagtaatttcttatgtatagttaaactaaagcagtacttcagtgggacttaacaagtattttttcatcactgaaaggttttttttttttatcactaaattgtatttggcaattgcaagttgcctgcagatagggccgtgatactgtgttttgagccaca

SEQ ID NO: 4334 - DNA, 2873 bp, Homo sapiens
  source 1..2873: mol_type = genomic DNA
agcagcgcaggtgagcgccgcttccggggtcgggcgcctggatagctgccggctccggcttccacttggtcggttgcgcgggagactatggcgtcctcctcggtcccaccagccacggtatcggcggcgacagcaggccccggcccaggtttcggcttcgcctccaagaccaagaagaagcatttcgtgcagcagaaggtgaaggtgttccgggcggccgacccgctggtgggtgtgttcctgtggggcgtagcccactcgatcaatgagctcagccaggtgcctcccccggtgatgctgctgccagatgactttaaggccagctccaagatcaaggtcaacaatcaccttttccacagggaaaatctgcccagtcatttcaagttcaaggagtattgtccccaggtcttcaggaacctccgtgatcgatttggcattgatgaccaagattacttggtgtcccttacccgaaacccccccagcgaaagtgaaggcagtgatggtcgcttccttatctcctacgatcggactctggtcatcaaagaagtatccagtgaggacattgctgacatgcatagcaacctctccaactatcaccagtacattgtgaagtgccatggcaacacgcttctgccccagttcctggggatgtaccgagtcagtgtggacaacgaagacagctacatgcttgtgatgcgcaatatgtttagccaccgtcttcctgtgcacaggaagtatgacctcaagggttccctagtgtcccgggaagccagcgataaggaaaaggttaaagaattgcccacccttaaggatatggactttctcaacaagaaccagaaagtatatattggtgaagaggagaagaaaatatttctggagaagctgaagagagatgtggagtttctagtgcagctgaagatcatggactacagccttctgctaggcatccacgacatcattcggggctctgaaccagaggaggaagcgcccgtgcgggaggatgagtcagaggtggatggggactgcagcctgactggacctcctgctcttgtgggctcctatggcacctccccagagggtatcggaggctacatccattcccatcggcccctgggcccaggagagtttgagtccttcattgatgtctatgccatccggagtgctgaaggagccccccagaaggaggtctacttcatgggcctcattgatatccttacacagtatgatgctaagaagaaagcagctcatgcagccaaaactgtcaagcatggggctggggcagagatctctactgtccatccggagcagtatgctaagcgattcctggattttattaccaacatctttgcctaagagactgcctggttctctctgatgttcaaggagctaggggaagggggttgtttgccttcttcaggacctgactggacagatggacctggctcaagcaactactctggatgcactttgctgtgtgggatgaactaaaagtgtctgaattttgctgataactttataaaactcactatggcatgcttccctcctggtgggccctaggatggatgacactcaagatactacagatgtgggtgcaggcatgcacacacacgatggaatatggccattcctacacaggtggggtagagagtgggtcagcagcctggcacctcacagaggtgggacctaagaggactcatgattatgcagagaattggattgggtctctgtcatagattgagtaatctcttcccttacctcaattccatctccacccatctctacatctgggcacagcaacccagagatggccaaaagcattcaagcctgggggaagatgtttgactattgctgctcttcaccagaacctcacacctctcctgggactggaacccttcagtgggtgtgtggccagttttggaggctggaatgatgggccagggtgtaggattcattctccatgtaaagtttcctttcatcctgcctagccatccccaaggtttatttccagaagaaaggaatatctctacttggatcaattctggtcatttcaagaggatggaggcctcaagtgtgggaacttcccctactccctggatgtgtgtacctagcacacttccttctcccacccctttttccagttggatttgtttttctgttctcttctgtcctgtcttatactgcaactgtgtctcctaggggacagatggccttctttgtcatcttcactctccacccccagagaggagtcagagccataactcaatcactcagcccctccaaagatagttgatgtgtgataatctcataatgttgagaaccctgatgagatacattgtcttcctctccctacaatgcctctggggccaaggcacccattcttcttgctatcctccatcccccttgaggcttccactttttttttttttagacataaagctgggcatcagcaactggcctgtggtgatgcaaagctgctttgctctgtatctggctggactgatctgtctcacaagaagccatgaggccatagggagaagctccctctccccttcatcttctgctccaaaggtggtagcaagaggagtacccagttaggggttggagcccccatataacatcttcctgtcagaagactgatggatctttttcattccaaccatctccctttcccccgatgaatgcaataaaactctgtgacaccagcaaccattgctctttagaaatgggttttctgatcatatggctgatgtgttatgggcagtatggatgtcttcatttgttgcttctgtttttcatcttttttgttttattaataaaaatttatgtatttgctcctgttactataataatacagggaataaattattcaatcc

SEQ ID NO: 4335 - DNA, 1947 bp, Homo sapiens
  source 1..1947: mol_type = genomic DNA
gggccaagcgcccccggaggcgctaagcttgcgccctgaggcggtttccgttcccggacgtttggactctgtcctggagaaggggaaggaaaaagtaagacgtagaagtacactgagacttcgtcacacataaaacaagcacgacaaagaaagagggcgcgaagggactcctggaagaaattgagtctacatttaagatcaccctaaaagtagtgacggcctcttcattactccaaaccccagatttaagtcggtaggacgtcttcgcgttgacttgtggggaatgtagtttcgatgctgccggcgcgttttgtttgcgacagaaactacaacccccaggggccaccgcgacgttgcctgtgggtgcccgcgaaccaacggttagcggtggcaggggctgactgagagcgtctgcttgataatggattctgaattaatgcatagtatagtaggaagctatcataaacctccagaaagagtatttgttccctcattcacccagaatgaaccatctcagaattgccatcctgcaaacttagaagttacctctcctaagatacttcatagcccaaatagccaagctcttattttagccttaaaaactcttcaggaaaaaattcatcgtttagagctggagagaacacaagctgaagataacctgaacattctttccagagaagcagcacagtataagaaggccttagagaatgaaacaaatgagagaaatctggcacaccaggagctgataaagcagaaaaaagatataagtatacagttaagctcagcccagtctcgttgtactcttctagagaagcaactagaatatacaaagagaatggttctcaacgtagagcgagaaaagaacatgatcctagaacaacaggcccagcttcagagggaaaaagaacaagatcagatgaagctgtatgcaaaacttgaaaagcttgatgtcttagaaaaagagtgtttcagacttacaacaactcagaaaactgctgaggacaagattaaacatttagaagaaaaacttaaggaagaagaacatcagcgtaagctatttcaagacaaagcttctgagcttcaaactggacttgaaatcagtaaaattataatgtcttcagtttcaaatctaaagcactccaaggaaaagaagaaatcttcaaaggtgtgcatataaaattttttcccaaacaaaaatactgctaatacttattcaggttaaaaaaagtagcagcagtcatgtacaaaatttagctctgagtttgcttgacaaccaaagcaaaaaggaacatataatggacagtatagctatctttgtgaaataacaggaagcactccagtttttctagaaagattaacatttttctagttttaaacttctggagaaacatattttgtgatagtttataaaagaggcagtaaacaacacagtagatactgacaacataataaatcctgaaagcagttttatgtaatatatagacaataaaaaataaggtttttcttatagacctgttaagtctgtaaagtcatttatatagggaatttattgttatatgtaatttctatgcttatttcttgtgaatttgcccaaaagtaaggattggagagttagtactttatagaccaatattttgtttagatggattgatgttttgaatgtatgctattcaagtaacccttcttaattatatataatggtatgaaaaaagtttttaatcccttttaatcttatgattgtggaattatggttttgatggccattattactatttattcagatatgaatggagtgagtgttctctgtgccatttgttgtgggggacaggagatgctatttgggaattctggccactgccatatgcttagcttgtggataaaataatggagagaacagtaaacttaactttggctactcttttattacgtaaataaaaattaatgttc

SEQ ID NO: 4336 - DNA, 2360 bp, Homo sapiens
  source 1..2360: mol_type = genomic DNA
agagcctgagcaggcagggcacctccaggtgggcaggagctaccactcagcaccatgagcaccgccacaggcacctggtgacgttctgcctgggtgaggacgatggcgtgcataccgtggaggatgcctccaggaagttggccgtcatggatagccagggccgagtctgggcacaggagatgctgctgcgagtgtctcccgaccatgtcacgctgctcgacccggcctccaaggaggagctggagtcgtacccactgggcgccatcgtgcgctgtgacgcggtgatgccacccggcaggagccgctcgttgctgctgctcgtgtgccaggaacccgagcgcgcgcagcccgacgtgcacttcttccagggcctgcgcctcggggcggagctgatccgagaggacatccagggggctctgcacaattaccgctcgggccgcggggagcgcagggcggcggcgctcagggccacgcaggaggagttgcagcgcgaccgctcgcccgccgctgagaccccgcccctgcagcgccgcccgtcagtccgcgcagtgatcagcaccgtagagcggggcgcgggccgcggacgaccccaggcgaagcccattcccgaggcagaggaggcgcagaggcctgagccggtggggacctcgagcaacgctgactcggcctccccggacctgggtccccggggtcctgacctggcggttctgcaggcggagcgggaagtggacatcctgaaccacgtgttcgacgacgtagagagctttgtatcgaggctgcagaagtcggcggaggcggccagggtgctggagcaccgggaacgcggccgcaggagccggcgccgggcggctggggagggcttgctgacgctgcgggccaagccgccctcggaggccgagtacaccgacgtgctgcagaagatcaagtacgccttcagcctgctggcccggctgcgcggcaacatcgccgacccctcctctccggagctgttgcacttccttttcgggcctctgcagatgattgtgaacacgtcgggggggccggagttcgcgagcagtgtgcggcggccgcatctgacatcggatgccgtggcgctgctgcgggacaacgtcactccacgtgaaaacgagctctggacctcgctgggggactcgtggacccgccccgggctggagctgtccccggaggagggacccccatacagacccgagttcttcagcggctgggagccgccggtcactgacccgcagagccgcgcctgggaggacccagttgagaaacagctacagcacgagcggaggcgccggcagcaaagcgccccccaggtcgctgtcaatggtcaccgagacttggagccagaatctgagcctcagctggagtcagagacagcaggaaaatgggtcctgtgtaattatgacttccaggcccgcaacagcagtgagctgtcggtcaagcagcgggacgtactggaggtcctggatgacagtcgtaagtggtggaaggttcgggacccagcggggcaggagggatatgtgccctacaacatcctgacaccctaccccggaccccggctgcaccacagccaaagccctgcccgcagcctgaacagcactcctcctccaccaccagccccagccccggccccacctccagctctggctcggccccgctgggacaggccccgctgggacagctgcgatagcctcaacggcttggaccccagcgagaaggagaaattctcccagatgctcatcgtcaacgaggaactgcaggcgcgcctggcccagggccgctcgggaccgagccgcgcagtcccagggccccgcgccccggaaccgcagctcagcccgggctcggacgcctccgaggtccgcgcctggctgcaggccaagggctttagctccgggaccgtggacgcgctgggtgtgctgaccggggcgcagcttttctcgctgcagaaggaggagctgcgggcggtgagccccgaggagggggcacgtgtgtacagccaggtcaccgtgcagcgctcgctgctggaggacaaagagaaagtgtcagagctggaggcagtgatggagaagcaaaagaagaaggtggaaggcgaggtggaaatggaggtcatttgacctgccaggcgcccttcgcaaagagtgacgaggccccgtgggagaacggactcctcagactctccccaatagcggaagtcgatcttctgaaggatggccaatctgctccggccctggtcttcccccatcccggtggacagacttaacgatccttgctgcagtccctccggagaggatctggactggctgggagtggggagggcgtggagacagtctacggaaagcgctagcaga

SEQ ID NO: 4337 - DNA, 3795 bp, Homo sapiens
  source 1..3795: mol_type = genomic DNA
aaggtccgcggggggcgagcgcgggtcgggggccgtcccggacccaccatgaacaccaagaagagagggagccccgcgcggactcactctatgatgtccctgtcggtgcggccgcagcgccgtctgctcagcgcccgggtcaataggagccagtccttcgcaggcgtcctcggcagccacgagcgggggcccaggagtttcccggtcttcagcccgccggggcccccacggaagccccccgcgctctcccgagtgtccaggatgttttccgtggctcacccagccgccaaggtgccgcagcccgagcggctggacctggtgtacacggcgctgaagcggggcctgacggcctacttggaagtgcaccagcaggagcaagagaaactccaggggcagataagggagtccaagaggaattcccgcttgggcttcctgtatgatctggacaagcaagtcaagtccattgaacgcttcctgcgacgactggagttccatgccagcaagatcgatgagctgtatgaggcatactgtgtccagcggcgtctccgggatggtgcctacaacatggtccgtgcctacaccactgggtccccgggaagccgagaggcccgggacagcctggcagaggccactcgggggcatcgcgagtacacggagagcatgtgtctgctggagagcgagctggaggcacagctgggcgagtttcatctccgaatgaaagggctggctggcttcgccaggctgtgtgtaggcgatcagtatgagatctgcatgaaatatgggcgtcagcgctggaaactacggggccgaattgagggtagtggaaagcaggtgtgggacagtgaagaaaccatctttctccctctactcacggaatttctgtctattaaggtgacagaactgaagggcctggccaaccatgtggttgtgggcagtgtctcctgtgagaccaaggacctgtttgccgccctgccccaggttgtggctgtggatatcaatgaccttggtaccatcaagctcagcctggaagtcacatggagccccttcgacaaggatgaccagccctcagctgcttcttctgtcaacaaggcctccacagtcaccaagcgcttctccacctatagccagagcccaccggacacaccctcacttcgggaacaggctttctataacatgctgcgacggcaggaggagctggagaatgggacagcatggtccctgtcatctgaatcttcagacgactcatccagcccacagctctcaggcactgcccgccactcaccagcccctaggcccctggtgcagcagcccgagccccttcccatccaagttgccttccgcaggcctgagacccccagctctgggcccttggatgaggagggggccgtggccccagtcctggcaaatgggcatgcaccctacagtcggactctgagccacatcagtgaggctagtgtagatgctgccttggctgaggcttcagtggaggccgttggcccagaaagcctagcctggggacctagcccacctacacacccagctcccacccatggagagcaccccagtcctgttcctcctgccctggaccctggccactctgccacaagctctaccctcggtacaacaggctctgtccccacatctacagaccctgccccatctgcacacctagactcagttcataagtccacagactctggcccttcagaactgccaggccccactcacaccactacaggctctacctatagtgccattaccactacccacagtgctccaagccccctcactcacactactacaggctccacccacaagcccataatctctacccttactactacaggccctaccctcaatatcataggcccagtccagactaccacaagccccacccacactatgccaagccctacccataccacagcaagccccactcatacttccacaagccccacccatacccccacaagtcccacccacaaaaccagtatgtcacctcccaccactacaagtcctacccccagtggtatgggcctagtccagactgccacaagtcccacccatcctaccacaagccccacccatcccaccacaagccccatccttataaatgtaagcccttccacttctctagaacttgctaccctctccagcccctccaaacactcagaccccaccctcccaggcactgactcccttccctgtagtcccccagtctccaattcctacactcaggcagaccctatggcccccagaactccccacccaagtcctgcccattccagtaggaaacccctcacaagccctgccccagatccctcagagtctacggttcagagtctaagccccactccctcacccccaacccctgcaccccagcattcagacctttgcctggccatggctgtccagaccccagtcccaacggcagccggagggtctggggacaggagcctggaggaggcactgggggccctaatggctgccctggatgactaccgtggccagtttcctgagctgcagggcctggagcaggaggtgacccgcctagaaagtctgctcatgcagagacaaggtctgactcgcagccgggcctccagtctcagcatcactgtggagcatgccttggagagcttcagcttcctcaatgaagacgaagatgaagacaatgatgttcctggggacaggcctccaagcagcccggaggctggggctgaggacagcatagactcacccagtgcccgccccctcagcacggggtgtccagctctggatgctgccttggtccggcacctgtaccactgcagtcgcctcctgctgaaactgggcacatttgggcccctgcgctgccaggaggcatgggccctggagcggctgctgcgggaagcccgagtactggaggcagtatgcgagttcagcaggcggtgggagatcccggccagctctgcccaggaagtggtgcagttctcggcctctcggcctggcttcctgaccttctgggaccagtgcacagagagactcagctgcttcctctgcccggtggagcgggtgcttctcaccttctgcaaccagtatggtgcccgcctctccctgcgccagccaggcttggctgaggctgtgtgtgtgaagttcctggaggatgccctggggcagaagctgcccagaaggccccagccagggcctggagagcagctcacagtcttccagttctggagttttgtggaaaccttggacagccccaccatggaggcctacgtgactgagaccgctgaggaggtgctactggtgcggaatctgaactcggatgatcaggctgttgtgctgaaggccctgagattggcgcccgaggggcgtctgcgaagggacgggctgcgggccctcagctccctgctcgtccatggcaacaacaaggtcatggctgctgtcagcacccagctccggagcctgtcactgggccctaccttccgggagagggccctcctgtgcttcctggaccagctggaggatgaggacgtgcagactcgagtggctggctgcctggccctaggctgcatcaaggctcccgagggcattgagcccctggtgtacctctgccaaactgacacagaagctgtgagggaagctgcccggcaaagcctacagcagtgtggagaagagggacagtctgcccatcgacggctggaggagtccctggacgccctgccccgcatctttgggcctggcagcatggccagcacagcattctaaactattcacccatgggttcctggtgcccctttccccccactttca

SEQ ID NO: 4338 - DNA, 1774 bp, Homo sapiens
  source 1..1774: mol_type = genomic DNA
gctcctcgcttcctccgcggtcttccgagcggtcgcgtgaactgcttcctgcaggctggccatggcgcttcacgttcccaaggctccgggctttgcccagatgctcaaggagggagcgaaacacttttcaggattagaagaggctgtgtatagaaacatacaagcttgcaaggagcttgcccaaaccactcgtacagcatatggaccaaatggtacagcatcctgctgcaaaaatgattgtaatggcttctcatatgcaagagcaagaagttggagatggcacaaactttgttctggtatttgctggagctctcctggaattagctgaagaacttctgaggattggcctgtcagtttcagaggtcatagaaggttatgaaatagcctgcagaaaagctcatgagattcttcctaatttggtatgttgttctgcaaaaaaccttcgagatattgatgaagtctcatctctacttcgtacctccataatgagtaaacaatatggtaatgaagtatttctggccaagcttattgctcaggcatgcgtatctatttttcctgattccggccatttcaatgttgataacatcagagtttgtaaaattctgggctctggtatcagttcctcttcagtattgcatggcatggtttttaagaaggaaaccgaaggtgatgtaacatctgtcaaagatgcaaaaatagcagtgtactcttgtccttttgatggcatgataacagaaactaagggaacagtgttgataaagactgctgaagaattgatgaattttagtaagggagaagaaaacctcatggatgcacaagtcaaagctattgctgatactggtgcaaatgtcgtagtaacaggtggcaaagtggcagacatggctcttcattatgcaaataaatataatatcatgttagtgaggctaaactcaaaatgggatctccgaagactttgtaaaactgttggtgctacagctcttcctagattgacacctcctgtccttgaagaaatgggacactgtgacagtgtttacctctcagaagttggagatactcaggtggtggtttttaagcatgaaaaggaagatggcgccatttctaccatagtacttcgaggctctacagacaatctgatggatgacatagaaagggcagtagacgatggtgttaatactttcaaagttcttacaagggataaacgtcttgtacccggaggtggagcaacagaaattgaattagccaaacagatcacatcatatggagagacatgtcctggacttgaacagtatgctattaagaagtttgctgaggcatttgaagctattccccgcgcactggcagaaaactctggagttaaggccaatgaagtaatctctaaactttatgcagtacatcaagaaggaaataaaaacgttggattagatattgaggctgaagtccctgctgtaaaggacatgctggaagctggtattctagatacttacctgggaaaatattgggctatcaaactcgctactaatgctgcagtcactgtacttagagtggatcagatcatcatggcaaaaccagctggtgggcccaagcctccaagtgggaagaaagactgggatgatgaccaaaatgattgaaattggcttaatttttactgtaggtgaaggctgtatttgtagtagtactcaagaatcacctgatgttttcttattctccttaaattaagagttattttgtgtttgtattcttggctggatgttataataaacatattgttactgtc

SEQ ID NO: 4339 - DNA, 2483 bp, Homo sapiens
  source 1..2483: mol_type = genomic DNA
atcttgcatgttggctagactagaaatcaaacaacttggaaatcgatcacaaccaggcattaagttcacaatacctttgtctggatatggaggaacaagcaatcttattttggaaggcgttaaaaaattatctgacagttacatggtaacagtgaatggcttagtacctggcaaagaaagtaaaattgttttttctgtccgcaacactggctcccgagcagcttttgttaaagcagtaggttttaaggattctcagaaaaaagttttgctggatcctaaagtattgaggatttttccagataaatttgtactcaaggaaagaacacaagaaaatgttactttaatatataatccatcagacagaggaatcaataataaaactgcaacagaactatcaactgtatacttatttggtggagatgaaatttcaagacagcagtatcgcagggtcattggaatgttttacaagagggaatttaatggcgacttgctacatgatgttagaacagaccaaatacaaagcttgcctttgaacctggttttgtttcttaattattttggaaatagaaactgacatttggagaaatcacattatgagggccctgttacataaaccagagatgataaaacagatacttccagaacatagtgtgcttcaaaacattaattttgttgaagcatttcaagatgagctattagtaactgaagtatatgatcttccccaacgacctaatgatgttcagctcttttatggaagcatgtgtaaaattatactttcagtaattggagaattcagagattgcatttctagcagagaattccttcagccttcttccaaagctagcttggaatctacaagcgacttgggagcttctgggaaacatggtggcaacgtctctttggatgttttaccagtcaaaggtcctcagggttctcctcttctctcacgggcggctcgcccgcctctggatcagctggcctccgaagagccgtggactgtcctacccgagcacttgattctggtagctccttctccttgtgacatggcaaaaactggacgtttccagattgtgaataactctgtgaggttactgagatttgagctgtgctggccagcgcattgcctcacagtcacgccgcagcatggatgtgtcgcgccagagagtaaactacaaattcttgtgagtcctaattcctccttatccacaaaacagtcaatgttcccgtggagtggtttgatctatatacactgtgacgatggacagaagaaaattgtgaaagttcaaattcgagaagatttaactcaagtggaacttttaactcgtttgacctccaaaccatttggaattctttccccagtatctgagccttcagttagtcatttggtcaaaccaatgacaaaaccgccttccacaaaagttgaaataagaaacaagagtattacttttcctacaacagaacctggtgaaacttcagagagctgtctagaactcgagaatcatggcaccacagacgtgaaatggcatctgtcatctttagcgccaccttatgtcaagggagttgatgaaagtggagatgtttttagagctacctatgcagcattcagatgttctcctatttctggtctgctggaaagccatgggatccaaaaagtctccatcacatttttgcccagaggtaggggggattatgcccagttttgggatgttgaatgtcaccctcttaaggagcctcacatgaaacacacgttgagattccaactctctggacaaagcatcgaagcagaaaatgagcctgaaaacgcatgcctttccacggattccctcattaaaatagatcatttagttaagccccgaagacaagctgtgtcagaggcttctgctcgcatacctgagcagcttgatgtgactgctcgtggagtttatgccccagaggatgtgtacaggttccggccgactagtgtgggggaatcacggacacttaaagtcaatctgcgaaataattcttttattacacactcactgaagtttttgagtcccagagagccattctatgtcaaacattccaagtactctttgagagcccagcattacatcaacatgcccgtgcagttcaaaccgaagtccgcaggcaaatttgaagctttgcttgtcattcaaacagatgaaggcaagagtattgctattcgactaattggtgaagctcttggaaaaaattaactagaatacatttttgtgtaaagtaaattacataagttgtattttgttaactttatctttctacactacaattatgcttttgtatatatattttgtatgatggatatctataattgtagattttgtttttacaagctaatactgaagactcgactgaaatattatgtatctagcccatagtattgtacttaacttttacaggtgagaagagagttctgtgtttgcattgattatgatattctgaataaatatggaatatatttt

SEQ ID NO: 4340 - DNA, 1991 bp, Homo sapiens
  source 1..1991: mol_type = genomic DNA
agagcggaggcggtggtggtggcggccgctggccagttccttcagtgaatctacagacctattttctcaggagctcagcctggccttacttcagtgataaaaggaggaaaggctggctacagcaaacatcattcaagatgtccagcaaagggagcagcacagatggcagaacagacttagctaatggaagcctgtctagcagtccagaggagatgtctggagctgaagaggggagggagacatcctcaggcattgaagtggaggcctcagacctgagtttgagcttgactggggatgatggtggccccaaccgcaccagcatggaggacactggtcattactccattaatgatgaaaatcgagtccatgaccgctcagaggaagaggaagaggaggaagaagaggaggaagaagagcagcctcggcgccgtgtacagcgcaagcgggctaaccgtgaccaggactcatcagatgatgagcgggccctagaggactgggtgtcctcagaaacatcagctctaccccgacctcgctggcaagccctccctgcccttcgggagcgggagctgggttcaagtgcccgctttgtctatgaggcctgtggggcaagagtctttgtgcagcgtttccgcctgcagcatgggcttgagggccatactggttgtgtcaataccctgcactttaaccagcgcggcacctggctggccagtggcagcgatgacctgaaggtggtggtgtgggattgggtacggcggcagccagtactggactttgagagtggccacaaaagtaatgtgttccaggccaagtttcttcctaacagtggtgattctactctggccatgtgtgcccgtgacgggcaggttcgagtagcagaactgtctgccacacagtgttgcaagaatacaaaacgtgtggcccagcacaagggagcgtcccacaagttggcactggaaccagactctccctgtacgttcttatctgcaggtgaagatgcagttgttttcaccattgacctgagacaagaccgcccagcgtcgaaactggtggtgacaaaagagaaagagaagaaagtggggctgtatacgatctatgtgaatcctgccaatacccaccagtttgcagtgggtggacgagatcagtttgtaaggatttatgaccagaggaaaattgatgagaatgagaacaatggagtactcaagaagttctgtcctcatcacctggtgaacagtgagtccaaagcaaacatcacctgtcttgtgtacagccacgacggcacagagctcctggccagttacaatgatgaagacatttacctcttcaactcctctcacagtgatggggcccagtatgttaagagatacaagggccacagaaataatgccacagtaaaaggcgtcaatttctatggccccaagagtgagtttgtggtgagcggtagtgactgtgggcacatcttcctctgggagaaatcatcctgccagattattcagttcatggagggggacaagggaggcgtggtaaactgtcttgagccccaccctcacctgcctgtgctggcaaccagtggcctagaccatgatgtgaagatctgggcacccacagctgaagcttccactgagctgacagggttaaaagatgtgattaagaagaacaagcgggagcgggatgaagatagcttgcaccaaactgacctgtttgatagtcacatgctgtggttccttatgcatcacctgagacagagacgccatcaccggcgctggcgagaacctggggttggggccacagacgcggactctgatgagtctcccagctcctcagacacatcggacgaggaggagggccctgaccgggtgcagtgcatgccatcttgaggcctcatacctaggtggggcaggctggggctgccaacctgatcctgcctgggcaaccctttcctgtcccaggccctacattcagcagaaacgcactttggactttttgctttagat

SEQ ID NO: 4341 - DNA, 930 bp, Homo sapiens
  source 1..930: mol_type = genomic DNA
cgccgggacttcccgccccttcctgggggctgcctgacctcggactgtggctgggggtgcatgttacgcagcggccagatgatgctggcacagggccttctgctgcatttcctgcccagaggaactcctgcgttgcgagctgtgcctgggcatcatgggtgggaaaccgcgacactcactgtacttcattggctaccaagatgacttcctgctgtacctggaccctcactactgccagcccactgtggatgtcagccaggccgacttccccctggagtccttccactgcacctcgccccgcaagatggcctttgccaagatggacccaagctgtaccgtgggcttctatgctggagacaggaaggagtttgagacactctgctcagagctgaccagggtcctcagctcctcctcagccacagagcggtaccccatgttcaccctggccgagggccatgctcaggaccacagcctggacgacctctgctcccagctcgcccagcccacactccggctccctcgcacagggcggctcctcagggccaaacgccccagctctgaggactttgtgtttttataaagggaggggatgaggggaaagatacaacactatttatttttttatttatgtcatgtcgggtgtgggatcttgagctctggcagtgatgatggtacttcctgttgtcagcccctcaagcccagctgcaaccagtctggggccattcagccagggacagagcccacagagcccatacacctgtctcccaccagcggggccctcctggcagggtagggaaggaggaccccgggcacccccctcagggcctgactcacgtactgtagtttgcactggacgcccgggccctccctgtcccaaagcccccttgggggaactgtggctgctgggggccaataaagctgtgtaacttg

SEQ ID NO: 4342 - DNA, 1556 bp, Homo sapiens
  source 1..1556: mol_type = genomic DNA
agaatcagctgtcctctcagactgtgtgggtggtttccccggccgcagctccgtacgggcttggattgctgggcctcggtgcaccccagcctcccccactcgggttctgagcttgagctggcggctctttaactctgcttcactgttgctcttggcaacatccacttccgggagcgagtgccgtttcccccgctcaccgcgggctagggagcgtgggattccggactgtgagcggctgttagtgcgtcgcagctgctggcgatccggcgaccctcggccggcaggacccgcgggccacgcagccggggccttctcaacgcctcagtacctcggcgggaccgccatggttctgctgcacgtgaagcggggcgacgagagccagttcctgctgcaggcgcctgggagtaccgagctggaggagctcacggtgcaggtggcccgggtctataatgggcggctcaaggtgcagcgcctctgctcagctccaaatgagaagatgaagcaagtgttaaagaagactatagaagaagccaaagcaataatatctaagaaacaagtggaagccggtgtctgtgttaccatggagatggtgaaagatgccttggaccagcttcgaggcgcggtgatgattgtttaccccatggggttgccaccgtatgatcccatccgcatggagtttgaaaataaggaagacttgtcgggaacacaggcagggctcaacgtcattaaagaggcagaggcgcagctgtggtgggcagccaaggagctgagaagaacgaagaagctttcagactacgtggggaagaatgaaaaaaccaaaattatcgccaagattcagcaagtaagtactttttgctttaatgtgtcagtagtttttgttatttcccttcaaactgataaaaatgtacagtgaatccgaaagatttaaactactggtacaaatattttaatcttattggctcgggtttaaactaaaaatatcctcttcctgcacaccaacaaaaactggaagaaaatatggattgagtaccaatatctagagtttgttttaatatgtgggggagaggaaatatactatgttaatttcaagcgtaaaaatagggctgcaagtaaacagatatgttccttgaaatgtaaaatttcgcccgtcactgatttcaggctttttcaaactgctgatgctgtgtacaggagggggaggaggaaaggttcgagacctttgaaggacatcgtgtagcgctgtaacctgaggggccgccttggttttgtgggtgctcctacgtcactaggctgtgattttggggaaatggggccctccaccttatgtagatccagagtccgtggctctgagcatcctccctttcccactggacctgcctgcagtgtctgccttgggaatggtcaagacagagatggtatcgtgcagcctctggtctccacacagtgagagtccagggctcagggctgctcaagaccaaggcttcccttgatgcttcacttcgggtgatcagacatgggggacctgtttatctttagtagccggcaaaggcaatcgt

SEQ ID NO: 4343 - DNA, 3305 bp, Homo sapiens
  source 1..3305: mol_type = genomic DNA
tgggcatgtgagtgtggcacacctcctgttggatcacggggctgatgtcaatgcccagaaccggctgggggccagtgtgctcactgtggcttctcggggcggccacctgggtgtggtgaagctgctcctggaagccggtgcctttgtggaccatcaccacccttcaggcgagcaactggggttgggcggcagcagggatgagcccttggacatcacagccctgatggctgccatccagcacgggcacgaggccgtggtgcgtctactgatggagtggggcgcggaccccaaccacgcagcccggaccgtgggctggagcccgctgatgctggccgcactcactgggcggcttggagtggcccagcagctggtggagaagggcgccaaccctgaccacctcagcgtgctggagaagaccgccttcgaggttgcactggactgcaagcacagggaccttgtagactacctggacccgctgaccaccgtcaggcccaaaacagatgaggagaaaaggcgacctgatattttccatgcattgaaaatgggaaacttccagctggtcaaagagattgccgatgaagaccccagccacgtgaacttggtcaatggggacggggcgacgccactgatgctagcagctgttacggggcagctggctctggtgcagctgctggtggagaggcacgcggatgttgacaagcaggacagcgtgcatggctggacggccctcatgcaggcaacctaccatgggaataaggaaattgtgaaatatctgctaaaccaaggggccgatgtcactcttcgtgcaaaaaatggatacacggcctttgacctggtgatgctgctgaatgatcccgacacggaacttgttcgactgctggcatctgtctgcatgcaggtgaataaagacaaaggccggccgagccaccagcctcccctgccccactcgaaggtccgacagccctggagcatcccagtgctgcccgatgacaagggtggactgaagtcctggtggaaccgaatgtccaatcggttccgaaagctcaaactgatgcagacgctgccccgtgggctgtccagcaaccagcctttgcctttctctgacgagcctgagccagctctggactccacaatgagggctgccccccaggacaagacaagccgctctgcactccctgatgcggcccctgtgaccaaagacaatggtcctgggagcacaagaggagaaaaggaagacacgttattgacaaccatgcttcgaaacggagctcccctcaccagactcccgagtgacaagctgaaagcagtcatccccccattcctacccccttccagttttgagctgtggagctctgatcggtcccggacgcgtcacaacgggaaggcagaccccatgaagactgcgctgccccagagagccagcaggggccaccccgtgggcggcgggggcacagacactacacccgtcaggcctgttaaatttccaagcctccccagaagcccagcctcttctgccaattctggaaacttcaaccactcgcctcattcatcgggcggctccagtggggtaggtgtgagccggcacggtggggagctgcttaaccgctcaggtggcagcatagacaatgtcttgtcccaaatcgctgcccagaggaaaaaagcagccggattattggagcagaaacccagccatcggtcaagccctgtggggccagcaccggggtccagcccgtctgagcttccagcctcccctgcaggtggcagcgctcctgttggcaagaaattggagaccagcaaaaggcctccatctggaacttccactacctccaagagcacctctccaaccctcacgccctccccctcacccaaagggcacactgcagagtcctcagtgtcttcctcgtcatcccatcggcagtccaagagcagtgggggctccagcagtggcaccatcacagatgaggatgaactgactggaatccttaagaaattatcacttgagaaatatcagcccatttttgaggaacaagaggtggacatggaagcgttcctcacactgactgacggtgacttgaaggagctgggaattaagacagatgggtccaggcagcagattctggcagcgatttctgaactgaacgcaggcaagggacgcgagagacaaattttacaggaaaccattcacaactttcactcttcctttgagagcagtgccagcaacaccagggcccctggcaacagcccctgtgcgtgatcctccttcccgcagccaccagcgtgagctctctgaatcccgggaccccttcacgtggccacagccccagccctgcccccgtcacactgctgtgccttagtcatgttgttccctttgctcgggatgcccacttcacgtcgacggcattcattggtagtacttcttgctgcaacaaacttcaacacacagagacagattcccatgtaacagtccagtgggggtgcttctgcttggcaggttggttcacacagtgatgcagggactcagctcctttcatcctgtgctctgccctccccgggagcctcagagtttgcttctggctggcggcaagggaaagggacgatggagaaggcacggctgcttcttacctgccttgctcttaactgacacacatcactcctgctcacgtcctcttggccactggtagtcatgtggccccacctggatgcagaggaggccaggatgtgcagtctccacatagtggcttcccagcaacaacttttgacttagatgggggccatggttgggtgggtgaggccagaagaaactgcctccggcaagaggtagcagccgctcaggtggctctgctggcatcggagcccacagaagtgaggagtggccgatggacctgccctccaaatgtgcctgactctgggtcttgctgtcactggatttcctggcatggcagacagaaagaaagatagtttgaccaagtcgtagaagctgatccagcgggtaaaaagggggcagggaactcgtcccttttattcttgcctcagagctgcctgaagacatgggccaggccggaggctggacaactttggataacgctgacctgtacttccaagtaaatgcctcctgaagagcccgggacccttcctgggagaattctgcagccagaatgaaggtgccatcagcaggaggcactgtgaagcaccatcctgtcgctgtccttgtccattcctagcaagttaatcgtgtcttgttaaccagcagttcctgttcaacgtgtaaagagacctgatgttttccctaataaagctgataacag

SEQ ID NO: 4344 - DNA, 3112 bp, Homo sapiens
  source 1..3112: mol_type = genomic DNA
ctcgggtcagactaccggcggcgacgaccacaggagcatggcggacaccgacctgttcatggaatgtgaggaggaggagttggagccatggcagaaaatcagtgatgtcattgaggactctgtagttgaagattataattcagtggataaaactaccacagctggcaatcctttggtccagcaaggtggacagccactcatcctgacccagaatccagccccaggtctgggcacaatggttactcaaccagtattgaggcctgttcaggtcatgcagaatgccaatcatgtgactagttcccctgtggcctcacaaccaatatttatcactacgcagattcatgaaccatatgaaacaccacgtagaactcgatcagcagaacggtgaggtagatggtcacactatctgccagcactgttaccgccagttttccactcccttccagcttcagtgccacttggaaaatgttcatagtccctatgaatctactaccaagtgcaagatctgtgaatgggcgtttgaaagtgagccactatttctccagcatatgaaggatactcataagcctggagagatgccttatgtttgccaggtgtgtcaatatcgctcctcactctactctgaggtagatgtccattttcggatgatccatgaggatacccggcatctgctctgcccttattgcctgaaggtcttcaaaaatggcaatgcattccaacagcattacatgaggcaccagaagagaaatgtttatcactgcaacaaatgccggctgcagtttctctttgccaaggacaaaattgaacacaagcttcaacaccataaaaccttccgtaaacccaagcagctggagggcttgaaaccaggcaccaaggtgacaatccgggcttcccgagggcagccacgaactgttcctgtatcctctaatgatacacctcccagcgccttgcaggaggcagcaccgctgacctcctcaatggaccctctgcctgtcttcctttatccccctgtccagcgcagcatccagaagagagctgttaggaaaatgagtgtcatgggccggcagacatgcctggagtgcagcttcgagatcccagacttccctaatcatttccctacttacgtacactgctctctgtgtcgctatagcacctgctgttctcgagcttatgccaaccacatgatcaacaatcatgttccacggaagagccccaagtatttggctttgtttaaaaattctgtgagtggaatcaagctggcctgcacttcatgtacctttgttacctctgtgggcgatgctatggccaagcatttggtattcaacccctctcacagatccagcagcatcctgccacggggactcacttggatagctcactcaaggcatggccagactcgtgaccgagtgcatgaccggaacgtgaagaatatgtaccctcctccttccttccccactaacaaagctgccactgtgaaatctgcgggggccaccccagctgagcctgaagagctactaactcccttagccccagcactcccatcaccagcctcaactgcaaccccaccaccaacccccactcacccgcaggctttagcccttccaccgctggctacagagggagccgaatgtctgaatgttgatgatcaggatgaagggagcccagtcacccaagaacctgagctagcatcaggtggtggtggtagtggtggagttggcaaaaaggagcagctgtctgtgaagaagcttcgagtagtactgtttgctctatgctgcaatacagaacaggcagctgaacacttccgaaatccccagcgacgtattcgccgttggcttcgacgtttccaggcctcccagggggagaatctagagggcaaatatctgagctttgaggcagaagagaaactggctgagtgggtgctaacccagcgcgaacaacagctacctgtaaatgaggagaccttgttccagaaggccaccaaaataggacgttctttggaaggggggtttaagatctcctatgagtgggctgtgcgtttcatgctgcggcaccacctgactccccatgcccggcgagctgtggcccacaccctacctaaggatgtagcagagaatgcaggactcttcattgattttgtacaacggcagattcacaaccaggacttacccttgtctatgattgtggctattgatgagatctctttgttcctggatacagaggtgctgagcagtgatgatcgaaaggagaatgccctgcagacagtgggcacaggggaaccttggtgtgatgtagtcctagccattctggcagatggcactgtccttcccaccctggttttctacagagggcagatggatcagcctgctaacatgccagactccatattgctagaggcaaaggagagtggctacagtgatgacgagatcatggagctgtggtcaactcgagtgtggcagaagcacacagcttgccagcgcagcaaaggcatgcttgtgatggactgtcatcgcactcacttgtcagaagaggtactggctatgcttagtgcctctagcactttgcctgcagtggtcccagcaggctgtagctccaaaattcagccattagatgtatgcatcaaaagaactgtcaagaacttcctgcataaaaaatggaaggaacaggctcgggaaatggcagatactgcatgtgattctgatgtcctgcttcagctggtgcttgtctggctgggtgaagtgctaggtgtcattggggactgtccagagctagttcagcgctccttcctggtggctagtgttctgcctggccccgatggcaacattaactcacctacaagaaatgctgacatgcaggaggagctaattgcctccctagaggagcaactgaagctgagtggggaacattctgagtcttccactccacgacccagatcatctcctgaagagacaattgagcctgaaagtcttcaccagctctttgagggtgaaagtgagaccgagtctttctatggctttgaagaagctgacctagatctgatggagatttgagtgttggggtcatgagggggtgtggagtgagggtgggaacatgtgagggagggtaaaggggctta

SEQ ID NO: 4345 - DNA, 463 bp, Homo sapiens
  source 1..463: mol_type = genomic DNA
gtgcggaggctgagccggccgcgggcgcgaccggaggcaggcatctgaatttcatttgaaaatgaaatgggctgcacagtctggagaagtgtactataccttgttatagcacgttttggaatgacccagaattcagaatgaaatgggcagctatgagccccatccaaagtttccgttactatggcaatgacggcagggactacaacaacctttcctatgagcaaccatacccgggaaagagtgactgtagccaagctcacattggagaatttttatagcaacctaattttacagcatgaagagagagaaaccaggcagaagaaattagaagtggccatggaagaagaaggattagcagatgaagagaaaaagttacgtcgatcacaacacgctcgcaaagaaacagagttcttacggctcaaaaggaccagacttggcttggatgactttgagtctctgaaag

SEQ ID NO: 4346 - DNA, 5228 bp, Homo sapiens
  source 1..5228: mol_type = genomic DNA
cgagggaggagactcccgtcagtgacttcattgagtaggttcttggggattggggtcgggtcctccccagtgagaggcgacaggagctcactgcctctcgggccctcacaatcacacctgtcacaggtatacacgctgccactcacaaacacacgcttgcactcccagcctcactgacacgctgccatacagccgctcacagccagccagacactgctgcacctgagagcaggtggccgcgggtcttctcccttcactctccacatttggggatcaggtccggcacctgctgcgccagacaggccttgctgggcacgcgcctctgagagtccaaggaggtggcttccagagctgcagcacttcaggccggctccggtggagcgatcagaggtgaggggcttggctgggcatgtttaagcgcacagtgctctcctgcccacccccagcagcacccccactgcaggcccgaggagctttccggagcttcccacactcctggggagaagacttcttagccagcttgatgtttaaaattcagctggagcccttaaaacttcgagcgtggacgctgaatgggtttgtaaagtttcggtaagtccctccggagaagggcactcacacccatacccagtcaaaccctccacgcggccatcccctccattgccttcctgcttcctccaactcatcctcatcccctctgtgacatacaggaacccccctccggcctcacccacatatttgaatgaattgcaccccttatcattccttttctcaaacccttcaggtatccattttccacagacatttcctccattatttcaactctccacattcctccctttcaacccatcattaacccattttccacctcagccatttccatctgtcactcatccccctccatcagtacctcattttctgtatcagccatctcccctccctgtacctcaacagtccccctcgccattttctccccatttttccttcctgcctctaccttaacatcctcctcattcttctccatcaaaggcagtgccatgccatggggctcctttgtcattccaacacgtggcctgtgggtaggggggaagggaaggagggaggaaagcagaaagagaaaaaggaggcagatcctgaaagagcttgccctgtgtctgcggaggcaagagatgtatgggcctagagcagctagcaggtgggtaccagggaggaagctggccgggtgtggaggtaatgcagggacaccaaaaggaggtgggtggttggtgagccgttccactggccctctgcctggaagctgctctcgttctctaggggcaccctcttggtgtgctagggttctttcccagtcccaggggaaagaaggtgtgggttgaggcagaaatggcagaccacccccccccgctccctctcagacggcttttgctgccatttccgaaaacggttgcccccccccccaacgaggtgctctttcttctctgcctctcccaaccccaccccccaccccatctcccccacagacgtgacatgctggtggggggcaatgggggagtacccgcctttgtggagccttttcttcgtcagagaaaggtgactcccagaaccatgagtcaacccagccacctgcagcagggcctgtgggggcagcagtgagggccattgtccctgcccacctagggccttgggcgcctcccccttacccggttacaggcctcactcctggaaggacaccctgtacacctccctgctgtgaagcagtcagaggcagaaaggcaggtctcagctgtggctgccagcctaggacattgctagaaagactctggttctcctggctttggcaggggttggccaagtctcagaagggctgagaatggcttctggccatcccccagagagctctagctacaggaaagtcccccttcccctgatatccaccacagacacaccgatagagggagactggaatggaagaattcgggttgtacgtttctcttataacaaatgctcctgcacccaccttaaaagggactcagaggaatatgggtctgatgatgggccggatcctaaaccacagggtggactgggggcgtagggtgaggctaggagaggtattaaggaaatggtggttggttagtgcccaattgtctcctaacagctggggttgaaaaagtcctgtccccaggatgcttttgttcactcacactggtgcttaggcggcacagccctcacagttttgtgtgtagacgctggcaaatgagtaaagggaactgttgccctggttgggggaaggatagtgtcgccccccctgctaatgagggagttggaaacagcagtttccaaaggctgtgagtcaccctgtgatctgagtcacacgtgaggcttagcatcgtcagaggggtgggggcggggaggcctggggtctccgatggcagacaggactccagacacccattccctgactcagtctggctggccaggacagctggcggaagacccaggcctgttcccggtcctgggccactgccccagctgccctcagcctgggcaccatgcctgaggcgtggcgtaggagaccacgatgctcaggtgacctcacccgttacactgaccttcgccagctcctgtgtgtgggtcgctcagtccatggtgccacctcgctcagcagggcctctcaggggtcctcagtctggcccaaggaccagggcctcagcctagccccaagagtgggccacaaccttcagcttcctgctgggaaaacccaggaggtgaggacggaatcacagaattctagaatgtcagagccagaagagatcatctagtccaaacctttcattttacagatggggggacgcaggcccacagaacaggcatgacctgctgaaggttacccagggagtcatttagggattgcaagatcatcaggaacagggctggggcagaagagaaggcatcaagtcttggccctgggtttctttcagaaacaaggagaccagtgctggtccagtggctgtgatgggaaaagattattacaagattcttgggatcccatcgggggccaacgaggatgagatcaagaaagcctaccggaagatggccttgaagtaccacccagacaagaataaagaacccaacgctgaggagaagtttaaggagattgcagaggcctatgatgtgctaagtgaccccaagaaacggggcctgtatgaccagtatggggaggaaggcctgaagaccggcggtggcacatcaggtggctccagtggctcctttcactacacctttcatggggacccccatgccacctttgcctccttctttggtggctccaaccccttcgatatcttctttgccagcagccgctccactcggcccttcagtggctttgacccagatgacatggatgtggatgaagatgaggacccatttggcgctttcggccgttttggcttcaatgggctgagtaggggtccaaggcgagccccagaaccactgtaccctcggcgcaaggtgcaggaccccccagtggtgcacgagctgcgggtgtccctggaggagatctaccatggctccaccaagcgcatgaagatcacaaggcgtcgcctcaaccctgatgggcgaactgtgcgcaccgaggacaagatcctgcacatagtcatcaagcgtggctggaaggaaggcaccaagatcaccttccccaaagaaggcgacgccacacctgacaacatccctgctgacatcgtctttgtgctcaaagacaagccccatgcacacttccgccgagatggcaccaacgtgctctacagtgccctgatcagcctcaaggaggcgctgtgtggctgcactgtgaacattcccactatcgacggccgagtgatccctttgccctgcaatgatgtcatcaagccaggcaccgtgaagagactccgtggggagggccttcccttccccaaagtgccaactcagcgaggagacctcattgttgagttcaaagttcgcttcccagacagattaacaccacagacaagacagatccttaagcagcacctaccctgttcctaggctctgccccagccagtccagagcctaccacagcaatacccccaacactcactccactcaatgtgcacccagcttgatgtccactggacactggcaactttttctaaaatgcaaaaaaaagccactggttttcaggaaaatgttcctgtccctgaccccttttagagctgggctgcctggggggagtgggagggaggtggggagagctagcccaggccaggggtcaatgttcatgtcactagctttcaatccagtttccactgcagtggctggagagtgacctgagtgctacttgaagatatgtagagattccttatccatgcctgtacatagcatgtcctcctcccctcagctttgctaataccagtcccctcccttccctttggcttcctgctgttgggggtggaaaagactagaaaggacattgctttctcagccccacccccaggtccacagtgtccaaggtaatggcacacatattcatgcacaagaagcactcacctagagctgtctgtgcctctctgggagaaaggagagaggataagaagggaaagttcacaacctgtgaacagggacttgagcacgagacacttttcatctggagcaggggggtgagctcctcagcagcctccgtaacagctgccctgcctacacctgcagagctggaggttctgtcctccctgctgctctcaggagtgttcaagggtggagggcagggaatggggcctgaggtattaaggctaagaggtgggggacagggcccatctaccagccttcatcaggaagggaaagggctttggggtcaggtggcagctattccccaccaagagattcagggtcacaggtttttccccacacctctgaactcagggcctagccacccccaaacttccaaatcccacttttgtgatatgtgaagctactcatttcttacccttggaggctgtgtggggaatttccagcccttttatgcctgtgtgatcccaccccacccccatagttgtataaaggtcatagtgaagaagctgggggaagactgcttcagccagatcctggggtggggtctttaggttttctcactttgacaacccccgaatgtttttatagtagtttttttgtatttttttgtaatgacagtattatgtaaaaaataaagtattttaaaaata

SEQ ID NO: 4347 - DNA, 1638 bp, Homo sapiens
  source 1..1638: mol_type = genomic DNA
cgcggctgagcctctttgtctgagcgcgctcggcttttttttttttttctctctccttccctgcagcagtggccggtgtccagctgcctactttctgcccggatctctggctcctcatctctccggtctccgcagactaaagccctcgggatatgcagcagccatgcctgtgcacacgctgagccccggagccccgtccgcccccgccctaccttgccgcctgcggaccagggtccctggctacctgctacgggggccggcagatggtggagcccggaaaccgagcgctgtggagcgcctggaggccgacaaggccaagtacgtcaagagcctgcacgtggccaacacccgccaggagcctgtgcagcccctgctgtccaaacagccgctctttagccctgagactcgccgcacagtgctcacgcccagccgccgagccctgcctggcccctgccgacggccccagctggacctggacatcctcagcagcctcatcgacttgtgtgacagccccgtgtcccctgccgaggccagccgcactcctggacgggccgagggagccggccgtcctcccccagccacccctccgcgaccgccgcccagtacctctgcggtccgccgggtggacgtccgccccctgcccgcctcgcctgcccggccctgcccatcacccggccctgccgccgcctccagcccagcccggccgccgggtttgcaacgctccaagtcggacttgagcgagcgcttttctagggcagccgctgatctcgagcgcttttttaacttctgcggcctggacccggaggaggcgagagggttgggtgtggcccacctggcacgggccagctcggatatcgtgtccctggcagggcccagtgctgggccgggcagctctgaagggggctgctcccgccgcagctcggtgactgttgaggagcgggcccgggagcgcgttccctatggcgtgtcggtggtggagcgcaatgcccgcgtgatcaagtggttgtatgggctaaggcaggctcgggagagcccagcagctgaaggctaggcgccactgggcctggaattcgccacaggacggatcttacagaggcaagtggtccctggacctctcttgcatccattctctagacggccgtgtcagaggctccaccctgttgtgaacttggtatggaggcaaaggcttagaggctggaccagcattgttgggcaaggactgactctccaagggttttgttcttggctttggacacctgagaaccccctcctcccctcccccaatacaaggtttttgacatgagtgtactcctgcttagttcctcttgtggggctgcatttgcggtgctttgccctccccactgtgagtgaggggccaagggatctcctcaatcctgtctccccagcggctctgtttcctccttccttccttggcctctgtcctttgctgacttcctcttccttacccagcagaactcaccctggggtcggggcagtggggaggggcctatccactgctcttcctagtccttggcagctggcctaggtgggcagactataggagggactggttaggagtctgcattgctttgacttccctctccttggttaataaacacaaatgcttgtttctcaagg

SEQ ID NO: 4348 - DNA, 545 bp, Homo sapiens
  source 1..545: mol_type = genomic DNA
caacggaccctacctcttgtagtgattctcggggccacgggcaccggcaaatccacgctggcgttgcagctaggccagcggctcggcggtgagatcgtcagcgctgactccatgcaggacctggtcccattgtcccccctgtctatggcttagaggtatctgatgtctcgaagtgggaagagtctgttcttgaacctgctcttgaaatcgtgcaaagtttcatccagggccacaagcctacagccactccaataaagatgccatacaatgaagctgagaacaagagaagttatcacctgtgtgacctctgtgatcgaatcatcattggggatcgcgaatgggcagcgcacataaaatccaaatcccacttgaaccaactgaagaaaagaagaagattggactcagatgctgtcaacaccatagaaagtcagagtgtttccccagaccataacaaagaacctaaagagaagggatccccagggcagaatgatcaagagctgaaatgcagcgtttaagagacatgtccagtggcctttggaaaggtg

SEQ ID NO: 4349 - DNA, 545 bp, Homo sapiens
  source 1..545: mol_type = genomic DNA
acggcagtgaggtgaggctggtgagaggggaagtggcgacagttcagtcaactccctcaaaaccagtctggccttcaccaggcggagatgggtggggccgggaagacgggcgttgacgacagaaggctacttccggctgtgtttccgttactatggcaatgacggcagggactacaacaacctttcctatgagcaaccatacccgggaaagagtgactgtagccaagctcacattggagaatttttatagcaacctaattttacagcatgaagagagagaaaccaggcagaagaaattagaagtggccatggaagaagaaggattagcagatgaagagaaaaagttacgtcgatcacaacacgctcgcaaagaaacagagttcttacggctcaaaaggaccagacttggcttggatgactttgagtctctgaaagttataggaagaggagcttttggagaggtgcggttggtccagaagaaagatacaggccatatctatgcaatgaagatattgagaaagtctgatatgcttgaaaaagagcag

SEQ ID NO: 4350 - DNA, 585 bp, Homo sapiens
  source 1..585: mol_type = genomic DNA
gttttaaaagattataagtaaatactctgctctttcaagtgaaccaaacctatcaaacctgtttagaaaataaaccaggcagaataaaatgatgcgaaatgttcattttaaaaaacttcaggatgggcacaaacacacagaagtgggaaatgaataaaagagtattgataaatttttgaaaattgttgaagctgagtaatgggctttcagtccagtgtaaagctgttggagcgcgggagcaaaggtaaagaatgatgtaatgcgctggctgctccaaagcatcttttgttgtggaatggttattccagtcatctctttatgaatcaaatgtgaggggctgctttgtggacggagtcctttgcaagagcacatcaacgggaaagagaaagagacattcacttggagggctcttgctgaaaatgggtttaactctccttttgccagtcaccaccagcctgacctcatacacttttagtacaatggagtggctgagcctttgagcacaccaccattacatcatcgtggcaaattaaagaaggaggtgggaaaagaggacttattgttgtcatggcccatgagatgatt

SEQ ID NO: 4351 - DNA, 2674 bp, Homo sapiens
  source 1..2674: mol_type = genomic DNA
agttcacccgcggcggagggtaactttgctgtgctgttttttgagcagttgtctggtccctggaagtgtagcatcgagagagttttctaattacgtttacaaaatatcttccctttggccatacaagtggtgactgccatgtcgaactcgcggcccaggtcccgccgagacgccgggggtggcgctggggcagccggccgggacgagctggtgtcgcggtccttgcagagcgcagagcactgtctgggcgtccaggacttcggcactgcctatgcccactacctcctcgtgctcagcctggcgccggagctgaaacacgacgtgaagaatgggctttagggatgaagcagctgggtattttcataaagcagtgaagctaaaccctgatttcagtgatgcaaaggagaatttttatcgtgttgcaaactggttggtggaacgctggcactttatcatgcttaatgacaccaagaggaatacaatttataatgcagcaatccaaaaggcagtttgtttggggtccaaaagtgttttggacattggagcaggaactggaatactaagcatgtttgctaaaaaagctggagcacattccgtgtatgcctgtgagttatccaagaccatgtatgaacttgcctgtgatgtcgtggcagcaaacaagatggaagcagggatcaaactcttacatacgaagtcacttgacatagagattccaaaacatattcccgaaagagtgtccctagttgtaacagaaactgtcgatgcaggtttatttggagaaggaattgtggagagtttgattcatgcatgggagcatttacttttacagccaaagaccaaaggtgaaagtgctaattgtgaaaagtatgggaaagttataccagcaagtgctgttatatttgggatggcagtagaatgtgcagagataagaagacatcatagagtgggtattaaggacattgctggtatccatttgccaacaaatgtgaaatttcagagtccggcttattcttctgtagatactgaagaaacaattgaaccttatacaactgaaaagatgagtcgagttcctggaggatatttggctttgacagagtgctttgaaattatgacagtagatttcaacaaccttcaggaattaaaaagtcttgcaactaaaaagcctgataagattggtattcctgttattaaagaaggcatactagatgctattatggtttggtttgtgctccagcttgatgatgaacatagtttatccacaagtcctagtgaggaaacatgttgggaacaggctgtctaccccgtacaggaccttgcagactactggataaagcctggagaccatgtgatgatggaagtatcttgtcaagactgttacttaagaatccagagtattagtgtcttgggtttggaatgtgaaatggatgttgcaaaaagttttacccagaataaagacttgttatcgttaggaaatgaggctgaactttgtagtgccctcgctaaccttcagaccagtaaaccagatgctgtagagcagacatgtatattggaatctacagaaattgctttgcttaacaacatcccatatcatgaaggctttaaaatggcaatgagcaaagttttgtcttcactgactccagagaaactgtatcagaccatggatactcactgtcagaatgagatgagctctggaactggacagagtaatactgtacagaacatccttgaacctttctacgtgttagatgtgtccgaaggcttctctgttctgcctgttattgctggcacacttgggcaggttaaaccatacagttctgtggagaaagaccagcatcgtattgctctggacctcatatctgaagccaatcactttcctaaagaaacacttgagttttggctgagacatgtggaggatgaatctgctatgttacaaaggccaaaatcagacaagttatggagcataattatattggatgtcattgagccatctgggctcattcagcaggaaataatggaaaaagctgcaatatccaggtgtttactacaatctggaggcaagatctttcctcagtatgtgctgatgtttgggttgcttgtggaatcacagacactcctagaggagaatgctgttcaaggaacagaacgtactcttggattaaatatagcaccttttattaaccagtttcaggtacctatacgtgtatttttggacctatcctcattgccctgtatacctttaagcaagccagtggaactcttaagactagatttaatgactccgtatttgaacacctctaacagagaagtaaaggtatacgtttgtaaatctggaagactgactgctattccattttggtatcatatgtaccttgatgaagagattaggttggatacttcaagtgaagcctcccactggaaacaagctgcagttgttttagataatcccatccaggttgaaatgggagaggaacttgtactcagcattcagcatcacaaaagcaatgtcagcatcacagtaaagcaatgaagagcagttttccaatgaaaactgtgtaaatagagcatcaacaagtacaaaattcttgtcttaattagtgggggtatataaaaattccttgtaatggtcaaatattttttaaaattgacattaataaagcatattttaaaagattct

SEQ ID NO: 4352 - DNA, 1701 bp, Homo sapiens
  source 1..1701: mol_type = genomic DNA
aacccggtccccgcccccagacacgccgggctctcggggcaccacagccatgtgctcgttagcgtcaggcgctaccggcggccggggcgctgtggagaatgaggaggacctgccagaactgtcggacagcggggacgaggccgcctgggaggatgaggacgatgcagatctcccccacggcaagcagcagaccccctgcctgttctgtaacaggttattcacatctgctgaagaaacattttcacactgtaagtctgagcatcagtttaatattgacagcatggttcataaacatggacttgaattttatggatacattaagctaataaattttattagacttaagaatcctacagttgagtacatgaattccatatacaacccagtgccttgggagaaagaagagtatttgaagccagtattagaagatgaccttttacttcaatttgatgtagaagatctttatgaaccggtgtcagtacccttctcataccccaatggactcagtgaaaatacatctgttgttgaaaaattgaaacatatggaagccagggcactgtctgctgaagccgcattggccagagcacgtgaggatctgcaaaaaatgaaacaatttgctcaggattttgtgatgcacacagatgtcagaacctgctcgtcatctactagtgtcattgcggacctccaggaggatgaggatggtgtttatttcagctcatacgggcattatgggatacatgaagaaatgctaaaggacaaaatacgaacagaaagctaccgagatttcatataccaaaatccacatatcttcaaagacaaggtagttttggatgttgggtgtggaactggaattctctctatgtttgctgctaaagctggggcgaagaaggttcttggagttgatcaatctgaaatactttaccaggcaatggatattataagactaaataaacttgaagatactattacactaattaaaggaaagattgaagaagttcatcttcctgtagaaaaagtagatgttatcatatctgagtggatgggctattttcttctgtttgagtctatgttagattctgtcctttatgcaaagaacaaatacttggcaaaaggaggctcggtctaccctgacatttgcactatcagccttgtagcagtgagtgatgtgaataaacatgctgatagaattgctttttgggatgatgtctatggcttcaagatgtcctgcatgaagaaagcagttattccagaagctgttgtggaagttttagatccgaagactcttatttcagaaccttgtggtattaagcatatagattgccatacgacgtctatctcagatttggaattttcatcagattttaccctgaaaatcacaaggacatccatgtgcacggcaattgctggctactttgatatatattttgagaagaattgccacaacagggtcgtgttctctacgggccctcagagcaccaaaacacactggaaacaaacagtatttctactggaaaaaccattttcagttaaagcaggtgaagccttgaaaggaaaggtcacagttcacaagaataagagagaagttctcattgtgggaatctgacatagttcagctgaggaagagaatcagctgatcctcatggtctgccacgtaatcattttcttagacgtttgctccaccagatttaaccaaatgtaact

SEQ ID NO: 4353 - DNA, 1980 bp, Homo sapiens
  source 1..1980: mol_type = genomic DNA
caacagaaacatgatgctgatgttcagaagattttagaaagaaagaataatgaaatagaagaactgaaaactttatacaggagtaaacaacatgaaactgaagagactattagaaagcttgaaaagaaagttcagacactgatacgtgactgtcaagttatcagagagactaaagaagaccagattgcagagctgaaaaagatatgtgaacaaagtacggaatctctaaataatgactgggaaaaaaagcttcacaatgctgtagcagaaatggaacaggaaaagtttgatcttcaaaagcaacacactgaaaacattcaagaattgcttgaggatacaaatgtgcgtctgaataaaatggagagtgaatacatggcgcaaacacagtccacaaaccacatgatcaaagaactggaggcccgtgtccagcagctgactggagaagcagagaacagtaatttacagaggcagaaattaattcaagaaaaagcagaacttgaaagatgttaccagataacgtgtagtgaattacaagaagtaaaggcaaggcgtaacacactgcataaagagaaggaccatcttgtaaatgattatgagcaaaacatgaaactgttacaaaccaaatatgatgctgatataaaccttctaaaacaagaacatgctctttcagcttctaaggcatctagtatgattgaagaattagagcagaatgtctgtcaattaaaacagcagttacaggaatcagaacttcaaagaaagcaacaactaagggatcaagaaaataagtttcagatggagaaaagtcatttaaaacacatctatgaaaaaaaggctcatgacttgcagagtgaacttgataaaggaaaagaagatactcaaaagaaaattcataaatttgaggaagctttgaaggaaaaagaggagcagctaactcgtgtgactgaagttcagaggttgcaggcccagcaggcagatgccgctctggaagagtttaagcggcaggtggaactgaactcagagaaagtctatgctgaaatgaaagagcagatggaaaaagtggaggcagatctaactagatccaaatctcttcgtgagaaacaatcaaaggagtttttatggcaactggaggacatcagacagcggtatgaacaacagatagtagagctgaagctggagcatgaacaggagaagacgcacctattacagcagcataacgcagagaaggatagcctagtccgagaccatgaacgggaaattgaaaacctggaaaaacagcttcgcgctgccaatatggagcacgaaaatcaaattcaggagttcaagaaacgagatgcacaggttattgccgacatggaggcccaggttcacaagttgagagaagaattgatcaatgtgaactcacagcggaaacagcagctggtagagcttggtcttcttcgtgaagaggaaaagcaaagggctacaagggaacatgagattgtcgtcaataaactgaaggctgaatcagaaaagatgaaaatagagctgaaaaagactcatgctgctgagacagagatgacactggaaaaggttttacaagatgaattagaaaaccgttctaatcaggtgcgatgtgcagagaaaaaattacaacacaaagaattggagtcacaggaacagataacttacatacgacaagaatatgaaacaaaattgaaaggattgatgccagcatccctaagacaagaacttgaagacaccatttcctccctaaaatcacaggttaattttctgcaaaagagagcttccatccttcaggaagaactgactacatatcaaggcagaaggtaactgcacgagagaatgcaacggatgcaatttccaggctgtgctgtggacttcttccagcaggtttgaagatttggatattgtaaactgtgagatcagtggcattttttaaatccttaaatgtaattaagatcataaaaacatgcatcattc

SEQ ID NO: 4354 - DNA, 4737 bp, Homo sapiens
  source 1..4737: mol_type = genomic DNA
gtttgaagaaaaactgtcactgaagagtcatggtggggcccgggcctaccgctgctgccgctgtcgaagagcggcagagaaagcttcaggagtaccttgcagccaagggaaaactgaagagccaaaacaccaagccttatctaaaatccaagaataattgccagaatcaaccaccttctaaatctactattagacccaaaaatgatgttaccaaccatgttgttttgcctgtcaaacctaaaaggtccatcagcattaaactccagcccagaccacctaatactgcagggtcccagaagccgaagttggagccaccaaaacttctgggcaaaaggctgacttcagaatgtgtttcttctaacccatactctaagccttctagcaagagttttcaacagtgtgaagctggatcgtccacaacaggagaactgtcaagaaaacctgtggggtcacttaatatagagcaattgaaaactacaaagcagcagttaacagatcaaggaaatggtaaatgtatagactttatgaataatatccatgttgaaaacgaatctttggataactttctaaaagaaacaaacaaagagaacttgctcgatatcttaacagaacctgagaggaagccagatcctaaattatataccagaagtaagccaaagactgactcttataatcaaaccaagaacagtttagttcctaaacaagccttgggcaaaagttcagttaatagtgctgttctgaaagatagggttaataaacaatttgttggagaaacacaaagcaggactttcccagtaaaatcacagcaactctctagaggagcagatcttgcaagaccaggagtaaaaccctcaaggacggttccctctcactttattcggacccttagtaaagttcagtcatcaaagaaaccagtagtcaagaacatcaaagatataaaggttaataggagtcaatatgaaagaccaaatgaaactaagatacggtcataccctgttactgaacagagagtgaagcacaccaaacccagaacataccccagtttgcttcagggtgaatataacaacagacatccaaacatcaagcaagatcagaagtccagccaagtttgtatacctcagacatcatgtgtactgcaaaagtcaaaagccataagccagaggcctaatttgacagttggcagatttaattcagccattccaagcacccctagcataagaccaaatggaaccagtggtaataaacataacaataatggctttcagcaaaaagcacagactttggactccaagttgaaaaaggctgttccccagaaccattttctgaacaagacagctcccaaaactcaagctgatgtcacaaccgtaaatgggacccaaacaaacccaaatattaaaaagaaggcaacagcagaggatcgaaggaaacaactagaagaatggcagaaatctaagggaaaaacctataaacggcctcctatggaacttaaaacaaaaagaaaagtaataaaggaaatgaatatttcattctggaagagcattgaaaaagaagaggaagaaaagaaagcacaactcgaactgtccagtaaaattaacaacactctgacagaatgtctgaacctcatcgaagggggtgtaccttctaatgaaatacttaacatattgtccagcattcctgaagctgaaaaatttgctaaattctggatctgcaaagcaaagttgttggcaagtaaaggcacctttgatgttattgggctatatgaagaggccattaaaaatggggcaacaccaatacaagagttgcggaaagttgttcttaatatcttgcaagactcaaacagaaccacagaagggattacttctgactctttagttgctgaaactagtataacatcagtggaagagctggccaagaagatggaatctgtgaagtcttgtctttctccaaaagagagggaacaagtcacggcgacaccccgaatagccaaggcagaacagcataattatcctggtatcaaattacagattggtccaatccctagaataaatgggatgccggaagtgcaagacatgaaatttatcactcctgtacggcgttcgtcgaggattgagcgagcagtgtcccgctacccagaaatgctgcaggaacacgatttagtagtggcttctcttgatgaactgttagaagtggaagaaacaaaatgttttatattccgtagaaatgaggcgctgcctgtaacattggggtttcaaacccctgaatcataatttcttgatgctttttttaaaaaaggtgtttcagaaccaacataagacaagaaatattcttgtccaagtgacctggaaaaaaagagaggcatcatggatgcagattatggacgctcaggacttaagtaattcactgggcttactctcaaattttctctccccatgggaaaatctttgctttatgtgtttaagaccagtttgccagttttacagtatacataaatttcaaacttttgaatatttaccctacaactatgataaatatttatactttattgatctactttaatcccaacatagttttttatatcagaaggttggtcccacaatataatgggacttttctttctgcatccaccttagcagagggcaagttctttcatcgtggaagatctgaactttgacgctagcttgacaggctgaatggaccttgacagatggccaagtcaaaacccctcattttacagatgagtttatgctagctgtgcctttgctcagagatcataaatttatgtgtgatctttgactttcatcacagtatccttgtaaatgagagagaattcttgttttttctatgccaggtctcctcagatgaaacacaatcctgaattggcatggtcgtctagcttttatattcaaacctagttttgcatttgttactcagaaacacttcaagtaacaaaaggggggcaggggagaggggtggggagtggacacttgcttcttcagttctttgctcagctagggtatagctggcctgagaaggcagtgcaagccccagagactgttgtaggttgctttttcttcctcctgggcaactatttgtggaaaggttttaccttagtcattatgtaaatataattgtgtagaaaaacctagtcaacacattttaaattttagctttcttaatatttaagtattatcttaaaacaacattaaatttctattagttcctgcttgtttatcttatttattatagaaaaccatgataatggctttgcatagagaattaggagtttgtctaaggatataccagttggctgtcctaagaaacaaggagcattcattaccaaggagaatggactttgatcaaaggtctatcagcctcatccaggaactagatttttttaagggaagcagatctatttctgaaagtcagatttataataaagctcaaaaaactgagctataaacctgtaataccagcagactttcaataagagactcttacaactcaattgtggaaaaactaataattaaaaatgggcaaaggacctgagcagacatttctccaaagaagacataagaaatggccagtaggtatagatatgaaaaggtgttcagcatcattaatcataagaataatgtaaattaaaaccactgtgagctatcacctcacatctataagaatggctattaacaagacatgagataaatgttgatgagattgtggagaaaagagaaccctagtacactgtttgtgggcgtgtagactggggcagccgttatggaaaacggtatggaggctcctaaagaaattaaaaatagaactgttatctgaccctcttctgagtaagtatgtacccaaagaagatgaaatcaccagctgggcgcagtgactcacacctgtaatcccagcactttggagtgggtgaatcacctgaggtcaggagttcaagaccagcttgaccaacatggtgaaaccccgtctctactaaaaatacaaaaagtaggcgggcatggtgacgggcacctgtaatcccagctacttgggaggctgaggcagaagaatcacttgaactcgggaggtggaggttgcagtgagccaaaattgcgtcactgcactccagcctgggttacagagcaagactccatctcaaaaaaaaaaaagatgaaatcatcacctcataaagatatctgcactcacatgtttgtggcagtgttattctcaatagccaagatgtggaaacaacctaaatgcccatcaatggacaaataaagaaaatacggcatatgcatgccgtggaatagtattcatccttggaaaagagggagttcttgccatttgccacaacatagatggacctggagaacattatgctaagtgaaataagccagacccaaggaaaaatactgcatgatctcacatatggaatatttaattttttaagaaagagctcaagtacacagagaaagtgcttaccacagattggggaagaggaaatggggagatgcaggccaaggatacaaaatagcagataaaatgaacaagtctagagatagggctaaagttaatacaattgtattagggatttttgttaaataagtagattttagctgctattatcacaaaaaaactgagatgataatgttaatctgcttcactatagcagccattttattatctatatgtatcccataacatcatgttgtaaatcttaaatatacctaataaaataaaattgtcacc

SEQ ID NO: 4355 - DNA, 1092 bp, Homo sapiens
  source 1..1092: mol_type = genomic DNA
ggcccgtttggaagcggcagccaggacaacctgactatgtacatggatttagtggacggcatctttttgaaccaaattatgctgcaaatagatcccaggcccacaaatcaacgcatcaataagcacgtcaacaatgatgtgaaccttcgcattcagaatttgaccatcttggtgagaaacattaagacctactaccaggaagttctccagcagctgattgtaatgaatttgcccaatgttttgatgattggcagagacccactgtctgggaagagcatggaggaaatcaagaaggtgctgctgctggtgctgggctgtgctgtccagtgtgagaggaaagaggagttcattgaaagaatcaaacagctggacattgagacccaggctggcatcgtggcccatatccaggaggtgactcacaaccaagagaacgtgtttgacctgcagtggctggagctgcccgacgtggctccggaggagctggaggccctgtcgaggagcatggtgctccacctgcggaggctcatcgaccagcgggacgagtgcaccgagctgatcgtggacctcactcaggaacgggactacctgcaggcacagcatccacccagccccatcaagtcctccagcgccgactccactcccagccccaccagcagcctctctagcgaagacaagcagcacctggccgtagagctggccgacaccaaggccaggctgcggcgcgtcaggcaggagctgtgagtccccggctgcttctcctacctttgtgtgtgttgcagacatgtttctggtgtggtgtcgactcacatgtgtggtgctgccaatggcacagctctgacgtgtgccccggagtcagctggggtctgccctgagcttactctttgacctcggactagctgcctcccctccagacggtgcaagttgtccacagaagcagcctccagtccacgctcagctccagcttggggccgggacgaccacacctgatgtgttttcttggctggagggatgaggtgcccctccttccctccaatctggtgagcctgttctcccaggtttcctgcagctgatggatgtcacctgtggagcctg

SEQ ID NO: 4356 - DNA, 1894 bp, Homo sapiens
  source 1..1894: mol_type = genomic DNA
atcaaagacagcagacttttctgtgatccaacatttctgcctgagaatgattctcttttctacaaccgactgcttcctggaaaggtggtgtggaaacgtccccaggacatctgtgatgacccccatctgattgtgggcaacattagcaaccaccagctgacccaagggagactggggcacaagccaatggtttctgcattttcctgtttggctgttcaggagtctcattggacaaagacaattcccaaccataaggaacaggaatgggaccctcaaaaaacagaaaaatacgctgggatatttcactttcgtttctggcattttggagaatggactgaagtggtgattgatgacttgttgcccaccattaacggagatctggtcttctctttctccacttccatgaatgagttttggaatgctctgctggaaaaagcttatgcaaatctcccaatcaggaggagcaagaagttgaaactgattggggtctgctgaagggccatacctataccatgactgatattcgcaaaattcgtcttggagagagacttgtggaagtcttcagtgctgagaaggtgtatatggttcgcctgagaaaccccttgggaagacaggaatggagtggcccctggagtgaaatttctgaagagtggcagcaactgactgcatcagatcgcaagaacctggggcttgttatgtctgatgatggagagttttggatgagcttggaggacttttgccgcaactttcacaaactgaatgtctgccgcaatgtgaacaaccctatttttggccgaaaggagctggaatcggtgttgggatgctggactgtggatgatgatcccctgatgaaccgctcaggaggctgctataacaaccgtgataccttcctgcagaatccccagtacatcttcactgtgcctgaggatgggcacaaggtcattatgtcactgcagcagaaggacctgcgcacttaccgccgaatgggaagacctgacaattacatcattggctttgagctcttcaaggtggagatgaaccgcaaattccgcctccaccacctctacatccaggagcgtgctgggacttccacctatattgacacccgcacagtgtttctgagcaagtacctgaagaagggcaactatgtgcttgtcccaaccatgttccagcatggtcgcaccagcgagtttctcctgagaatcttctctgaagtgcctgtccagctcagggaactgactctggacatgcccaaaatgtcctgctggaacctggctcgtggctacccgaaagtagttactcagatcactgttcacagtgctgaggacctggagaagaagtatgccaatgaaactgtaaacccatatttggtcatcaaatgtggaaaggaggaagtccgttctcctgtccagaagaatacagttcatgccatttttgacacccaggccattttctacagaaggaccactgacattcctattatagtacaggtctggaacagccgaaaattctgtgatcagttcttggggcaggttactctggatgctgaccccagcgactgccgtgatctgaagtctctgtacctgcgtaagaagggtggtccaactgccaaagtcaagcaaggccacatcagcttcaaggttatttccagcgatgatctcactgagctctaaatctgcaatcccagagaatcctgacaaagcgtgccacccttttattttccgtcaggtgccaggtcttagttaagattcacaatctttagaaagaatgagattcacaataattaactcttcctctcttctgataaattccccatacctcccaatccaagtagcatctgtagctacataacctatatacctccagcagctggacatggggaggcgacagtcct

SEQ ID NO: 4357 - DNA, 1538 bp, Homo sapiens
  source 1..1538: mol_type = genomic DNA
cttcctttctcttcccattgtccccaggtccactgaaaagggcaagcaccctgtaaatgagtttccctcctgctcttgctgggtggaggagataggcagaggtttagcccttaaaaagacatggctaggatatccagccctagtggcctgagaatacagcaagatgacggagctgtcattgcaaaaggagcagctgcagctcaagatcattgagattgaggatgaagctgagaagtggcagaaggagaaggaccgcatcaagagcttcaccaccaatgagaaggccatcctggagcagaacttccgggacctggtgcgggacctggagaagcaaaaggaggaagtgagggctgcgctggagcagcgggagcaggatgctgtggaccaagtgaaggtgatcatggatgctctggatgagagagccaaggtgctgcatgaggacaagcagacccgggagcagctgcatagcatcagcgactctgtgttgtttctgcaggaatttggtgcattgatgagcaattactctctccccccacccctgcccacctatcatgtcctgctggagggggagggcctgggacagtcactaggcaacttcaaggacgacctgctcaatgtatgcatgcgccacgttgagaagatgtgcaaggcggacctgagccgtaacttcattgagaggaaccacatggagaacggtggtgaccatcgctatgtgaacaactacacgaacagcttcgggggtgagtggagtgcaccggacaccatgaagagatactccatgtacctgacacccaaaggtggggtccggacatcataccagccctcgtctcctggccgcttcaccaaggagaccacccagaagaatttcaacaatctctatggcaccaaaggtaactacacctcccgggtctgggagtactcctccagcattcagaactctgacaatgacctgcccgtcgtccaaggcagctcctccttctccctgaaaggctatccctccctcatgcggagccaaagccccaaggcccagccccagacttggaaatctggcaagcagactatgctgtctcactaccggccattctacgtcaacaaaggcaacgggattgggtccaacgaagccccatgagctcctggcggaaggaacgaggcgccacacccctgctcttcctcctgaccctgctgctcttgccttctaagctactgtgcttgtctgggtgggagggagcctggtcctgcacctgccctctgcagccctctgccagcctcttgggggcagttccggcctctccgacttccccactggccacactccattcagactcctttcctgccttgtgacctcagatggtcaccatcattcctgtgctcagaggccaacccatcacaggggtgagataggttggggcctgccctaacccgccagcctcctcctctcgggctggatctgggggctagcagtgagtacccgcatggtatcagcctgcctctcccgcccacgccctgctgtctccaggcctatagacgtttctctccaa

SEQ ID NO: 4358 - DNA, 1392 bp, Homo sapiens
  source 1..1392: mol_type = genomic DNA
gcagacggttccgggagccgcacggtcccctctccttccccatcctctcccctcccctctccgggttcccccacccacaggagccttgggccgaccactcccccgatggcctcagccacggaggaccccgttctggagcgttatttcaaaggccacaaagctgcgatcacctccttggacctcagccccaacggcaagcaacttggagaggaaaattctcagaatttaaagctcatacagctccagttcgaagtgtagacttttcagctgatggccagtttctagctacagcttctgaagacaaatccataaaagtatggagcatgtatcgccagcgcttcctgtattccttgtatcgacatacacactgggtacgctgtgccaaattttcacccgatggaagactaattgtgtcatgtagtgaggataaaactattaaaatttgggataccacaaataagcaatgtgttaataacttctcagattccgttggatttgcaaattttgtggactttaaccctagtggtacatgcatagcttcagcaggttctgatcaaactgtgaaagtctgggatgtaagagtgaacaaattactacagcattaccaagttcacagcggtggagttaattgcatatcattccatccttcgggtaactatctcatcacagcttcttcagatggtacccttaagattctggacctcttagaaggaaggctcatctatacacttcaaggacatacgggacctgtctttactgtttcattttcaaaaggtggagagctatttgcatcaggaggtgcagacacacaggtcttattatggaggactaactttgatgaattgcattgtaaaggtcttaccaaaagaaatctcaaaagattacattttgattcaccaccacatcttcttgatatctacccaagaacaccacatccccatgaggaaaaagttgagactgtagaagatttttttcttcatcttttgagattaatccaaagcttgaggtaatcgatttgcagatctctactccccctgttatggatatcctttcttttgattctaccacaacaacagaaaccagtggtaggactctgccagacaagggtgaagaggcctgtggatatttcttgaacccttccttaatgtcaccagaatgtttgccaacaaccacgaaaaagaaaacagaagacatgagtgacctcccctgtgaaagtcaaaggagcatacctctcgctgtgactgatgctttagagcatattatggaacaactcaatgttttgacacagactgtttcaatcttggagcagcgactgactttgacagaggataagctgaaagactgccttgaaaatcagcaaaagcttttcagtgctgtccaacagaaaagctg

SEQ ID NO: 4359 - DNA, 2469 bp, Homo sapiens
  source 1..2469: mol_type = genomic DNA
gcgacgccgagtttcactctggctgccttctcctgagagtcggagccacagccagagccctgcccaggccgagccggagctgcagcccgagcgcggtggtgccctcagccccgtcctcttgtcctcctcagcctcggtgccttggaatttgtgtcgctgagtcagcaagcctttcagatttgcccggtttttgttgtttgtggtttgtatcaagatgggaactcaaacaagtcattcctcctaaggagctggtgtcttcatccagaagggacagtttgtgccagctctccagagagaaaaggatctggtactgttctggagtggcctgtagcagacactgaaccaccagccagctgcatttgttgtcctggaagtcattgccaactctgccagtcacactggggtccccagagaagtcaagatctgccggaggcgctgggcaatgaccccgggactccaggccagaggggtctgaagctgtttgggaaagcagcgggactccttgggaagatggccatggccccaagcccttccctggtgcaggtgtacaccagccccgcggctgtggccgtgtgggaatggcaggacgggctgggcacctggcacccctacagtgccaccgtctgcagcttcatcgagcagcagtttgtccagcagaagggccaacgttttgggcttgggagcctggcccacagcatccccttgggccaggcagacccctcgctggccccttacattattgacctccccagctggacccagttccgccaggacaccggcaccatgcgggctgtgcggagacacctgttcccccagcactcagcccctggccgaggtgtcgtctgggagtggctgagcgacgatggctcctggactgcctatgaagccagcgtctgtgactatctggagcagcaggtggccaggggcaaccagctcgtggacttggcccccctggggtacaactacactgtcaactacaccacccacacgcagaccaacaagacttccagcttctgccgcagcgtgcggcgccaagcagggccgccttacccggtgaccaccatcatcgctccgccgggccacacaggcgtcgcctgctcttgccaccagtgcctcagtggcagcagaactggccccgtgtcaggccgctaccgccactccatgaccaacctccctgcataccccgtcccccagcaccccccacacaggaccgcttctgtgtttgggacccaccaggcctttgcaccgtacaacaaaccctcactctccggggcccggtctgcgcccaggctgaacaccaccaacgcctggggcgcagctcctccttccctggggagccagcccctctaccgctccagcctctcccacctgggaccgcagcacctgcccccaggatcctccacctccggtgcagtcagtgcctccctccccagcggtccctcaagcagcccagggagcgtccctgccactgtgcccatgcagatgccaaagcccagcagagtccagcaggcgctcgcaggcatgacgagtgttctgatgtcagccattggactccctgtgtgtcttagccgcgcaccccagcccaccagccctcccgcctcccgtctggcttccaaaagtcacggctcagttaagagattgaggaaaatgtccgtgaaaggagcgaccccgaagccagagccagagccagagcaggtcataaaaaactacacggaagagctgaaagtgcccccagatgaggactgcatcatctgcatggagaagctgtccacagcgtctggatacagcgatgtgactgacagcaaggcaatcgggtccctagctgtgggccacctcaccaagtgcagccatgccttccacctgctgtgcctcctggccatgtactgcaacggcaataaggatggaagtctgcagtgtccctcctgcaaaaccatctatggagagaagacggggacccagccccagggaaagatggaggtattacggttccagatgtcgctccccggccacgaggactgcgggaccatcctcatagtttacagcattccccatggtatccagggccctgagcaccccaatcccggaaagccgttcactgccagagggtttccccgccagtgctaccttccagacaacgcccagggccgcaaggtcctagagctcctgaaggtggcctggaagaggcggctcatcttcacagtgggcacgtccagcaccacgggtgagacggacaccgtggtatggaacgagatccaccacaagacagagatggaccgcaacattacgggccacggctatcccgaccccaactacctgcagaacgtgctggctgagctggctgcccagggggtgaccgaggactgcctggagcagcagcacgcccgcctctggtggccaccccgctgccccatggctggctgggtggccaggcaggaagtgcccagcccgagaggctgggaggtttgttga

SEQ ID NO: 4360 - DNA, 3253 bp, Homo sapiens
  source 1..3253: mol_type = genomic DNA
aaggaatgccagcagctaccagaaaccggaagggcaaggaatgcattctccccagagccttcagaggaagcatgactctgctaacaccatgattcacaattctggcctccaagaacagagagaataagcctctattgtttaaaccacctggtttgtcctaattcgttattgcagccacaggaaactaatacagaaggctaaaatgaaaacgatgaagaggtgcagtatattcaggctgagaaaaacaacaagggcccaatggaggctgccacactttttctcaagttcctgttggagctccaggaggaaggctggttccgtggctttttggatgccctagaccatgcagagctatggtgttttctatcaacagaagaatcatgaagttcataaatttggaaaggagagctttatttttcataaagggttgcagtctgcatggtggccattttgacaggctgggaagtgtagcctcgggccagaagcaggaaacaggcacttggagggtggggagagtaaaacagagatttatgctgaatagggtgaccaaatattcagtaagctacaggaggagtcatgaaagtagaagcatgcacctgggcaggttattctggactttatgaagccattgaaagttgggatttcaaaaaaattgaaaagttggaggagtatagattacttttaaaacgtttacaaccagaatttaaaaccagaattatcccaaccgatatcatttctgatctgtctgaatgtttaattaatcaggaatgtgaagaaattctacagatttgctctactaaggggatgatggcaggtgcagagaaattggtggaatgccttctcagatcagacaaggaaaactggcccaaaactttgaaacttgctttggagaaagaaaggaacaagttcagtgaactgtggattgtagagaaaggtataaaagatgttgaaacagaagatcttgaggataagatggaaacttctgacatacagattttctaccaagaagatccagaatgccagaatcttagtgagaattcatgtccaccttcagaagtgtctgatacaaacttgtacagcccatttaaaccaagaaattaccaattagagcttgctttgcctgctatgaaaggaaaaaacacaataatatgtgctcctacaggttgtggaaaaacctttgtttcactgcttatatgtgaacatcatcttaaaaaattcccacaaggacaaaaggggaaagttgtcttttttgcgaatcagatcccagtgtatgaacagcagaaatctgtattctcaaaatactttgaaagacatgggtatagagttacaggcatttctggagcaacagctgagaatgtcccagtggaacagattgttgagaacaatgacatcatcattttaactccacagattcttgtgaacaaccttaaaaagggaacgattccatcactatccatctttactttgatgatatttgatgaatgccacaacactagtaaacaacacccgtacaatatgatcatgtttaattatctagatcagaaacttggaggatcttcaggcccactgccccaggtcattgggctgactgcctcggttggtgttggggatgccaaaaacacagatgaagccttggattatatctgcaagctgtgtgcttctcttgatgcgtcagtgatagcaacagtcaaacacaatctggaggaactggagcaagttgtttataagccccagaagtttttcaggaaagtggaatcacggattagcgacaaatttaaatacatcatagctcagctgatgagggacacagagagtctggcaaagagaatctgcaaagacctcgaaaacttatctcaaattcaaaatagggaatttggaacacagaaatatgaacaatggattgttacagttcagaaagcatgcatggtgttccagatgccagacaaagatgaagagagcaggatttgtaaagccctgtttttatacacttcacatttgcggaaatataatgatgccctcattatcagtgagcatgcacgaatgaaagatgctctggattacttgaaagacttcttcagcaatgtccgagcagcaggattcgatgagattgagcaagatcttactcagagatttgaagaaaagctgcaggaactagaaagtgtttccagggatcccagcaatgagaatcctaaacttgaagacctctgcttcatcttacaagaagagtaccacttaaacccagagacaataacaattctctttgtgaaaaccagagcacttgtggacgctttaaaaaattggattgaaggaaatcctaaactcagttttctaaaacctggcatattgactggacgtggcaaaacaaatcagaacacaggaatgaccctcccggcacagaagtgtatattggatgcattcaaagccagtggagatcacaatattctgattgccacctcagttgctgatgaaggcattgacattgcacagtgcaatcttgtcatcctttatgagtatgtgggcaatgtcatcaaaatgatccaaaccagaggcagaggaagagcaagaggtagcaagtgcttccttctgactagtaatgctggtgtaattgaaaaagaacaaataaacatgtacaaagaaaaaatgatgaatgactctattttacgccttcagacatgggacgaagcagtatttagggaaaagattctgcatatacagactcatgaaaaattcatcagagatagtcaagaaaaaccaaaacctgtacctgataaggaaaataaaaaactgctctgcagaaagtgcaaagccttggcatgttacacagctgacgtaagagtgatagaggaatgccattacactgtgcttggagatgcttttaaggaatgctttgtgagtagaccacatcccaagccaaagcagttttcaagttttgaaaaaagagcaaagatattctgtgcccgacagaactgcagccatgactggggaatccatgtgaagtacaagacatttgagattccagttataaaaattgaaagttttgtggtggaggatattgcaactggagttcagacactgtactcgaagtggaaggactttcattttgagaagataccatttgatccagcagaaatgtccaaatgatatcaggtcctcaatcttcagctacagggaatgagtaactttgagtggagaagaaacaaacatagtgggtataatcatggatcgcttgtacccctgtgaaaatatatttttt

SEQ ID NO: 4361 - DNA, 1470 bp, Homo sapiens
  source 1..1470: mol_type = genomic DNA
gctcgcgcgtgcgcaccagaagccagcagtggggttgcacacgcgcctcttcacgaggtggaaacaagatggaggattcggcctcggcctcgctgtcttctgcagccgctactggaacctccacctcgactccagcggccccgacagcacggaagcagctggataaagaacaggaccttgcctcatagtattcgatcagattcagaagatatctgtttatttacgaaggatgaacccaattcaactcctgaaaagacagaacagttttatagaaagcttttaaacaagcatggaattaaaaccgtttctcagattatctccctccaaactctaaagaaggaatataaatcctatgaagccaagctccgccttctgagcagttttgatttcttccttactgatgccagaattaggcggctcttaccctcactcattgggagacatttctatcaaagaaagaaagttccagtatctgtaaaccttctgtccaagaatttatcaagagagatcaatgactgtataggtggaacagtcttaaacatttctaaaagtggttcttgcagtgctatacgtattggtcacgttggaatgcaaattgagcacatcattgaaaacattgttgctgtcaccaaaggactttcagaaaaattgccagagaagtgggagagcgtgaaactcctgtttgtgaaaactgagaaatcggctgcacttcccatcttttcctcgtttgtcagcaattgggatgaagccaccaaaagatctttgcttaataagaagaaaaaagaggcaaggagaaaacgaagagaaagaaattttgaaaaacaaaaggagaggaagaagaagaggcagcaggctaggaagactgcatcagttcttagtaaagatgatgtggcacctgaaagtggtgatactacagtgaagaaacctgaatcaaagaaggaacagaccccagagcatgggaagaaaaaacgtggcagaggaaaagcccaagttaaagcaacaaatgaatccgaagacgaaatcccacagctggtaccaataggaaagaagactccagctaatgaaaaagtagagattcaaaaacatgccacaggaaagaagtctccagcaaagagtcctaatcccagcacacctcgtgggaagaaaagaaaggctttgccagcatctgagaccccaaaagctgcagagtctgagaccccagggaaaagcccagagaagaagccaaaaatcaaagaagaggcagtgaaggaaaaaagtccttcgctggggaaaaaagatgcgagacagactccaaaaaagccagaggccaagtttttcaccactcctagtaaatctgtgagaaaagcttcccacacccccaaaaaatggcccaaaaaacccaaagtaccccagtcgacctaaagtcagtgattcaactggaaggaaacctcaatgctgcctccagagctttttggaaatactcagatcctg

SEQ ID NO: 4362 - DNA, 1371 bp, Homo sapiens
  source 1..1371: mol_type = genomic DNA
aaaaacagtccgcgacagctaggcgcgtgagaccggccgcccgcagggctgctctggccgggacccgctggccgggagacgcgaacctgccggaccaccgcgcggggacgacggcggccatgagctcgcggaagctgagcgggccgaaaggcaggaggctcagcatacacgtcgtgacttggaacgtggcttcggcagcgccccctctagatctcagtgacctgcttcagctgaacaaccggaacctcaatcttgacatatatgttattggtttgcaggaattgaactctgggatcataagcctcctttccgatgctgcctttaatgactcgtggagcagtttcctcatggatgtgctttcccctctgagcttcatcaaggtctcccatgtccgtatgcaggggatcctcttactggtctttgccaagtatcagcatttgccctatatccagattctgtctactaaatccacccccactggcctgtttgggtactggctcagcattgccaagaaacatgacccgctgctccgggagttccaggagggccgcctactcttcccgcccacctacaagtttgataggaactccaacgactatgacaccagtgagaaaaaacgcaagcctgcatggaccgatcgcatcctgtggaggctgaagcggcagccctgtgctggccccgacactcccataccgccggcgtcacacttctccttgtctctgaggggctacagcagccacatgacgtacggcatcagcgaccacaagcctgtctccggcacgttcgacttggagctgaagccattggtgtctgctccgctgatcgtcctgatgcccgaggacctgtggaccgtggaaaatgacatgatggtcagctactcttcaacctcggacttccccagcagcccgtgggactggattggactgtacaaggtggggctgcgggacgttaatgactacgtgtcctatgcctgggtcggggacagcaaggtctcctgcagcgacaacctgaaccaggtttacatcgacatcagcaatatccctaccactgaagatgagtttctcctctgttactacagcaacagtctgcgttctgtggtggggataagcagacccttccagatcccgcctggctccttgagggaggacccactgggtgaagcacagccacagatctgagccaggatgggagtgaatcccaggcggaggccagagctggcagccagctctgcctttccactgccgggagtgctgggggcccagcctggccccctgaagagacagccaagtgtcgtccacatactcctcccagagtgagctctaaccaggctcatttgctctctccactactcatctctggaattagccgctt

SEQ ID NO: 4363 - DNA, 375 bp, Homo sapiens
  source 1..375: mol_type = genomic DNA
atgaccggctcctgctgcggctccaccttctcctccctgagctacgggggaggctgctgccagccctgctgctgccgcgacccctgctgctgccgccccgtgacctgccagaccaccgtgtgccgccccgtgacctgcgtgccccgctgcacgcgccccatctgcgagccctgccgccgcccggtgtgctgcgacccctgctccctgcaggaaggctgctgccgccccatcacctgctgcccctcgtcgtgcacggctgtggtgtgcaggccctgctgctgggccaccacctgctgccagcctcctgtgtctgtgcagtccccctgcggccagccgaccccttgcagcaccacctgcaggacctcctcctgctga

SEQ ID NO: 4364 - DNA, 2037 bp, Homo sapiens
  source 1..2037: mol_type = genomic DNA
atcagtgtgtgcggaacgcaagcagccgagagcggagaggcgccgctgtagttaactcctccctgcccgccgcgccgaccctccccaggaacccccagggagccagcatgaagcgagctcaccccgagtacagctcctcggacagcgagctggacgagaccatcgaggtggagaaggagagtgcggacgagaatggaaacttgagttcggctctaggttccatgtccccaactacatcttcccagattttggccagaaaaagacggagaggaataattgagaagcgccgacgagaccggatcaataacagtttgtctgagctgagaaggctggtacccagtgcttttgagaagcaggtaatggagcaaggatctgctaagctagaaaaagccgagatcctgcagatgaccgtggatcacctgaaaatgctgcatacggcaggagggaaaggttactttgacgcgcacgcccttgctatggactatcggagtttgggatttcgggaatgcctggcagaagttgcgcgttatctgagcatcattgaaggactagatgcctctgacccgcttcgagttcgactggtttcgcatctcaacaactacgcttcccagcgggaagccgcgagcggcgcccacgcgggcctcggacacattccctgggggaccgtcttcggacatcacccgcacatcgcgcacccgctgttgctgccccagaacggccacgggaacgcgggcaccacggcctcacccacggaaccgcaccaccagggcaggctgggctcggcacatccggaggcgcctgctttgcgagcgccccctagcggcagcctcggaccggtgctccctgtggtcacctccgcctccaaactgtcgccgcctctgctctcctcagtggcctccctgtcggccttccccttctctttcggctccttccacttactgtctcccaatgcactgagcccttcagcacccacgcaggctgcaaaccttggcaagccctatagaccttgggggacggagatcggagctttttaaagaactgatgtagaatgagggaggggaaagtttaaaatcccagctgggctggactgttgccaacatcaccttaaagtcgtcagtaaaagtaaaaaggaaaaaggtacactttcagataattttttttttaaagactaaaggtttgttggtttacttttatcttttttaatgtttttttcatcatgtcatgtattagcagtttttaaaaactagttgttaaattttgttcaagacattaaattgaaatagtgagtataagccaacactttgtgataggtttgtactgtgcctaatttactttgtaaaccagaatgattccgtttttgcctcaaaatttggggaatcttaacatttagtatttttggtctgtttttctccttgtatagttatggtctgtttttagaattaattttccaaaccactatgcttaatgttaacatgattctgtttgttaatattttgacagattaaggtgttgtataaataatattcttttggggggaggggaactatattgaattttatatttctgagcaaagcgttgacaaatcagatgatcagctttatccaagaaagaagactagtaaattgtctgcctcctatagcagaaaggtgaatgtacacaaagaatttttaatcacacggatctcaaattcacaaatgttaacatggataagtgatcatggtgtgcgagtggtcaattgagtagtacagtggaaactgttaaatgcataacctaattttcctgggactgccatattttcttttaactggaaatttttatgtgagttttccttttggtgcatggaactgtggttgccaaggtatttaaaagggctttcctgcctccttctctttgatttatttaatttgatttgggctataaaatatcatttttcaggtttattcttttagcaggtgtagttaaacgacctccactgaactgggtttgacctctgttgtactgatgtgttgtgactaaataaaaaagaaagaacaaagt

SEQ ID NO: 4365 - DNA, 5261 bp, Homo sapiens
  source 1..5261: mol_type = genomic DNA
cgagggccagcttggtggagcttagcacagcttgctcggcgctgcgagcgggcgggggtggacactgggcttctgtgtgccagtcgcagccgttggctggcgggcacccaatcccagggcatgccgccggagcctggccaggacgcacggtgaaagacgagtttggtggcaggcttgaccccccggctgccagcagaagccggcgtcgggagcccaggcgggcaggccgctggggtcggggctgcacgtacgagagccgggacgcccgggttcagagcgaaggaggaggcatggcttcggtgttcatgtgtggcgtggaggacctgctgttcagcggcagccgcttcgtatggaacttgaccgtgtccacgctgcggagatggtacacggagaggctgcgggcttgccaccaggtgctgcggacgtggtgcgggctgcaggacgtgtaccagatgacagaaggcaggcactgccaggtgcacctcctggatgataggagactggagctgctggttcagcccaaacttctagcaagagagttgctggacctagtggcttcacatttcaacctgaaagaaaaggagtattttggaataacattcatagatgacacaggtcagcagaactggctgcagttagatcaccgagttcttgaccacgatttgcccaagaaaccaggcccaaccattttgcactttgctgtgaggttttacattgagagcatatcgtttttaaaggataaaaccaccgtggagctgtttttcctgaatgcaaaggcctgtgtgcacaaggggcaaatcgaagtagagagcgaaaccatcttcaagttagcagcgtttattttacagtctcccaaagtctcgcttacccatgatgaaaatgccaggaaagatttaaagacattaccagcctttccaaccaaaactcttcaggagcatccatcccttgcctactgtgaggacagggtaattgagcattatttgaaaatcaaaggtctcactcgaggtcaagctgtggttcagtatatgaaaatagtagaagctctaccgacttacggtgtccattattatgcagtaaaggataagcaaggacttccttggtggcttggaataagctataagggaattggccaatatgatatacaagacaaggtgaagcctcggaagttattccaatggaaacagctggagaacttatatttccgtgagaaaaaatttgctgttgaagttcatgatccacgaaggatttcagtttcaagaagaacctttgggcaaagtggcttgtttgtgcaaacatggtatgctaactcttctctcatcaagtccatttgggtaatggcaattagtcagcatcagttttacttggaccggaagcaaagcaaagcaaaaattccttcagccaggagtttagatgagattgcaatggatttgacagagacaggaacacaaagggcctccaagctggtgacactggagacgaaaagtcagttcatcatggcaagtaatggcagtttaatctcctcaggttctcaagactcagaagttagtgaagagcaaaagagagaaaaaatccttgaactaaagaagaaggagaaactattacaagaaaaacttctgaaaaaagttgaggagcttaagaagatctgtctgcgggaggctgagctcacaggcaaaatgccaaaggagtatcccctgaacataggcgagaagcctcctcaggtcagaagacgtgtgggtactgcgttcaaattagatgacaacttgctgccgagtgaagaagatcctgctttgcaagaactggagagtaattttctaatacaacaaaagctggtggaagctgcaaagaaacttgccaatgagccagacctttgtaaaactgtgaagaaaaagcgaaagcaagattacacagatgcgatgaaaaagcttcaggagattgaaaatgcaataaacgaataccgaattaggtgtggaaagaaacccagccagaaagcaacagtgttaccagaagacataatcccctcagagagtagctctttgtctgacaccaccacctatgatgatcccagtgatgccttcacttttcctgggcagcgatcaagttcagtacctcattctccaagaattcttccccccaagtctcttggtattgagcgaatccatttcagaaagtcgtccatcaatgaacagtttgtggataccaggcagtccagagaaatgctgtccacacacagcagcccttacaaaactctggagaggcggccccagggaggacgaagcatgcccaccacgccagttcttacccgaaacgcctacagcagcagccacttggaacccgaatcttcatctcagcactgccgccagcggagtggaagcctggagtcccagtcccacctgctctccgagatggacagcgataagccatttttctccctctccaaatcccaaagaagcagcagcacagaaatcctcgatgacgggtcttcttatacaagccaatcaagcacagagtattactgtgtgacaccagttaccggcccctattacaccacccagaccctggacactcgcaccaggggtcggaggaggtcaaagaaacagaatgtttctacttcaaattcaggaagcatgcccaacctagcacaaaaggatagtttgaggaatggtgtttactcaaagagtcaggagccaccgtcttccagttactacattgccgggtacacaccctatgcagagtgtgacttttattacagtggtggttatgtctatgagaatgacaccgagggacagtatagtgtcaacccttcctaccggtcctcagcccactatggatatgagcgccagagggactacagcagatcctttcacgaagatgaggtcgaccgggtaccccataacccatatgcaactctccggctgccaaggaaggctgctgcaaaatcggagcacatcaccaaaaacatccacaaggccttagttgccgagcacttgcgtggctggtaccagcgggcctctgggcagaaggatcagggacacagcccgcagaccagctttgactcagacaggggatcacagagatgcctggggtttgcggggctgcaagtaccttgttctccaagcagtcgtgcatcctcgtactcttcagtgtcttctacaaatgcttctgggaactggaggacccagttaaccatagggctgtcggattacgagactccagcacattcttcttacaccagctgctatggcaatgtctataatcctttaccctctccaagcagacaatacacagaaatcagtcaactggatggtacagatggaaaccagctggaagacaacctggagagtagtgagcagagactcttttggcatgaagattcaaagcctggaacattagtctgaactgcagttggacctcctgaccaagcactgcgttctcacactagtgtgccttgcaaattgtatttgtcttccgagaggatgttcgttttagaaacctaaagacatcaaaggttgaagagaagacttagttgccctggaagtgaatcagtgaatcacacaccaagccccacaaagcccctaaaggaggatttggcctttcaaactctaggcactaacgtaactgtagggtctgcccacatgttgaagtattgccaagagaggactcagtgtgaagccttcatcaatagcaagcactttttaagggagtaaaagttgttaaaggcaaacctcaaaaacatgaaagggcattcaggatgtcccatggcaataagaacaggggaaatctcagagcacaattcagcaggatgagagaaggggaaccagaagctccggagtcattgctcacttcagagtttgaattcgtgagctgacaaagagtaacatgctctttctacacagacatggacaatttagacagtattggaaaattacttgaagctggattttcatgaagttctgaatgagtgtaaatgttttttaggatactataaagagtgatgtttttcataagcaccataaaatgggttctggaaaaactgattaccttagcatcctgtaatataacttatggtagcagattggggaaaatgaagcagcccactgaataattgacaaagtctgcttggagaacattctaaggtacaatatcatggagctcctttttcctttctccactaattgcgtgatgagctattgttctggctgttaattctccaactcggctgtcatttgaagtggcagacttaatatggaaagtttttataattatgagtttgaaaaagcattttaagatgatacagaaagtatccaaaacaacagaaaaaaaaagccacgtcattttagatgaattgcgtgccttaaaatggtgaacgttagaaaattaaacaagtctggattccacaagtagttccaagtcaccaagtgacaaaaacaaggttaacattaaaaaagaaaaacaacaacaacgacaaaaagctccaagctgcagtggatttaattatgaggctaaaactacctcatactttccttggaagaactaattagctatggtttattgtagggttttgtttgtttgttttttaaagcaaatgatttccatattccagattgatcttttttgtcatctttgcttcaaaattacataaaaggtgctcctttcccccttcttttatacaagtttcttgttcatattgtgaatagaaaagtttctgaacaacttttttggaacattttctatctatattccaaagcatgtaatatatacataaaaacgatttgttaaactggtccttagtcatttgtataattagaaatgaagtttgggaaaaaattttggaaaaaagacaagcaaaaaaaaataacttattccttttttgcatatttgtatagccttctagaatcagaaataacctttttgcatattcttttattgttctgacttttcaagacctattatttttttacataggtcaataaacaaaaggtgtgctactgaaaatgtttacgttttcttccatttatgtcaggggttcatgtgaagcaggtcgcagtgctctacttcaagtaatcatattgggcaaggcttcggatttttatttatagtattaccgtattttattaattccgggatgtacatttttaaatatttacattaaaaacatggttcatctttttattgatggcatattctacttgaattggcagttttttcttaatagtacattaaaaataatgctgtgtcttacaataaagttgccttagaattga

SEQ ID NO: 4366 - DNA, 3868 bp, Homo sapiens
  source 1..3868: mol_type = genomic DNA
gcggcggcggcggtgcctgggcggcagcagcagcagtagcggcagccctgaggacggtgagacggccgcggcggcggcgacagcgcggaagtcgcgcgggacccagagcttcccccctgtcgctagtgctgaggctttcgcctttcctacccagcttcttgctcacggcccgggctgggctgggcagggcaacgcgcccccggggaggggcggagctgtagatatggtgtaagatacttcttcaagattggacagctggggaccttcttctgattaaccttaaaccaacttgtagccatagagacacctcacaaggttcccatttttgttgttgttgttgttgattttctgctcacacctttcctgaccttgcaaccatgtatggaagtgcccgctctgttgggaaggtggagccgagcagccagagccctgggcgttcacccaggcttccacgttcccctcgcttgggtcaccgtcgaaccaacagtacgggagggagttcgggaagcagtgttggaggtggcagtgggaaaaccctttcaatggaaaatatacaatctttaaatgctgcctatgccacctctggccctatgtatctaagtgaccatgaaaatgtgggttcagaaacacctaaaagcaccatgacacttggccgttctgggggacgtctgccttacggtgttcggatgactgctatgggtagtagccccaatatagctagcagtggggttgctagtgacaccatagcatttggagagcatcacctccctcctgtgagtatggcatccactgtacctcactcccttcgtcaggcgagagataacacaatcatggatctgcagacacagctgaaggaagtattaagagaaaatgatctcttgcggaaggatgtggaagtaaaggagagcaaattgagttcttcaatgaatagcatcaagaccttctggagcccagagctgaagaaggaacgagccctgagaaaagatgaagcttccaaaatcaccatttggaaggaacagtacagagttgtacaggaggaaaaccagcacatgcagatgacaatccaggctctccaggatgaattgcggatccagagggacctgaatcagctgtttcagcaggatagtagcagcaggactggcgaaccttgtgtagcagagctgacagaggagaactttcagaggcttcatgctgagcatgagcggcaggccaaagagctgtttcttcttcgaaagacattggaggaaatggagctgcgtattgagactcaaaagcagaccctaaatgctcgggatgaatccattaagaagcttctggaaatgttgcagagcaaaggactttctgccaaggctaccgaggaagaccatgagagaacaagacgactggcagaggcagagatgcacgttcatcacctagaaagccttttggagcagaaggaaaaagagaacagtatgttgagagaggagatgcatcgaaggtttgagaatgctcctgattctgccaaaacaaaagctctgcaaactgttattgagatgaaggattcaaaaatttcctctatggagcgtgggcttcgagacctggaagaggaaattcagatgctgaaatcgaatggtgctttgagtactgaggaaagggaagaagaaatgaagcaaatggaagtgtatcggagccattctaaatttatgaaaaataagattggccaggtgaaacaggagctgtccagaaaggacacagaactactcgccctgcagacaaagctagaaacactcacaaaccagttctcagatagtaaacagcacattgaagtgttgaaggagtccttgactgctaaggagcagagggctgccatcctgcagactgaggtggatgctctccgattgcgtttggaagagaaggaaaccatgttgaataaaaagacaaaacaaattcaggatatggctgaagagaaggggacacaagctggagagatacatgacctcaaggacatgttggatgtgaaggagcggaaggttaatgttcttcagaagaagattgaaaatcttcaagagcagcttagagacaaggaaaagcagatgagcagcttgaaagaacgggtcaaatccttgcaggctgacaccaccaacactgacactgccttgacaactttggaggaggcccttgcagagaaagagcggacaattgaacgcttaaaggagcagagggacagagatgagcgagagaagcaagaggaaattgataactacaaaaaagatcttaaagacttgaaggaaaaagtcagcctgttgcaaggcgacctttcagagaaagaggcttcacttttggatctgaaagagcatgcttcttctctggcatcctcaggactgaaaaaggactcacggcttaagacactagagattgctttggagcagaagaaggaggagtgtctgaaaatggaatcacaattgaaaaaggcacatgaggcagcattggaagccagagccagtccagagatgagtgaccgaatacagcacttggagagagagatcaccaggtacaaagatgaatctagcaaggcccaggcagaagttgatcgactcttagaaatcttgaaggaggtggaaaatgagaagaatgacaaagataagaagatagctgagttggaaagtctcacctcaaggcaagtgaaagaccagaataagaaggtagcaaatctgaagcacaaggaacaggtggaaaaaaagaagagtgcacaaatgttagaggaggcgcgacgacgggaggacaatctcaacgacagctctcagcagctacaggacagtctccgtaagaaggatgacaggattgaagagctggaagaagcactaagagaaagtgtacagataactgcagagcgggaaatggtgctagcacaagaggaatcagccaggaccaatgctgaaaaacaggtggaggagttactgatggccatggagaaggtaaagcaggaactagaatccatgaaagcaaagctgtcctccacccagcagtctctggcagaaaaggaaactcacttgactaatcttcgggcagagagaaggaaacacttagaggaagttctggagatgaagcaagaagctcttctggctgccattagtgaaaaagacgccaatatagctctcttggagctttcgtcctctaagaagaagacccaagaggaagtggctgccctgaagcgggagaaggatcgtctggtacagcagcttaagcagcagacgcaaaatcgaatgaagctaatggccgacaactacgaggatgaccacttcaaatcctcccattccaatcaaacaaatcacaagccctccccagaccaggatgaggaggagggtatatgggcatagccaatcagaggcttagttcagccattttgttcagaacgatcatccagcccctcttagaacttgaccaaaatagaagtaaattaaagttgtacattggacacctgacaaccctctgccatgaccgagaccccctgatcctccgtggactcactccaccagcttcctataacttggacgatgaccaggcggcttgggagaatgagctgcagaagatgacccgggggcagcttcaggatgagttagagaaaggtgaacgggacaatgcagaactgcaggagtttgccaacgccattcttcagcagatagcagaccattgtcccgacatcctagagcaagtggtcaacgccctggaagagtcctcttgaccctgctttatggggaagcctgaggtagtcaacccaggagccaagaaaagagaactacgaggaacaggtgcccggaaccttcttggcaccaaacactacaaacttcatcccaacttgctcacttgaagaagtgtgattccagcaccg

SEQ ID NO: 4367 - DNA, 4384 bp, Homo sapiens
  source 1..4384: mol_type = genomic DNA
atgcttaccgtccaagtgaagacttcctctgccatagaacttccagattccttggcattcctgtggatcatcccaatgtggtactgtgaaggcaaggagcttgaaaattccccagatattcacatcgtccaggcaggaaatctgcactcactgaccattgcggaagcctttgaagaggacacaggacgctattcctgctttgcttctaacatctatgggacagattcgacttctgctgagatttatatagaaggggtttcttcttctgactcagaaggcgaccctaacaaggaagagatgaatcgaatccagaagccaaatgaggtgtcatctcctcccactacctctgcagtcattcctccagcagtaccccaagcccagcatttggtggcccaacctcgtgtggcaaccatccagcagtgtcagagccccaccaattacttgcagggattggatggaaaacctatcattgcagctcctgtgtttacaaagatgctacaaaatttgtcagcttctgagggtcagctggttgtctttgaatgcagagtaaaaggagctccatctcctaaggttgagtggtatagagaagggactttaatagaagattctccagattttaggattttacagaaaaggcctgtctgcatggagcatatagaggagatttgcaccttggtcattgctgaggtgtttgcagaagattctgggtgcttcacatgtactgcaagcaacaaatacggcacagtgtcaagcattgcacagctgcacgtgagaggaaatgaggacctcagcaacaacgggtctcttcactcagccaactctaccaccaacctggcagctattgagccacagccctccccaccccactcagagcctccatctgtggaacaaccccccaaacccaaactcgagggggttctggtgaaccacaatgagccccggtccagctccaggattgggcttcgtgtgcacttcaacctgcctgaagatgacaaaggaagtgaagcatcctccgaggctggtgtggtgaccaccagacagaccaggcccgattctttccaggagaggttcaacggacaggcaacaaaaaccccagagccttcttcccccgtgaaagagccccctccagttctggccaaacccaaacttgattccactcagttacaacagcttcataaccaagtcttactggaacaacaccaattgcaaaacccacctccttcatctcctaaggagtttcctttcagcatgactgttttgaactccaatgctcccccagcggtgacaacatccagtaagcaggtgaaggctccttcatcacagacgttcagcttggcccggccgaagtatttcttcccctccacgaacaccaccgcagcaactgtggccccttccagctctccggtgttcactttgagcagcactcctcaaactattcagaggacagtgagcaaagaaagcctcttagtgtctcacccctctgtgcaaaccaaatctccaggagggctttccatccaaaatgagccactcccaccaggcccaacagaaccaacaccaccaccattcacattttccatccccagcggaaaccagtttcagccccgctgtgtgtccccaattcctgtctctcctaccagccggattcagaacccagtggctttcctcagctctgttctgccttctctccctgccatcccacccacaaatgccatggggctgcctagaagtgcaccatccatgccatcccagggattagcgaagaaaaatacaaagtctcctcaaccagtgaatgatgataacattcgtgaaactaagaacgcagtgattcgagacttggggaaaaaaataactttcagtgatgtcagaccaaaccagcaggagtacaaaatttcaagctttgagcagaggctgatgaatgaaatagagtttcgcttggaacgtactcctgttgatgaatcagatgatgaaattcaacatgatgagatccccacgggcaagtgtattgctcccatctttgacaagagactcaagcacttccgggtcacagaaggctctccagttacattcacctgcaaaattgttgggatacctgttccaaaggtttactggttcaaagatgggaagcagatttctaagagaaatgagcactgcaaaatgaggcgagaaggagatgggacatgctctctgcacattgaatccactaccagtgatgacgatggcaactacaccatcatggcagccaacccccaggggagaatcagctgttctggccacttgatggtacaaagtttgcccattcgcagtcggctaacctctgctggtcagtctcacaggggaagatcccgagtgcaagaaagagacaaagagcccctacaggaacgctttttccgaccacatttcctgcaggctcctggggatatggtagctcatgaggggcgcctctgtcggctggactgtaaggtgagtggtttaccgcccccggagctgacatggctactcaatggccaacctgtgctaccagatgcctcccacaagatgctggtcagggagaccggagtccactctctgctcattgacccactcactcagcgcgacgcagggacctataagtgcatcgctaccaacaaaaccgggcagaattcttttagtctggagctctctgtagtagccaaagaggtgaagaaagcacctgtgatcctggagaaactacagaactgcggtgttcccgaaggccaccccgtgagactggagtgccgcgtgataggcatgcccccacctgtgttctactggaagaaagacaatgagaccatcccttgcaccagagagaggatcagtatgcaccaggacacaacagggtatgcctgccttctcattcagccagccaagaaatcagacgctggatggtacacgttgtcagccaagaatgaagccggcatcgtgtcgtgcactgccaggctggatatatacgctcagtggcaccatcagatcccaccgcccatgtctgtccggcccagtggcagtcgctacggatctctcaccagtaaaggacttgacatattttctgccttttcctccatggaaagcacgatggtgtattcatgctcttctcggagtgtagtggagagtgatgaactttaagaatgtctaggtacctgctgtgtaagagagcggactgtggagggggaatgagaacaagccagacttggtggtttccaagcaaccgaagttgagtaagttcccacactgctggacctgtggcaaagagtgctttgaataagtcagctagggattcttgcagtctcagctgagggagaaaggtagggctgtgccttctaaagattccaacagagatgtgagaagataatacagatgaaccaaagatgtcacacagttgccatccactgctttgggaaaaaactagcatgctcccctgctccctgttgtgttagggatgtttaggtcatactaggagcaattaggagccatatgcctgggctgagaagagctaggcagtagtgaccttaggatatgactaactcaccaaacaatgccaaggagaaaggcggacaggtcaccatcacctttcatcgattacatgtatagcagtagttttggtgaattcaccaaatcagcttccacttagcattaggaggtcatgccatacaactcacgtatgcgggcaaacacttttgatttgcatatcctgggtgtactgagccacataataaggtgtcaaaatgtgcttgagattccaaaaacttgctgaaacacttgatattgcacagtgcacttattttgtggccaaagcatggccttaccagcttgtctgcactattttcttttgggtggtgactgtttttttctgactttgcatatccctagacactagaactaaaggattggtaataaaccaatcagaaagaaatcctctgtggggtcactttaaaaactactagcttcaactaccacttacaaaatgtgcaagagtcatcatttgcccataaaatacacctcatgggctcctacccctttccccaaaagtctgaaagtgtaggaggaaggaagagatacaaacaaggagaggaaatgatgggagagtgttgtttttgtcacttgccccagcagagcaggggttttggaaggagaggtctttaatagctttgaaatgctttgagatcattggtcaaattgcattttctatgtagagaatattctgctaggtggaaaagttgggagaaaggggaatatgcatctttattctaatcaccaattcaaaccctgcctcttaaggaatttttagacttaagttcactgtgatatccctagtacctagaagagtacctagcacaaagtagacattcaataaatatttgctggttgaatg

SEQ ID NO: 4368 - DNA, 69 bp, Homo sapiens
  source 1..69: mol_type = genomic DNA
gtgaggctggcttggggcttcgtctcggctctgggctccttccacacggctgaccctgaaggagcagcc

SEQ ID NO: 4369 - DNA, 2273 bp, Homo sapiens
  source 1..2273: mol_type = genomic DNA
acacgccgcgctgaggcccgcgggcccgtcatggaggcgcccaccgtggagacgccccccgacccctcgcccccttcggccccggcccctgccctggttccgttgcgcgccccggatgtggcgcggctgcgcgaggagcaggaaaaggtggtcactaactgccaagagagaatccagcattggaagaaggtagataatgactataatgcccttcgagaaagactcagcaccttgcctgataaattgtcttataatataatggtaccatttggcccttttgccttcatgccaggaaaacttgtccatactaatgaagtcactgttttactgggggacaactggtttgcaaagtgctcagcaaagcaggctgtaggtttagttgagcaccggaaagaacatgtaagaaaaacaatagatgacttaaaaaaagtgatgaaaaattttgaatccagagttgaattcacagaagatttgcagaaaatgagcgatgctgcaggtgatattgttgacatacgagaagaaattaaatgtgacttcgaatttaaagcaaaacaccgaattgctcataaaccgcattccaaaccaaaaacttcagatatttttgaagcagatattgcaaatgatgtgaaatccaaggatttgctagctgataaagaactgtgggctcgacttgaagaactagagagacaggaagaattgctgggtgaacttgatagtaagcctgatactgtgattgcaaatggagaagatacgacatcttctgaagaggaaaaggaagatcgtaacacaaatgtgaatgcgatgcatcaagtaacagactctcatactccttgtcataaggatgttgcaagttcagaaccattcagtggtcaagtgaatagtcagttgaactgttcagtgaatggttccagttcttaccacagtgatgatgatgatgatgatgatgatgacgacgacgacgacaacattgacgacgatgatggtgataacgaccatgaggctttaggggttggagataattctataccaacaatatatttttcacatactgttgagcctaagagggtccgaataaatactggaaagaataccactttaaaattcagtgaaaagaaagaagaagccaaacgtaaacgaaagaacagcactggcagtggccactctgcccaggagctgccgaccatcaggacgcctgcagacatttacagagcctttgttgatgttgtgaatggagaatatgtccctcgcaaatccatcctgaagtctcgaagtagagagaatagtgtgtgtagcgacactagtgaaagcagtgctgctgaatttgatgataggcggggagttttgaggagtatcagctgcgaagaagccacttgcagtgacaccagtgagagcattttggaagaggaaccacaagaaaatcaaaagaaacttttgcccttatcagtaacacctgaggctttttctggaactgttatagaaaaagaatttgtatcaccttccttaacaccacccccagccattgctcatcccgcactacccactattccagaacgaaaggaagttctgttggaagcatctgaagaaactggaaagagggtttcaaagtttaaagctgccagattgcaacagaaagactaggccctgtctaggaaatgggaatttacatcctaaaacctagttgttcatttgtttagagtatctatagcaaaataggttacatgtagtttgaaataaggtatcctgagttactttggcaacaagttcttttacccttacccgtggtatttgaaaaaaatcaaggtaactgtctgaatactttaatatcagcttgttttgtgaattctctgaatactgtcaacactcttatctaagtttgcctttatgatgcagtggcagcattttgaattacttttcaaagaatactgttcatatgcattgtttttgtgtttcaaactaaatacaggcagttttgtgccagctgtgatattgtgcataccatatggaccattttaaagaaaattttaaaatttcaaatagattcaacaattacattacttgctttcacattttaaaggcactttaaaaaaatctacttctcttgtaggttttgcggctagttggctattcaagaaacctcgcccctctgaatgtcatactgtaatctttaaggaagaaagctacatgaattaattgtactctatgggaaaatttctttggaaagatattttgtaaaacttttttttccaagtaaaaactttatgaaacttggtctc

SEQ ID NO: 4370 - DNA, 1865 bp, Homo sapiens
  source 1..1865: mol_type = genomic DNA
aacaagttaagctgaagaccgaagcaagagctggttcagagcctgccttcaacccccaaagcagcttggatcagggaggagggccgctgctccagcagtgacgatgacaccgacgtggacatggagggtctgcggagacggcggggccgggaggccggcccacctcagcccatggtgcccctggctgtggagaaccaggctgggggtgagggtgcaggcggggagctgggcatctccctcaacatgtgcctccttggggccctggttctgcttggcctgggggtcctcctcttctcaggtggcctctcagagtctgagactgggcccatggaggaagtggagcggcaggtcctcccagaccccgaggtgctggaagctgtgggggacaggcaggatgggctaagggaacagctgcaggccccagtgcctcctgacagtgtccccagcctgcaaaacatgggtcttctgctggacaagctggccaaggagaaccaggacatccggctgctgcaggcccagctgcaggcccaaaaggaagagcttcagagcctgatgcaccagcccaaagggctagaggaggagaatgcccagctccggggggctctgcagcagggcgaagccttccagcgggctctggagtcagagctgcagcagctgcgggcccggctccaggggctggaggccgactgtgtccggggcccagatggggtgtgcctcagtgggggtagaggcccacagggtgacaaggccatcagggagcaaggccccagggagcaggagccagaactcagcttcctgaagcagaaggaacagctggaggctgaggcacaggcattaaggcaagagttagagaggcagcgacggctgctggggtctgtacagcaggatctggagaggagcttgcaggatgccagccgcggggacccagctcatgctggcttggctgagctgggccacagattggcccagaaactgcagggcctggagaactggggccaggaccctggggtctctgccaatgcctcaaaggcctggcaccagaagtcccacttccagaattctagggagtggagtggaaaggaaaagtggtgggatgggcagagagaccggaaggctgagcactggaaacataagaaggaagaatctggccgggaaaggaagaagaactggggaggtcaggaggacagggagccagcaggaaggtggaaggagggcaggccaagggtggaggagtcggggagcaagaaggagggcaagcgacagggcccgaaggaacccccaaggaaaagtggtagcttccactcctctggagaaaagcagaagcaacctcggtggagggaagggactaaggacagccatgaccccctgccatcctgggcagagctgttgaggcccaagtaccgggcaccccagggctgctcaggtgtggacgagtgtgcccggcaggagggcctgactttctttggcacagagctagccccagtgcggcaacaggagctggcctctctgctaagaacatacttggcacggctgccctgggctgggcagctgaccaaggagctacccctctcacctgctttctttggtgaggatggcatcttccgtcatgaccgcctccgcttccgggattttgtggatgccctggaggacagcttggaggaggtggctgtgcaacagacaggtgatgatgatgaagtagatgactttgaggacttcatcttcagccacttctttggagacaaagcactgaagaagaggtcagggaagaaggacaagcactcacagagcccaagagctgcggggcccagggaggggcacagccatagccaccaccaccaccaccggggctgacaccctgccccaca

SEQ ID NO: 4371 - DNA, 2391 bp, Homo sapiens
  source 1..2391: mol_type = genomic DNA
ccgcagttcttgagttccacatgcagagcagatgcgacagctagaagtgagtagggcccagaccctggcccaggaagatccactaaaggaggccatccttccgccttcttctgcaggagtcaggatggaaaggcagatgtaaagtccctcatggcgaaatataacacggggggcaacccgacagaggatgtctcagtcaatagccgacccttcagagtcacagggccaaactcatcttcaggaatacaagcaagaaagaacttattcaacaaccaaggaaatgccagccctcctgcaggacccagcaatgtacctaagtttgggtccccaaagccacctgtggcagtcaaaccttcttctgaggaaaagcctgacaaggaacccaagcccccgtttctaaagcccactggagcaggccaaagattcggaacaccagccagcttgaccaccagagaccccgaggcgaaagtgggatttctgaaacctgtaggccccaagcccatcaacttgcccaaagaagattccaaacctacatttccctggcctcctggaaacaagccatctcttcacagtgtaaaccaagaccatgacttaaagccactaggcccgaaatctgggcctactcctccaacctcagaaaatgaacagaagcaagcgtttcccaaattgactggggttaaagggaaatttatgtcagcatcacaagatcttgaacccaagcccctcttccccaaacccgcctttggccagaagccgcccctaagtaccgagaactcccatgaagacgaaagccccatgaagaatgtgtcttcatcaaaagggtccccagctcccctgggagtcaggtccaaaagcggccctttaaaaccagcaagggaagactcagaaaataaagaccatgcaggggagatttcaagtttgccctttcctggagtggttttgaaacctgctgcgagcaggggaggcccaggtctctccaaaaatggtgaagaaaaaaaggaagataggaagatagatgctgctaagaacaccttccagagcaaaataaatcaggaagagttggcctcagggactcctcctgccaggttccctaaggccccttctaagctgacagtgggggggccatggggccaaagtcaggaaaaggaaaagggagacaagaattcagccaccccgaaacagaagccattgcctcccttgtttaccttgggtccacctccaccaaaacccaacagaccaccaaatgttgacctgacgaaattccacaaaacctcttctggaaacagtactagcaaaggccagacgtcttactcaacaacttccctgccaccacctccaccatcccatccggccagccaaccaccattgccagcatctcacccatcacaaccaccagtcccaagcctacctcccagaaacattaaacctccgtttgacctaaaaagccctgtcaatgaagacaatcaagatggtgtcacgcactctgatgtagttattcctctggaccatgaacaagacagtgaaggagaaacatatgaagacatagaagcatccaaagaaagagagaagaaaagggaaaaggaagaaaagaagaggttagagctggagaaaaaggaacagaaagagaaagaaaagaaagaacaagaaataaagaagaaatttaaactaacaggccctattcaagtcatccatcttgcaaaagcttgttgtgatgtcaaaggaggaaagaatgaactgagcttcaagcaaggagagcaaattgaaatcatccgcatcacagacaacccagaaggaaaatggttgggcagaacagcaaggggttcatatggctatattaaaacaactgctgtagagattgactatgattctttgaaactgaaaaaagactctcttggtgccccttcaagacctattgaagatgaccaagaagtatatgatgatgttgcagagcaggatgatattagcagccacagtcagagtggaagtggagggatattccctccaccaccagatgatgacatttatgatgggattgaagaggaagatgctgatgatggctccacactacaggttcaagagaagagtaatacgtggtcctgggggattttgaagatgttaaagggaaaagatgacagaaagaaaagtatacgagagaaacctaaagtctctgactcagacaataatgaaggttcatctttccctgctcctcctaaacaattggacatgggagatgaagtttacgatgatgtggatacctctgatttccctgtttcatcagcagagatgagtcaaggaactaatgttggaaaagctaagacagaagaaaaggaccttaagaagctaaaaaagcaggaaaaagaagaaaaagacttcaggaaaaaatttaaaaaa

SEQ ID NO: 4372 - DNA, 2437 bp, Homo sapiens
  source 1..2437: mol_type = genomic DNA
atgacttctgccttcaagctggatttcctcccggacatgatggtcgagggccgcctgctcgttcctgacagaattaacggcacagccaacaagatgaacggagctttggatcactcagaccaaccagacccagatgccattaagatgtttgtcggacagatcccccggtcatggtcggaaaaggagctgaaagaactttttgagccttacggagccgtctaccagatcaacgtcctccgggaccggagtcagaaccctccgcagagtaaaggttgttgtttcgtaacattttatacaagaaaagctgcacttgaggcccagaatgcactgcacaatattaaaactttacctgggatgcatcatcccattcagatgaaacctgcagatagtgaaaagtccaacgctgtggaagacagaaaattgttcataggaatggtatcgaagaaatgtaatgagaacgacatcagggtgatgttctctccatttggccagatagaagaatgccggatcctccggggacctgatgggctgagtcgaggctgtgcgtttgtcacattttctacaagggcaatggcacagaatgcaatcaaagccatgcatcagtctcagaccatggagggctgctcttcacctatcgtggtgaagtttgctgacactcagaaggacaaagagcaaaggcgcctccagcagcagctcgctcagcagatgcagcagctcaacactgccacctgggggaacctgacagggctgggcggactgaccccacagtatctggcgctcctgcagcaggccacctcctccagcaacctgggtgcgttcagcggcattcaacaaatggcaggcatgaatgctttacagttgcagaacctggcgacgctggctgctgctgcagctgcggcccagacctcagccaccagcaccaatgcaaaccctctctctaccacgagcagcgccctgggagccctcacgagtcccgtggctgcttcaacccccaactccactgctggtgcagccatgaactccttgacctctctcgggactctgcaaggactggctggagccactgttggactgaataatattaatgcactagcagttgctcaaatgctctcaggtatggcggctctgaatggaggacttggcgccacaggcttgacgaatggcacggctggcaccatggacgccctcacccaggcctactcaggaattcaacagtacgcagccgccgcgctgcccactctgtacagccagagcctgctgcagcagcagagcgctgcaggcagccagaaggaaggtccagagggggcaaacctctttatttaccaccttccacaggaatttggagaccaggacattctgcagatgttcatgccttttggaaatgttatctctgctaaagtcttcattgacaaacagaccaatctgagcaagtgctttggttttgttagctacgacaatccagtctctgcacaagctgctatccaagctatgaatggctttcagatcggcatgaaacgcttgaaggtgcagctgaagcgttccaaaaacgacagcaaaccttactgatcctaaccccagaggctccctgctctcattttagctttcttaggacatcttcatgcccgttagttcatcgtttgcctagcatgtccctgtggcgtctcaaaaaaaagtttcatcgtcccgtcattgtttctgatgtctttctgacctcacatcatatttggttctcctactgacctttgatctagtttgacctttgaaatttgcatgtgacctcatctagctatgaattctgggaagtcaatgtgaaaaacattgctgcattcatgcaagactgaaatttattattagacaaattcattatagaaaaaacctgtggcaaaaacgtttctttcttattttttttcttttcctaaaacagacttgaaagtattatacagggattggcattcttcccggtcactggtaacaatagcaatatgtgtccagggacacagaatgttggtttctaacagactacttccaaaaacagtttgagaaaaaaactgtctgattttaagtctctagaggtctgtaatagtttttacatttttcaggcagtgtaaagttttttgataaggccattttaggtggctcactttctcattaagatatatatatagaaccactttttgtagattagtataagaaaaatatttaccctgttttggggcaaatgctacctatttgtgtcaccttttgctgaactcacagttagacaatccatggtttaatgcacatgaaattacctatattttatactgtttcaatgtacaggagaaaggttactgtaaactgtgttatgttggtgcttctgtgaattaagttgtggtttcatcatgagtcttaatgttctttgttgataagacaagtttagaattggtttacttaatac

SEQ ID NO: 4373 - DNA, 1959 bp, Homo sapiens
  source 1..1959: mol_type = genomic DNA
cccctcaggagaagtcgggaaggtggcggcggcggcggcggttgtcccggctgtgccggttggtgtggcccgtcagcccgcgtaccacagcgcccgggccgcgtcgagcccagtacagccaagccgctgcggccgggtccggcgcgggcggcgcgaagcggaagcaggaggagaagcacctgaagatgctgcgggacatgaccggcctcccgcacaaccgaaagtgcttcgactgcgaccagcgcggccccacctacgttaacatgacggtcggctccttcgtgtgtacctcctgctccggcagcctgcgaggattaaatccaccacacagggtgaaatctatctccatgacaacattcacacaacaggaaattgaattcttacaaaaacatggaaatgaagtctgtaaacagatttggctaggattatttgatgatagatcttcagcaattccagacttcagggatccacaaaaagtgaaagagtttctacaagaaaagtatgaaaagaaaagatggtatgtcccgccagaacaagccaaagtcgtggcatcagttcatgcatctatttcagggtcctctgccagtagcacaagcagcacacctgaggtcaaaccactgaaatctcttttaggggattctgcaccaacactgcacttaaataagggcacacctagtcagtccccagttgtaggtcgttctcaagggcagcagcaggagaagaagcaatttgaccttttaagtgatctcggctcagacatctttgctgctccagctcctcagtcaacagctacagccaattttgctaactttgcacatttcaacagtcatgcagctcagaattctgcaaatgcagattttgcaaactttgatgcatttggacagtctagtggttcgagtaattttggaggtttccccacagcaagtcactctccttttcagccccaaactacagcatttagaatgctttcatctagctgcagttttggtgaatttacttcagcttttcctcttcaggctacccacagtggaagtgctgcatcagtaaatgctaattttgctcattttgataacttccccaaatcctccagtgctgattttggaaccttcaatacttcccagagtcatcaaacagcatcagctgttagtaaagtttcaacgaacaaagctggtttacagactgcagacaaatatgcagcacttgctaatttagacaatatcttcagtgccgggcaaggtggtgatcagggaagtggctttgggaccacaggtaaagctcctgttggttctgtggtttcagttcccagtcagtcaagtgcatcttcagacaagtatgcagctctggcagaactagacagcgttttcagttctgcagccacctccagtaatgcgtatacttccacaagtaatgctagcagcaatgtttttggaacagtgccagtggttgcttctgcacagacacagcctgcttcatcaagtgtgcctgctccatttggagctacgccttccacaaatccatttgttgctgctgctggtccttctgtggcatcttctacaaacccatttcagaccaatgccagaggagcaacagcggcaacctttggcactgcatccatgagcatgcccacaggattcggcactcctgctccctacagtcttcccaccagctttagtggcagctttcagcagcctgcctttccagcccaagcagctttccctcaacagacagctttttctcaacagcccaatggttttgcagcatttggacaaacaaagccagtagtaaccccttttggtcaagttgcagctgctggagtatctagtaatccttttatgactggtgcaccaacaggacaatttccaacaggaagctcatcaaccaatcctttcttatagccttatatagacaatttactggaacgaacttttatgtggtcacattacatctctccacctcttg

SEQ ID NO: 4374 - DNA, 3403 bp, Homo sapiens
  source 1..3403: mol_type = genomic DNA
aggaatggttttagggaagactgttgccggatgacaaggctgtcactattgttctgtactacctgacattatgggaccaggccagccagcttcaacctgtgttcatctagcacctaggacccaacttgatgggaggagcgaccccaaagtacttcagacccagaaccagctgcagtttaataggaatgttcctacacattcaagcaacttggcgatccgatattcttgcccacatgccattagaattgaaaaactgaagcactcatacaatgaatcataccattgtaaagatgcagattgtagagttggtcctgacctgggcagttctgtttcattttccgtcatatcccaagagagacttagctatgctgtccacctagccagaagagatgtgaaacgaagacaatttgaaaaacatataaaagaacatcatctcagaagtcagcctcaaagctctcagaagtgtggacatactaagtataaaatacccgaccacagggtggaaaggaaggaatcaaagagtcaagcagcctgtcagtgtagccaccagccatccaaagtagaaatctccagctctggtgccaaagtatacctttactcatctcatccaggccagtcagatcttactgtgccaaattcgccacccacccatgatccgggacttcagcctcatcccaggataggtgaccacaaaaacataagtgaacagaaaagcctgctagaagtccagcgactccagaaagaactgagcagttgtatccacaaaattgaagaggtaactaaaaaaggtaaaagaaatccaggaagaattggataaattgagtccacataaaattaaacacactaagaagtcatgggcaatgtctaagctggcggctgcccatcgaggagccattcgggccttacagatgtttgtcactcagtttactgaccgaggggagcatccacttcctgctcggtgtaaggaactgggcagccttattcgccagctttcactttgttctgtcaagctggatgcagacccttctgttcctgatgtggttatagatattctgcaacaaattgaggctttggaatctctcctggaaaagaaactgtcaccaaaaaaggtgaaaaaatgtttcagtgaaattcggagcagatttcctatcggtagccaaaaggccttggagagatggccaagtacatcaccaaagggtgagaggaggcccctcacagcaaaggacacattcccacaggaaacaagtcgaccttctgtagcaaagcagcttcttgccgataagtatcagcccgatacggagcttccggagacccagaggttgcagagtgagcttgatgtattagatgcggatatagttctggaagaaggaccatttattctagaccaaagtgcaagcttcaaagacgaggtgttagccgtggcaaaaacaaaagcagggaaaaagaagcctgtgactgagaatgtgccgtttaggaagaaagatactctggcgccagcaagacagcaaggactccgcaaagctgaaagaggtagacaaagccaacctcacagtaaaagcagagtgcagcagacaacagtttcatccagattaaaaatgaaccggcagcctgtgaaagaccgcaaggcaccatggatacccccaaaccccacatccccaccagcgtctcctaaatgtgctgcatggctaaaggtgaaaactagccccagagatgccacaaaagagcctctccagcaagaagatcctcaagaggaaagtcacctgacaggtgctgttgagcatgaagcagccaggctcgcttggcttgatgctgaaacttccaaaagattgaaggaactagaagagttaaaagccaaggaaattgacagcatgcaaaaacagaggcttgattggcttgatgctgaaacttctagaagaacaaaggaactgaatgagctcaaagctgaagaaatgtatagactccaacaattgagtgtttctgccacccacttagcagacaaggtagaggaggcagttctggatcgtttgaagcctctcttggtcaaggcccagagagtcaattctactacagaagcaaatattcatttgaaagatggctcgtcagtaaacacagcgaaagcccagcctgcacaggaggttgcagctgttgattttgaatccaacaacattcgtcagcttgatgattttttggaagattgtgccagtgagctctgggctgtgactcatgctaagatcttggggtctgaaaccttagccaccgttgaggacagcaaggatagcccagatctggagatcatgatgcgccgaatggaagagatggaaaaataccaggagtctgttcgtcaaagatataataaaatcgcatatgctgatcctcgactttggatgcaggaagaaaacaatgaccaaaaaatctcagcaataagtgaaaagcctctatctcctcatccaatcagaatcacgaagacagtggatcgcaaggatccagccgtgaacatcatgttagaaaggccctgtaatggcaattccctggatgaaagtgtgggaacagaggaaggatcagagaaaagagaggcccctcttctctccctagccgaagattctcaacagaaagaaggccgagctcccctctttgtcccaccgggtatgcagcacagcatcggtgactactgtagtcgttttgagcagtaccttcggatcatatctcatgaggctgtaggctccttcaacccgtggctgatagctgaaagcttttcagaagagctggtagatgaagctctgggtgctgtggctgctgaacttcaggatatgtgcgaagattatgcagaagctgtgttcacctcagaattcttagaggctgctacataaaggctctctgaggcgaggccatttgtgtcacactggagaagggatggcaccaccctttgttttggcccacaggaaattttcatcctcagctgtccatccaggcccagaaggtgctgcccactgaaaggaaggcagtgccggggaggtcatcctcactttgcattttcttttgtcatggcaatggttctggaaatgtatgatgcaatgtatcacacttatcagtgcccaggcaacacaacttgattatggcaatattttcagaatgtgtacttttcctattgaaataccatgttcattcctctggctcagtttggtgatgaaaatgttttgaaagataatcgatacgtatatttcacacaaggattcaggttgctgttgaacccttgctggcattgataccaacacaagtgcggctactagctggtcccatcacggggcccctgttttgcatctttggcgatttcctgtcaggacctctggccctactaggctgtagactcagggagagcacagtctggctgtgctgccaaacctct

SEQ ID NO: 4375 - DNA, 3700 bp, Homo sapiens
  source 1..3700: mol_type = genomic DNA
cagccgcgtcccccagccccggcctcccgcggacccatgcccgcccgtatcggctactacgagatcgaccgcaccatcggcaagggcaacttcgcggtggtcaagcgggccacgcacctcgtcaccaaggccaaggttgctatcaagatcatagataagacccagctggatgaagaaaacttgaagaagattttccgggaagttcaaattatgaagatgctttgccacccccatatcatcaggctctaccaggttatggagacagaacggatgatttatctggtgacagaatatgctagtggaggggaaatatttgaccacctggtggcccatggtagaatggcagaaaaggaggcacgtcggaagttcaaacagatcgtcacagctgtctatttttgtcactgtcggaacattgttcatcgtgatttaaaagctgaaaatttacttctggatgccaatctgaatatcaaaatagcagattttggtttcagtaacctcttcactcctgggcagctgctgaagacctggtgtggcagccctccctatgctgcacctgaactctttgaaggaaaagaatatgatgggcccaaagtggacatctggagccttggagttgtcctctacgtgcttgtgtgcggtgccctgccatttgatggaagcacactgcagaatctgcgggcccgcgtgctgagtggaaagttccgcatcccattttttatgtccacagaatgtgagcatttgatccgccatatgttggtgttagatcccaataagcgcctctccatggagcagatctgcaagcacaagtggatgaagctaggggacgccgatcccaactttgacaggttaatagctgaatgccaacaactaaaggaagaaagacaggtggaccccctgaatgaggatgtcctcttggccatggaggacatgggactggacaaagaacagacactgcaggcggagcaggcaggtactgctatgaacatcagcgttccccaggtgcagctgatcaacccagagaaccaaattgtggagccggatgggacactgaatttggacagtgatgagggtgaagagccttcccctgaagcattggtgcgctatttgtcaatgaggaggcacacagtgggtgtggctgacccacgcacggaagttatggaagatctgcagaagctcctacctggctttcctggagtcaacccccaggctccattcctgcaggtggcccctaatgtgaacttcatgcacaacctgttgcctatgcaaaacttgcaaccaaccgggcaacttgagtacaaggagcagtctctcctacagccgcccacgctacagctgttgaatggaatgggcccccttggccggagggcatcagatggaggagccaacatccaactgcatgcccagcagctgctgaagcgcccacggggaccctctccgcttgtcaccatgacaccagcagtgccagcagttacccctgtggacgaggagagctcagacggggagccagaccaggaagctgtgcagaggtacttggcaaataggtccaaaagacatacactggccatgaccaaccctacagctgagatcccaccggacctacaacggcagctaggacagcagcctttccgttcccgggtctggcctcctcacctggtacctgatcagcatcgctctacctacaaggactccaacactctgcacctccctacggagcgtttctcccctgtgcgccggttctcagatggggctgcgagcatccaggccttcaaagctcacctggaaaaaatgggcaacaacagcagcatcaaacagctgcagcaggagtgtgagcagctgcagaagatgtacggggggcagattgatgaaagaaccctggagaagacccagcagcagcatatgttataccagcaggagcagcaccatcaaattctccagcaacaaattcaagactctatctgtcctcctcagccatctccacctcttcaggctgcatgtgaaaatcagccagccctccttacccatcagctccagaggttaaggattcagccttcaagcccaccccccaaccaccccaacaaccatctcttcaggcagcccagtaatagtcctccccccatgagcagtgccatgatccagcctcacggggctgcatcttcttcccagtttcaaggcttaccttcccgcagtgcaatctttcagcagcaacctgagaactgttcctctcctcccaacgtggcactaacctgcttgggtatgcagcagcctgctcagtcacagcaggtcaccatccaagtccaagagcctgttgacatgctcagcaacatgccaggcacagctgcaggctccagtgggcgcggcatctccatcagccccagtgctggtcagatgcagatgcagcaccgtaccaacctgatggccaccctcagctatgggcaccgtcccttgtccaagcagctgagtgctgacagtgcagaggctcacagtgcacatcagcagccgccacactataccacgtcggcactacagcaggccctgctgtctcccacgccgccagactatacaagacaccagcaggtaccccacatccttcaaggactgctttctccccggcattcgctcaccggccactcggacatccggctgcccccaacagagtttgcacagctcattaaaaggcagcagcaacaacggcagcagcagcagcaacagcagcaacagcaagaataccaggaactgttcaggcacatgaaccaaggggatgcggggagtctggctcccagccttgggggacagagcatgacagagcgccaggctttatcttatcaaaatgctgactcttatcaccatcacaccagcccccagcatctgctacaaatcagggcacaagaatgtgtctcacaggcttcctcacccaccccgccccacgggtatgctcaccagccggcactgatgcattcagagagcatggaggaggactgctcgtgtgagggggccaaggatggcttccaagacagtaagagttcaagtacattgaccaaaggttgccatgacagccctctgctcttgagtaccggtggacctggggaccctgaatctttgctaggaactgtgagtcatgcccaagaattggggatacatccctatggtcatcagccaactgctgcattcagtaaaaataaggtgcccagcagagagcctgtcatagggaactgcatggatagaagttctccaggacaagcagtggagctgccggatcacaatgggctcgggtacccagcacgcccctccgtccatgagcaccacaggccccgggccctccagagacaccacacgatccagaacagcgacgatgcttatgtacagctggataacttgccaggaatgagtctcgtggctgggaaagcacttagctctgcccggatgtcggatgcagttctcagtcagtcttcgctcatgggcagccagcagtttcaggatggggaaaatgaggaatgtggggcaagcctgggaggtcatgagcacccagacctgagtgatggcagccagcatttaaactcctcttgctatccatctacgtgtattacagacattctgctcagctacaagcaccccgaagtctccttcagcatggagcaggcaggcgtgtaacaagaaacagagagttttgtgtacagcttgggaatgaaaaggttgattgtaa

SEQ ID NO: 4376 - DNA, 3495 bp, Homo sapiens
  source 1..3495: mol_type = genomic DNA
ctccccgaactgcggcggcggcgagcgccggccgcatctgagcagagctgcagcggcggccgcgggcaccagagtgccgagcccaggacgcccccggcccaggcccttgggttaatacctctgccaaccgaggccaccctccctcggacccccattcggaggaagcagacccaagttcgaattctgacattgccactgagcagccgtacaacttttgggtggacaagtccttcacttctcgccggagtgtgtggaggagcgatgggcagaaccagcacttccctcaggcactagacctgtcacgagtgaacttagttccctcctatactccttcactctaccctaagaacacagatctatttgagatgattgagaagatgcagggaagcaggatggatgaacaacgctgctccttcccgccgcccctcaaaacagaggaggactacattccatacccgagcgtgcacgaggtcttggggcgagaaggacccttccccctcatcctgctgccccagtttgggggctactggattgagggcaccaaccacgaaatcaccagcatccccgagacagagccactgcagtcgcccacaaccaaggtgaagctcgagtgcaaccccacagcccgcatctaccggaagcactttctcggcaaggagcatttcaattactactcactggacgctgccctcggccaccttgtcttctcactcaagtacgatgtcatcggggaccaagagcacctgcggctgctgctcaggaccaagtgccggacataccatgatgtcatccccatctcctgcctcaccgagttccctaatgttgtccagatggcaaagttggtgtgtgaagacgtcaatgtggatcggttctatcctgtgctctaccccaaggcttcccggctcatcgtcacctttgacgagcatgtcatcagcaataacttcaagtttggcgtcatttatcagaagcttgggcagacctccgaggaagaactcttcagcaccaatgaggaaagtcccgctttcgtggagttccttgaatttcttggccagaaggtcaaactgcaggactttaaggggttccgaggaggcctggacgtgacccacgggcagacggggaccgaatctgtgtactgcaacttccgcaacaaggagatcatgtttcacgtgtccaccaagctgccatacacggaaggggacgcccagcagttgcagcggaagcggcacatcgggaacgacatcgtggctgtggtcttccaggatgagaacactcctttcgtgcccgacatgatcgcgtccaacttcctgcatgcctacgtcgtggtgcaggctgagggcgggggccctgatggccccctctacaaggtctctgtcactgcaagagatgatgtgcccttctttggaccccccctcccggaccccgctgtgttcaggaaggggcctgagttccaggaatttttgctgacaaagctgatcaatgctgaatatgcctgctacaaggcagagaagtttgccaaactggaggagcggacgcgggccgccctcctggagacgctctatgaggaactacacatccacagccagtccatgatgggcttgggcggcgacgaggacaagatggagaatggcagtgggggcggcggcttctttgagtctttcaagcgggtcatccggagccgcagccagtccatggatgccatggggctgagcaacaagaagcccaacaccgtgtccaccagccacagcgggagcttcgcgcccaacaaccccgacctggccaaggcggctggaatatcattgcttattcctgggaaaagtgcgagtagattcggacgccggggcagtgccataggcataggaaccgtggaagagtcactgattgtccctgggaagagccccacgaggaagaagtcgggcccgttcggctcccgccgcagcagcgccattggcatcgagaacatacaggaggtgcaggagaagagggagagccctccggctggtcagaagaccccagacagcgggcacgtctcacaggagcccaagtcggagaactcatccactcagagctccccagagatgcccacgaccaagaacagagcggagaccgcagcgcagagagcagaggcgctcaaggacttctcccgctcctcgtccagtgccagcagcttcgccagcgtggtggaggagacggagggtgtggacggagaggacacaggcctggagagcgtgtcatcctcaggaacaccccacaagcgggactccttcatctatagcacgtggctggaggacagtgtcagcaccactagtgggggcagctccccagacgccggcaagttgggggaccctgcgtgtcccgagatcaagatccagctggaagcatctgagcagcacatgccccagctgggctgttagccgggccaccccctctgaaggtgaaactgagcagatgaggccacagaagcacaaggggaaggtgccgtgtcaagcccaggcagacgagacctctgccctgaagaccaacaccagcccgtgggctgccccctgcctccccaccctccccatggcccacccatctgggctgtctctgcagggcagagccgtccagacctgggatcagggaagctgctggcatcgtccccacccccagcctgggggtctgggctggggcagggattgctcagtggaagcaggactgggggtctggcttgccccctccctgggcctccatcacccctgagcatccctctggactcagagggaacaaggtgggagagagagtttgagacagctccgtgtggagagcttagcccctggaggcagcacaaggaggatgtgatatgtgggggagtgagcactgggttgggagccgggtcctggtttccaatttgggttctgctgtgtgactctgggcaagtcactctccctctctgggcatgtctgctacaaatggacaagattatttcagaggtcactgaagactgtgattacatgcacctgccttagaaggtaggattttcttcccagggacctcctatcaccctaccctgcttcttgaggtccctggagccccaggtgggctgaggggcagggagccggctgtgcccagtatgcctcctggaccctccagttctgccacaggtctgccgatgccctgtccactgcctacacatgacagacaagtaaccccctcatgggggatggggacctacctggctcctcagccagcacccagcttaacccctgccatcccatgctgggccctccaggccaagagtctcagctggccgagagtccaggccttgcctcccccgaccgccatggagggggcagcccggcacagctgctgggagcccttgtgtgtctggtcacactttttaggcgtcacgccaaaggccagcctcctggccccaatacccattttggaagcccctgtggccgtgtggatgtcggtaacagttgtataaaataaattctatttatcgctattgtacccaga

SEQ ID NO: 4377 - DNA, 2381 bp, Homo sapiens
  source 1..2381: mol_type = genomic DNA
aaagtctgtatactttttggttgggcagatctccaccggccctcaatctgattggccctcgagctgtggatgtgctgtctgagttgtcctatgcccctatgactccagaccacttcccaagcctcttttgcaagtggcaaccacagctgagtgaaacaaactgtaaccgaatgaaagcaatgacaacggaatcctccccaggaagctgctgattagagagggccaaacggacagacatcttggccacctgtaacgagcaacttccaggagatgagtgtgggctatgcaaatgggatccgggtgatgagcatgacgcacacaggagagccaggattcatgctctacatccccatagagtacgccctgcatgtatacaatgaagtgatgagtgttggccagaaatacggaatccggaatgctgggtattacgctcttcgcagtctccgaattgagaagttttttgccttctggggtcaggatataaataacctcaccacgcccctggaatgtggacgagagtctcgggtgaaattagagaagggcatggatttcattggtcgcgacgccctcctgcagcagaagcagaatggagtgtataaacgcctcaccatgttcatcctggacgaccatgattcagacctagacctttggccttggtggggagagcccatttaccggaatgggcagtatgttggcaagaccaccagcagtgcctacagctacagcctggagcgccacgtttgcctgggctttgtgcacaatttttctgaggacacgggggaagagcaagtggtgacagcagatttcatcaaccggggagagtatgagattgacatcgcgggataccgcttccaggccaaggccaagctctaccctgtcgcctccctcttcacccagaagcgccgaaaggatgacatggagctgagtgacttacatgggaagtgatgccaccagggcagcctcacctcctccccatcatcttgtcctagagtgggcgtcaccttggagcttctcttccttccgcctctgttcctcttctggagcctttgcctcccatctcttatctccttgatataattttgaacttgacctactttaaacttttttgctctgcagccttccttgcccttccacctcctcctcctaatattcactctgggctcttcttcccttcccacccctcactcagcttctcgtggtggcaggaggtatgtctgacaggacagaagcaagctccactgtggacatgagtgatggtgacagctgctttcaaattctgcatctcaaggcagggcaagccggggtggtgcaggtctcagggcacgagtccctctcccttgggttccattttcttggagcagcctattagttctggtggggttgccgtgtgtcggatgcagccctgaggggcagctcgtgcctgcagcccggcagctcgttctcctgttctgctgtgctgtgggctggcactcgatacctctggcaagaggatgattatctacctcactgataagaggcatcgcatggacgttctctggtctgtagtggagacaagcagttaacctagcaccatcctcatcctccctgcagaagccattagcagacctttgggccagggcagcctccctataattttcttcatctcttgctaatctctataataaggttgctttttctttcttagttgagtaaacaagtaagccacagtgtttgaaagggaaaaaccatattgccttgtgtgttgcttttcccagtcaaaagggtctgaccttagaaagtccccaccagtgatgctgagtgttctgctatggaaacaatgctgcttttctctcagctgtccaaagttcagccgttcctccttccccttctcccagtgcgtttgactttgtcaggtcagcctcacttgtccctttcacagttggcccataaagtcatgtttctctccctttagaatagggaggggaagggatcaggtgtgttgtcctgggcctttcaaccttgcgggctgtgctgagttccagagagctgccggaattccaggtttgactctccagcacagagcagagctacacagaggtgacccacgttagtccactgagagttctgagtccaaagggtgtacgttgcataaggctagagaccgcttttcctcctttccccccaggctctttgtttccctccacccacccttccatatcctctggagcaggagacaatgtgggtgcccagaagtgccctgcgctttcaggcagtgtctctgttttcccaaggtgaaacttagatatcatggactgttgtccagcctcaatgcttcattttccccttgcatatcaactgccctaatctgactttttttaagtgcaaataaactgctataagac

SEQ ID NO: 4378 - DNA, 1862 bp, Homo sapiens
  source 1..1862: mol_type = genomic DNA
acttctcttcttccgcgaccgggagaaggccgagggatcggcggcacgatcgacattgtacaccttgaaggtggacggatgtgaagccgcgcgttgtagggctgaagcttaccaaagaaaggaagaatgcacttttcaggattagaagaggctgtgtatagaaacatacaagcttgcaaggagcttgcccaaaccactcgtacagcatatggaccaaatggaatgaacaaaatggttatcaaccacttggagaagttgtttgtgacaaacgatgcagcaactattttaagagaactagaagtacagcatcctgctgcaaaaatgattgtaatggcttctcatatgcaagagcaagaagttggagatggcacaaactttgttctggtatttgctggagctctcctggaattagctgaagaacttctgaggattggcctgtcagtttcagaggtcatagaaggttatgaaatagcctgcagaaaagctcatgagattcttcctaatttggtatgttgttctgcaaaaaaccttcgagatattgatgaagtctcatctctacttcgtacctccataatgagtaaacaatatggtaatgaagtatttctggccaagcttattgctcaggcatgcgtatctatttttcctgattccggccatttcaatgttgataacatcagagtttgtaaaattctgggctctggtatcagttcctcttcagtattgcatggcatggtttttaagaaggaaaccgaaggtgatgtaacatctgtcaaagatgcaaaaatagcagtgtactcttgtccttttgatggcatgataacagaaactaagggaacagtgttgataaagactgctgaagaattgatgaattttagtaagggagaagaaaacctcatggatgcacaagtcaaagctattgctgatactggtgcaaatgtcgtagtaacaggtggcaaagtggcagacatggctcttcattatgcaaataaatataatatcatgttagtgaggctaaactcaaaatgggatctccgaagactttgtaaaactgttggtgctacagctcttcctagattgacacctcctgtccttgaagaaatgggacactgtgacagtgtttacctctcagaagttggagatactcaggtggtggtttttaagcatgaaaaggaagatggcgccatttctaccatagtacttcgaggctctacagacaatctgatggatgacatagaaagggcagtagacgatggtgttaatactttcaaagttcttacaagggataaacgtcttgtacccggaggtggagcaacagaaattgaattagccaaacagatcacatcatatggagagacatgtcctggacttgaacagtatgctattaagaagtttgctgaggcatttgaagctattccccgcgcactggcagaaaactctggagttaaggccaatgaagtaatctctaaactttatgcagtacatcaagaaggaaataaaaacgttggattagatattgaggctgaagtccctgctgtaaaggacatgctggaagctggtattctagatacttacctgggaaaatattgggctatcaaactcgctactaatgctgcagtcactgtacttagagtggatcagatcatcatggcaaaaccagctggtgggcccaagcctccaagtgggaagaaagactgggatgatgaccaaaatgattgaaattggcttaatttttactgtaggtgaaggctgtatttgtagtagtactcaagaatcacctgatgttttcttattctccttaaattaagagttattttgtgtttgtattcttggctggatgttataataaacatattgttactgtc

SEQ ID NO: 4379 - DNA, 3110 bp, Homo sapiens
  source 1..3110: mol_type = genomic DNA
acgtcgttgggacatcgctgggaccccgggctctgcagccacaaccatgtttggccggaagcgcagtgtctcctttgggggcttcggatggatcgacaagaccatgctggcaagtctgaaggtcaagaagcaggagctggccaacagctcggatgcgaccctcccagaccggccgctctcccctcctctcacggcacctcccaccatgaagtcgtcggagttctttgagatgctggagaaaatgcaggggatcaagcttgaagagcagaagccgggaccccagaagaacaaggacgactatatcccataccccagcatcgacgaggttgtggagaagggaggcccgtaccctcaggtcatcctgccacagtttgggggctattggatcgaggacccggagaacgtgggcaccccaacatcgctggggagcagcatctgtgaggaggaggaagaggacaacctcagccccaacacatttggctacaagctcgagtgcaagggtgaagccagggcctaccggaggcacttcctggggaaggatcatctaaacttttactgtaccggcagcagcctggggaacttgatcctgtccgtcaagtgcgaggaagcagaggggatcgagtacctccgggtcatccttaggtccaaactgaagacggtacatgagcggatccccttggctggactgagcaagcttcccagtgtccctcagattgcaaaggctttctgtgatgatgcagtgggactgagattcaatcctgtcctgtaccccaaggcctcccaaatgattgtgtcctatgatgagcatgaagtcaacaacacattcaaattcggagtcatttatcaaaaagccaggcagaccctggaggaggagctatttgggaacaatgaggagagcccagcttttaaggagttcttggacctgctgggggacacgatcacactgcaggatttcaaaggtttccgaggaggcctggacgtgacccacggacagacaggggtggaatcagtgtacacaacattccgggacagggagatcatgtttcacgtttccacaaagctgccatttaccgacggagacgcccagcagctccagagaaagagacacattggaaatgacatcgtggccatcatcttccaagaggaaaacacgccgtttgtcccagacatgatagcctccaatttcttacatgcctacatcgtcgtgcaggtcgagaccccaggcacagagaccccatcctacaaggtctctgtcactgcgcgggaagatgtgcccacctttggtccacctctgcccagtccccccgttttccagaagggcccggaattcagggagtttctgctcaccaagctcaccaatgccgagaacgcctgctgcaagtcggacaagtttgcaaagctggaggaccggaccagggctgccctcctggacaaccttcacgatgagctccacgcccacacacaggccatgctgggactgggcccagaggaggacaagtttgagaatggaggccacggggggttcctggagtcttttaagagggccatccgcgtacgcagccactccatggagaccatggtgggcggccagaagaagtcgcacagtgggggcatccctggcagcctcagcgggggcatctcccacaacagcatggaggtcaccaagaccaccttctcgcctccagtggtggcggcaacggtgaagaaccagtcacggagtcccatcaagcgacgctcggggctcttcccccgcctgcacacgggctcagaaggccagggcgacagccgggcacgatgtgacagcacatccagcacacccaagaccccagatggtggacactcctctcaggagataaagtctgagacctcatccaatcccagctctccggaaatctgccccaacaaggagaagcccttcatgaagttgaaggaaaacggccgtgccatctcccgctcctcctccagcaccagcagcgtcagcagcactgcaggggagggcgaggccatggaggagggcgacagtgggggcagccagccgtccacgacctcacccttcaagcaggaggtgtttgtctacagcccgtccccgagcagcgagagccccagcctgggggcagctgccaccccgatcatcatgagccggagtcccacagatgccaaaagcagaaactccccgagatcgaacctgaaattccgctttgacaagctcagccatgccagctctggtgcgggtcactaatgtgaaagtggagtccttcgcctgtccaagggaatcccctcttctgtcctggaaaaggctcctgtaccagcagtttgggagtgccgtccacgaccctgacagtcccagccctgctgccccatggccacgtgcccacagatgtgctgttggtccaggtgtcccagtctggccacagccctgcctccgccctcacctacatgccctcccagcccctcccatctctggacgaggcctccttcctcaggttcctcctgctcctgacctcccagtgtgatgtccgggtcctttatcatcctattcatcctggagaggaaaagtgtcgggcaaagggggatctggggggagctcagcagtgactggggagctggtctgcctcagagacagagtagggggtgggagcagagcctcggtgagggtcttggccacagggcagtgccttcctgaacgtggcaggctttactaccaggaacgcactcggtggtggaggccccatgttcccaggagccaagattcgtagcatccttgaggccatcctgataaaattcggcgctattgcccccgtagctctggagctctaaaccgtctatctgcttctgtgctgaacgcctttcccatctgctgacgtaggcccagggctgccctgcccctgctgccagtgtaccgtgagcggggctccagccagttcaagctcagagccagagctggacgggccagaactgcgctgcacacttcctggactgaggcggggactttgggtcccacccggtttctcctgattatggctgctgtggggtgaggggagggaggggcagccccgaggcagtctcttccctttgagaagatattttcccccttccgagtctgcagcgcc

SEQ ID NO: 4380 - DNA, 2288 bp, Homo sapiens
  source 1..2288: mol_type = genomic DNA
agttggcgacatggtggcacccgtgctggagacttctcacgtgttttgctgcccaaaccgggtgcggggagtcctgaactggagctctgggcccagaggacttctggcctttggcacgtcctgctccgtggtgctctatgaccccctgaaaagggttgttgttaccaacttgaatggtcacaccgcccgagtcaattgcatacagtggatttgtaaacaggatggctccccttctactgaattagtttctggaggatctgataatcaagtgattcactgggaaatagaggataatcagcttttaaaagcagtgcatcttcaaggccatgaaggacctgtttatgcggtgcatgctgtttaccagaggaggacatcagatcctgcattatgtacactgatcgtttctgcagctgcagattctgctgttcgactctggtctaaaaagggtccagaagtaccaatattagcatgtggcaatgatgattgcagaattcacatatttgctcaacaaaatgatcagtttcagaaagtgctttctctctgtggacatgaggattggattagaggagtggaatgggcagcctttggtagagatcttttcctagcaagctgttcacaagattgcctgataagaatatggaagctgtatataaagtcaacatctttagaaactcaggatgacgataacataagactgaaagaaaatacttttaccatagaaaatgaaagtgttaaaatagcatttgctgttactctggagacagtgctagccggtcatgaaaactgggtaaatgcagttcactggcaacctgtgttttacaaagatggtgtcctacagcagccagtgagattattatctgcttccatggataaaaccatgattctctgggctccagatgaagagtcaggagtttggctagaacagagagagtggactccagagattgtcatttcaggacactttgatggtgtccaagacctagtctgggatccagaaggagaatttattatcactgttggtactgatcagacaactagactttttgctccatggaagagaaaagaccaatcacaggtgacttggcatgaaattgcaaggcctcagatacatgggtatgacctgaaatgtttggcaatgattaatcggtttcagtttgtatctggagcagatgaaaaagttcttcgggttttttctgcacctcggaattttgtggaaaatttttgtgccattacaggacaatcactgaatcatgtgctctgtaatcaagatagtgatcttccagaaggagccactgtccctgcattgggattatcaaataaagctgtctttcagggagatatagcttctcagccttctgatgaagaggagctgttaactagtactggttttgagtatcagcaggtggcctttcagccctccatacttactgagcctcccactgaggatcatcttctgcagaatactttgtggcctgaagttcaaaaactatatgggcacggttatgaaatattttgtgttacttgtaacagttcaaagactctgcttgcctcagcttgtaaggcagctaagaaagagcatgcagctatcattctttggaacactacatcttggaaacaggtgcagaatttagttttccacagtttgacagtcacgcagatggccttctcacctaatgagaagttcttactagctgtttccagagatcgaacctggtcattgtggaaaaagcaggatacaatctcacctgagttcgagccagtttttagtctttttgccttcaccaacaaaattacttctgtgcacagtagaattatttggtcttgtgattggagtcctgacagcaagtatttcttcactgggagtcgagacaaaaaggtggttgtctggggtgagtgcgactccactgatgactgtattgagcacaacattggcccctgctcctcagtcctggacgtgggtggggctgtgacagctgtcagcgtctgcccagtgctccacccttctcaacgatacgtggttgcagtaggattggagtgtggaaagatttgcttatatacctggaaaaagactgatcaagttccagaaataaatgactggacccactgtgtagaaacaagtcaaagccaaagtcatacactggctatcagaaaattatgctggaagaattgcagtggaaaaactgaacagaaggaagcagaaggtgctgagtggttacactttgcaagctgtggtgaagatcacactgtgaagatacacagagtcaataaatgtgcactgtaatggactt

SEQ ID NO: 4381 - DNA, 1504 bp, Homo sapiens
  source 1..1504: mol_type = genomic DNA
acattcccacaggaaacaagtcgaccttctgtagcaaagcagcttcttgccgggactccgcaaagctgaaagaggtagacaaagccaacctcacagtaaaagcagagtgcagcagacaacagtttcatccagattaaaaatgaaccggcagcctgtgaaagaccgcaaggcaccatggatacccccaaaccccacatccccaccagcgtctcctaaatgtgctgcatggctaaaggtgaaaactagccccagagatgccacaaaagagcctctccagcaagaagatcctcaagaggaaagtcacctgacaggtgctgttgagcatgaagcagccaggctcgcttggcttgatgctgaaacttccaaaagattgaaggaactagaagagttaaaagccaaggaaattgacagcatgcaaaaacagaggcttgattggcttgatgctgaaacttctagaagaacaaaggaactgaatgagctcaaagctgaagaaatgtatagactccaacaattgagtgtttctgccacccacttagcagacaaggtagaggaggcagttctggatcgtttgaagcctctcttggtcaaggcccagagagtcaattctactacagaagcaaatattcatttgaaagatggctcgtcagtaaacacagcgaaagcccagcctgcacaggaggttgcagctgttgattttgaatccaacaacattcgtcagcttgatgattttttggaagattgtgccagtgagctctgggctgtgactcatgctaagatcttggggtctgaaaccttagccaccgttgaggacagcaaggatagcccagatctggagatcatgatgcgccgaatggaagagatggaaaaataccaggagtctgttcgtcaaagatataataaaatcgcatatgctgatcctcgactttggatgcaggaagaaaacaatgaccaaaaaatctcagcaataagtgaaaagcctctatctcctcatccaatcagaatcacgaagacagtggatcgcaaggatccagccgtgaacatcatgttagaaaggccctgtaatggcaattccctggatgaaagtgtgggaacagaggaaggatcagagaaaagagaggcccctcttctctccctagccgaagattctcaacagaaagaaggccgagctcccctctttgtcccaccgggtatgcagcacagcatcggtgactactgtagtcgttttgagcagtaccttcggatcatatctcatgaggctgtaggctccttcaacccgtggctgatagctgaaagcttttcagaagagctggtagatgaagctctgggtgctgtggctgctgaacttcaggatatgtgcgaagattatgcagaagctgtgttcacctcagaattcttagaggctgctacataaaggctctctgaggcgaggccatttgtgtcacactggagaagggatggcaccaccctttgttttggcccacaggaaattttcatcctcagctgt

SEQ ID NO: 4382 - DNA, 1165 bp, Homo sapiens
  source 1..1165: mol_type = genomic DNA
agccaagggaaccacatggaagttgtgacagctcccagcggcgcgcccctttcgtgtgtgccggtacctcggcttaggagttgcccgctgacaccttgaatgaaggaggtccccttgccagccagcctgccgggatgggccattgctgctgcaagccttataactgccttcagtgcctggacaagacgccttccatacagcaaagtgcgagaaactacaaaaggagaaggaggagctggagaggcggttcgaggacgaggtgaagaggctgggctggcagcagcaggccgagctccaggagctggaggagcggctgcagctgcaattcgaggcggaaatggcgcgcctgcaggaggagcacggtgaccagctgctgagcatccggtgtcaacaccaggagcaggtggaagatctcaccgccagccatgatgctgctctcctagagatggaaaataaccacacagttgccatcacaatcctgcaggatgaccacgaccacaaagtccaagaattgatgtccactcatgagcttgaaaagaaagaattggaagaaaattttgaaaaactgcggctgtcattgcaggaccaggtggacacgctgaccttccagagccagtctctgcgggacagagcccgccgcttcgaagaggccttgaggaagaacacagaggagcagctggagattgcattggctccttatcagcacttggaagaagacatgaagagtctgaagcaggtattagaaatgaagaatcagcaaatacacgagcaagaaaagaagattcttgagctggaaaagctggcagaaaagaacattatcctagaagaaaagatccaggttctccaacagcagaacgaagacctcaaagcaaggattgaccaaaacacagttgtcaccagacagctgtcggaggaaaatgctaacctccaggaatatgttgagaaggaaacccaggagaagaagagattgagccgaaccaatgaagagctgctttggaagctccaaactggggacccgaccagtccgattaaactctcgcccacatctcccgtttaccgcggctcctcctcggggccctcctctccggccagagtcagcacaacacccagatgacgccactacacggcctgcgggagctccggcttctcgtcctccggtctccac

SEQ ID NO: 4383 - DNA, 1481 bp, Homo sapiens
  source 1..1481: mol_type = genomic DNA
agctctgggtgctccagctgggccacagcctggtcctgccgctgcgcccgcccgccatggtgtcccgggaccaggctcacctgggccccaagtatgtgggcctctgggacttcaagtcccggacggacgaggagctgagcttccgcgcgggggacgtcttccacgtggccaggaaggaggagcagtggtggtgggccacgctgctggacgaggcgggtggggccgtggcccagggctatgtgccccacaactacctggccgagagggagacggtggagtcggaacctgcgggacacgcaggctgtgcggcactacaagatctggcggcgtgccgggggccggctgcacctgaacgaggcggtgtccttcctcagcctgcccgagcttgtgaactaccacagggcccagagcctgtcccacggcctgcggctggccgcgccctgccggaagcacgagcctgagcccctgccccattgggatgactgggagaggccgagggaggagttcacgctctgcaggaagctggggtccggctactttggggaggtcttcgaggggctctggaaagaccgggtccaggtggccattaaggtgatttctcgagacaacctcctgcaccagcagatgctgcagtcggagatccaggccatgaagaagctgcggcacaaacacatcctggcgctgtacgccgtggtgtccgtgggggaccccgtgtacatcatcacggagctcatggccaagggcagcctgctggagctgctccgcgactctgatgagaaagtcctgcccgtttcggagctgctggacatcgcctggcaggtggctgagggcatgtgttacctggagtcgcagaattacatccaccgggacctggccgccaggaacatcctcgtcggggaaaacaccctctgcaaagttggggacttcgggttagccaggcttatcaaggaggacgtctacctctcccatgaccacaatatcccctacaagtggacggcccctgaagcgctctcccgaggccattactccaccaaatccgacgtctggtcctttgggattctcctgcatgagatgttcagcaggggtcaggtgccctacccaggcatgtccaaccatgaggccttcctgagggtggacgccggctaccgcatgccctgccctctggagtgcccgcccagcgtgcacaagctgatgctgacatgctggtgcagggaccccgagcagagaccctgcttcaaggccctgcgggagaggctctccagcttcaccagctacgagaacccgacctgagctgctgtggagcgggcatggccgggccctgctgaggaggggcctgggcagagggcctggacctgggatcaaggcccacgcgcttccctggggtttactgaggtgatgggtgcaggaaaggttcacaaatgtggagtgtctgcgtccaatacacgcgtgtgctcctctccttactccatcgtgtgtgcctt

SEQ ID NO: 4384 - DNA, 5541 bp, Homo sapiens
  source 1..5541: mol_type = genomic DNA
gctgctgctgcagtgggacaggtggcggcgaccggcggcgtccgaggagatttaatccagagactgacttcactatagaacccacagttgtatcaatggttggggaaagatagtggcaacaggcaaaggagaaacagctctgacatacaaagaaaatgagtatgctaaagccaagtgggcttaaggcccccaccaagatcctgaagcctggaagcacagctctgaagacacctacggctgttgtagctccagtagaaaaaaccatatccagtgaaaaagcatcaagcactccatcatctgagactcaggaggaatttgtggatgactttcgagttggggagcgagtttgggtgaatggaaataagcctggatttatccagtttcttggagaaacccagtttgcaccaggccagtgggctggaattgttttagatgaacccataggcaagaacgatggttcggtggcaggagttcggtatttccagtgtgaacctttaaagggcatatttacccgaccttcaaagttaacaaggaaggtgcaagcagaagatgaagctaatggcctgcagacaacgcccgcctcccgagctacttcaccgctgtgcacttctacggccagcatggtgtcttcctccccctccaccccttcaaacatccctcagaaaccatcacagccagcagcaaaggaaccttcagctacgcctccgatcagcaaccttacaaaaactgccagtgaatctatctccaacctttcagaggctggctcaatcaagaaaggagaaagagagctcaaaatcggagacagagtattggttggtggcactaaggctggtgtagtccggtttcttggggagaccgactttgccaagggggagtggtgtggcgtggagttagatgagccacttgggaagaatgatggcgctgttgctggaacaaggtattttcagtgtcaacccaaatatggcttgttcgctcctgtccacaaagttaccaagattggcttcccttccactacaccagccaaagccaaggccaacgcagtgaggcgagtgatggcgaccacgtccgccagcctgaagcgcagcccttctgcctcttccctcagctccatgagctcagtggcctcctctgtgagcagcaggcccagtcggacaggactattgactgaaacctcctcccgttacgccaggaagatctccggtaccactgccctccaggaggccctgaaggagaagcagcagcacattgagcagctgctggcggaacgggatctggagagggcggaggtggccaaggccacgagccacgtgggggagatagagcaggagctagctctggcccgggacggacatgaccagcatgtcctggaattggaagccaaaatggaccagctgcgaacaatggtggaagctgctgacagggagaaggtggagcttctcaaccagcttgaagaggagaaaaggaaggttgaggaccttcagttccgggttgaagaagaatcaattaccaaaggtgatcttgagacgcagaccaaactggagcatgcccgcattaaggagcttgaacagagcctgctctttgaaaagaccaaagctgacaaactccagagggagttagaagacactagggtggctacagtttcagaaaagtcacgtataatggaactggagaaagacctagcattgagagtacaggaagtagctgagctccgaagaaggctagagtccaataagcctgctggggatgtggacatgtcactttcccttttgcaagagataagctctttgcaagaaaagttagaagtcacccgtactgaccaccagagagaaataacttctctgaaggagcattttggagcccgggaagaaactcatcagaaggagataaaggctctgtataccgccacggaaaagctttccaaagagaacgagtcattgaaaagcaagctggagcatgccaacaaagagaactcagatgtgatagctctatggaagtccaaactggagactgccatcgcatcccaccagcaggcgatggaagaactgaaggtatctttcagcaaagggcttggaacagagacggcagaatttgctgaactaaaaacacaaatagagaaaatgagactagattaccaacacgaaatagaaaatttgcagaatcaacaagactctgaacgggctgcccatgctaaagagatggaagccttgagggctaaactgatgaaagttattaaagaaaaggaaaacagtctggaagccatcaggtcgaaactggacaaagcagaagaccagcatctcgtagaaatggaagacacgttaaacaaattacaggaagctgaaataaagaaagaaaagtttgctgaagcttcagaggaggcagtctctgttcagagaagtatgcaagaaactgtaaataagttacaccaaaaggaggaacagtttaacatgctgtcttctgacttggagaagctgagagaaaacttagcagatatggaggcaaaatttagagagaaagatgagagagaagagcagctgataaaggcaaaggaaaaactggaaaatgacattgcagaaataatgaagatgtcaggagataactcttctcagctgacaaaaatgaacgatgaattacgtctgaaagaaagagatgtagaagaattacagctaaaacttacaaaggctaatgaaaatgcaagttttctgcaaaaaagtattgaggacatgactgtcaaagctgaacagagccagcaagaagcagctaaaaagcatgaggaagaaaagaaagaattggagaggaaattgtcggacctggaaaagaaaatggaaacaagccacaaccagtgtcaggagctgaaagccaggtatgagagagccacttctgagacaaaaaccaagcatgaagaaatcctacagaacctccagaagacgctgctggacacagaggacaagctgaagggcgcacgggaggagaacagtggcttgctgcaggagctggaggagctgagaaagcaagccgacaaagccaaagctgctcaaacagcggaagatgccatgcagataatggaacagatgaccaaagagaagactgagactctggcctccttggaggacaccaagcaaacaaatgcaaaactacagaatgaattggacacacttaaagaaaacaacttgaaaaatgtggaagagctgaacaaatcaaaagaactcctgactgtagagaatcaaaaaatggaagaatttaggaaagaaatagaaaccctaaagcaggcagcagctcagaagtcccagcagctttcagcgttgcaagaagagaacgttaaacttgctgaggagctggggagaagcagggacgaagtcacaagtcatcaaaagctggaagaagaaagatctgtgctcaataatcagttgttagaaatgaaaaaaagagaatccaagttcataaaagacgcagatgaagagaaagcttccttgcagaaatccatcagtataactagtgccttactcacagaaaaggatgccgagctggagaaactgagaaatgaggtcacagtgctcaggggagaaaacgcctctgccaagtccttgcattcagttgttcagactctagagtctgataaggtgaagctcgagctcaaggtaaagaacttggagcttcaactcaaagaaaacaagaggcagctcagcagctcctcaggtaatacagacactcaggcagacgaggatgaaagagcccaggagagtcagaatcagattgatttcctaaattcagtaatagtggaccttcaaaggaagaatcaagacctcaagatgaaggtggagatgatgtcagaagcagccctgaatgggaacggggatgacctaaacaattatgacagtgatgatcaggagaaacagtccaagaagaaacctcgcctcttctgtgacatttgtgactgctttgatctccacgacacagaggattgtcctacccaggcacagatgtcagaggaccctccccattccacacaccatggcagtcggggtgaggaacgcccatactgtgaaatctgtgagatgtttggacactgggccaccaactgcaatgacgacgaaaccttctgatgaagcctccagtggagaactgggcttgctcagacgcactcgcattgacacaacgtaacaccagcattgtgtgtgcagacttcaggagaactcatgttattttttaaccccgtcaacaaatctaggaaaatattttgatcttcaacaaattgccctttagtctccccgtatgagttagaataataaatatttagtaggtgagttttcacctcgaattttgttttcttgatttttacgtttgaagacattgcaccagatgccattacatttattggccccccgaccttgtagaaaaacccctaccctcacaataccttatttaagtaactttaaattatgccgttacttttcatatttgcactaagatatttccaggctgcatttgtatatttagattttttggttaagctttgacactggaatgagttgaaaaaatgtgccattttgcattttcatctactcatttaaagtattttattcttattcaaagaaatatctgagctctttgcactacctgttatcagtagtgcctttacttcaggcttgataatacttaggtgtgattataaaatcatgaagcaggtaaagggaggggcaagcccccaaactgctgtggggacattttataatctatatgctgcacccacttaatctactgtggtgttttgtttattagttttgcataatttcagcttctatatattgtatgtatatattttttaaaaatctatattttgggaaaaaaacatacacaatgtgtctttctttttggacatttacctttttgaaaaagaaaacacttaaaatgatcattaggacataacagactaggccagacatagcatcttgtggctttgcaaccattttcatttgtttgttttccttttatttcttcaccagatttaaataactggaggaattttctccaatttttttttccttctctggcaggtatccccagcagtcaattaacaataagccagtataaaacacctaaataaccaatctacaatctcccttcacaagtttttttactgtttttagatgaatgtacgatgagaaattcaacgttaataattctggattttcttatcacaaaaaagaaaatgaaggacctcaaagcacctgaacagtttatcgaccagtttgaatctatttatcttcatttgaatgtcttctagaatatgtaaaaagtcataaaatgtatcttccatgctacatgtacaataagaacttctataattgtatatatgcctttgatgtattttcccctcaagattatcaactgtgtgttcgacagtgaatattcaatctggtaccagttgaaatttttggttataaatgtaatacgaattgtttcacaaacagaaaacatgtaaagcagtattaaaatttggccaaacaagtgttctgtatctactttaataaatggttattcttt

SEQ ID NO: 4385 - DNA, 911 bp, Homo sapiens
  source 1..911: mol_type = genomic DNA
tagttattaaagttcctatgcagctccgcctcgcgtccggcctcatttcctcggaaaatccctgctttccccgctcgccacgccctcctcctacccggctttaaagctagtgaggcacagcctgcggggaacgtagctagctgcaagcagaggccggcatgaccaccgagcagcgacgcagcctgcaagccttccaggattatatccggaagaccctggaccctacctacatcctgagctacatggccccctggtttagggaggaagaggtgcagtatattcaggctgagaaaaacaacaagggcccaatggaggctgccacactttttctcaagttcctgttggagctccaggaggaaggctggttccgtggctttttggatgccctagaccatgcaggttattctggactttatgaagccattgaaagttgggatttcaaaaaaattgaaaagttggaggagtatagattacttttaaaacgtttacaaccagaatttaaaaccagaattatcccaaccgatatcatttctgatctgtctgaatgtttaattaatcaggaatgtgaagaaattctacagatttgctctactaaggggatgatggcaggtgcagagaaattggtggaatgccttctcagatcagacaaggaaaactggcccaaaactttgaaacttgctttggagaaagaaaggaacaagttcagtgaactgtggattgtagagaaaggtataaaagatgttgaaacagaagatcttgaggataagatggaaacttctgacatacagattttctaccaagaagatccagaatgccagaatcttagtgagaattcatgtccaccttcagaagtgtctgatacaaacttgtacagcccatttaaaccaatcaaaaaaaaaaaaaaaaaaaaa

SEQ ID NO: 4386 - DNA, 3576 bp, Homo sapiens
  source 1..3576: mol_type = genomic DNA
aagtgctcagcaacgattacgccccgagggccaatcacagggctgcggccgagaaagaagccttaatagagctttctcaacctgcagccctcatctccgccggcgagtagggccaggtgttgggagctcccacgtgggacaagatggtgtcttcggcgcagatgggcttcaacctgcaggctctcctggagcagctcagccaggatgagttgagcaagttcaagtatctgatcacgaccttctccctggcacacgagctccagaagatcccccacaaggaggtagacaaggctgatgggaagcaactggtagaaatcctcaccacccattgtgacagctactgggtggagatggcgagcctccaggtctttgaaaagatgcaccgaatggatctgtctgagagagcaaaggatgaagtcagagaagcagctttgaaatcctttaataaaaggaagcctctatcattagggataacacggaaagaacgaccacctctagacgtggacgaaatgctggagcgcttcaaaacagaagcacaagcgtttacagaaacgaaaggaaatgtcatctgcctgggtaaagaagtctttaaaggaaaaaagccagacaaagacaataggtgcaggtatatattgaagacgaagttccgggagatgtggaagagctggcctggagatagcaaagaggtccaggttatggctgagagatacaagatgctgatcccattcagcaaccccagggtgcttcccgggcccttctcatacacggtggtgctgtatggtcctgcaggccttgggaaaaccacgctggcccagaaactaatgctagactgggcagaggacaacctcatccacaaattcaaatatgcgttctacctcagctgcagggagctcagccgcctgggcccgtgcagttttgcagagctggtcttcagggactggcctgaattgcaggatgacattccacacatcctagcccaagcacggaaaatcttgttcgtgattgacggctttgatgagctgggagccgcacctggggcgctgatcgaggacatctgcggggactgggagaagaagaagccggtgcccgtcctcctggggagtttgctgaacagggtgatgttacccaaggccgccctgctggtcaccacgcggcccagggccctgagggacctccggatcctggcggaggagccgatctacataagggtggagggcttcctggaggaggacaggagggcctatttcctgagacactttggagacgaggaccaagccatgcgtgcctttgagctaatgaggagcaacgcggccctgttccagctgggctcggcccccgcggtgtgctggatcgtgtgcacgactctgaagctgcagatggagaagggggaggacccggtccccacctgcctcacccgcacggggctgttcctgcgtttcctctgcagccggttcccgcagggcgcacagctgcggggcgcgctgcggacgctgagcctcctggccgcgcagggcctgtgggcgcagacgtccgtgcttcaccgagaggatctggaaaggctcggggtgcaggagtccgacctccgtctgttcctggacggagacatcctccgccaggacagagtctccaaaggctgctactccttcatccacctcagcttccagcagtttctcactgccctgttctacaccctggagaaggaggaggaagaggatagggacggccacacctgggacattggggacgtacagaagctgctttccggagtagaaagactcaggaaccccgacctgatccaagcaggctactactcctttggcctcgctaacgagaagagagccaaggagttggaggccacttttggctgccggatgtcaccggacatcaaacaggaattgctgcgatgcgacataagttgtaagggtggacattcaacggtgacagacctgcaggagctcctcggctgtctgtacgagtctcaggaggaggagctggtgaaggaggtgatggctcagttcaaagaaatatccctgcacttaaatgcagtagacgttgtgccatcttcattctgcgtcaagcactgtcgaaacctgcagaaaatgtcactgcaggtaataaaggagaatctcccggagaatgtcactgcgtctgaatcagacgccgaggttgagagatcccaggatgatcagcacatgcttcctttctggacggacctttgttccatatttggatcaaataaggatctgatgggtctagcaatcaatgatagctttctcagtgcctccctagtaaggatcctgtgtgaacaaatagcctctgacacctgtcatctccagagagtggtgttcaaaaacatttccccagctgatgctcatcggaacctctgcctagctcttcgaggtcacaagactgtaacgtatctgacccttcaaggcaatgaccaggatgatatgtttcccgcattgtgtgaggtcttgagacatccagaatgtaacctgcgatatctcgggttggtgtcttgttccgctaccactcagcagtgggctgatctctccttggcccttgaagtcaaccagtccctgacgtgcgtaaacctctccgacaatgagcttctggatgagggtgctaagttgctgtacacaactttgagacaccccaagtgctttctgcagaggttgtcgttggaaaactgtcaccttacagaagccaattgcaaggaccttgctgctgtgttggttgtcagccgggagctgacacacctgtgcttggccaagaaccccattgggaatacaggggtgaagtttctgtgtgagggcttgaggtaccccgagtgtaaactgcagaccttggtgctttggaactgcgacataactagcgatggctgctgcgatctcacaaagcttctccaagaaaaatcaagcctgttgtgtttggatctggggctgaatcacataggagttaagggaatgaagttcctgtgtgaggctttgaggaaaccactgtgcaacttgagatgtctgtggttgtggggatgttccatccctccgttcagttgtgaagacctctgctctgccctcagctgcaaccagagcctcgtcactctggacctgggtcagaatcccttggggtctagtggagtgaagatgctgtttgaaaccttgacatgttccagtggcaccctccggacactcaggttgaaaatcgatgactttaatgatgaactcaataagctgctggaagaaatagaagaaaaaaacccacaactgattattgatactgagaaacatcatccctgggcagaaaggccttcttctcatgacttcatgatctgaatccccccgagtcattcattctccatgaagtcatcgattttccaggtgttggtgaactgcctgtgactcctctcctccccggcccctacccctcagggataatgagttcattgctgggctagatgttttagccatgattctgcctctgttttatacctgcacacatccttatctttgttacatatgaaatatctgtatcacgggtatattgagagaaataaaggtgagagcattcacaaatgaa

SEQ ID NO: 4387 - DNA, 643 bp, Homo sapiens
  source 1..643: mol_type = genomic DNA
agtatcgagaagtacacaggcaccactaataatcagacctgattctggaaaccctcttgacactgtgttaaaggttttggagattttaggtaagaagtttcctgttactgagaactcaaagggttacaagttgctgccaccttatcttagagttattcaaggggatggagtagatattaataccttacaagagattgtagaaggcatgaaacaaaaaatgtggagtattgaaaatattgccttcggttctggtggaggtttgctacagaagttaacaagagatctcttgaattgttccttcaagtgtagctatgttgtaactaatggccttgggattaacgtcttcaaggacccggttgctgatcccaacaaaaggtccaaaaagggccgattatctttacataggacgccagcagggaattttgttacactggaagaaggaaaaggagaccttgaggaatatggtcaggatcttctccatactgtcttcaagaatggcaaggtgacaaaaagctattcatttgatgaaataagaaaaaatgcacagctgaatattgaactggaagcagcacatcattaggctttatgactgggtgtgtgttgttgtatgtaatacataatgtttattgtacagatgtgtggg

SEQ ID NO: 4388 - DNA, 1735 bp, Homo sapiens
  source 1..1735: mol_type = genomic DNA
cccctttcataaaagcacagacctaacagcaccctgggtggaaacctcttcagcatttgcttggaatcagtaagctaaaaacaaaatcaaccgggaccccagcttttcagaactgcagggaaacagccatcatgagtgaggtcaccaagaattccctggagaaaatccttccacagctgaaatgccatttcacctggaacttattcaaggaagacagtgtctcaagggatctagaagatagagtgtgtaaccagattgaatttttaaacactgagttcaaagctacaatgtacaacttgttggcctacataaaacacctagatggtaacaacgaggcagccctggaatgcttacggcaagctgaagagttaatccagcaagaacatgctgaccaagcagaaatcagaagtctagtcacttggtgaaacaaacctgcaagaaattttcaaatccatacagtattgagtattctgaacttgactgtgaggaagggtggacacaactgaagtgtggaagaaatgaaagggcgaaggtgtgttttgagaaggctctggaagaaaagcccaacaacccagaattctcctctggactggcaattgcgatgtaccatctggataatcacccagagaaacagttctctactgatgttttgaagcaggccattgagctgagtcctgataaccaatacgtcaaggttctcttgggcctgaaactgcagaagatgaataaagaagctgaaggagagcagtttgttgaagaagccttggaaaagtctccttgccaaacagatgtcctccgcagtgcagccaaattttacagaagaaaaggtgacctagacaaagctattgaactgtttcaacgggtgttggaatccacaccaaacaatggctacctctatcaccagattgggtgctgctacaaggcaaaagtaagacaaatgcagaatacaggagaatctgaagctagtggaaataaagagatgattgaagcactaaagcaatatgctatggactattcgaataaagctcttgagaagggactgaatcctctgaatgcatactccgatctcgctgagttcctggagacggaatgttatcagacaccattcaataaggaagtccctgatgctgaaaagcaacaatcccatcagcgctactgcaaccttcagaaatataatgggaagtctgaagacactgctgtgcaacatggtttagagggtttgtccataagcaaaaaatcaactgacaaggaagagatcaaagaccaaccacagaatgtatctgaaaatctgcttccacaaaatgcaccaaattattggtatcttcaaggattaattcataagcagaatggagatctgctgcaagcagccaaatgttatgagaaggaactgggccgcctgctaagggatgccccttcaggcataggcagtattttcctgtcagcatctgagcttgaggatggtagtgaggaaatgggccagggcgcagtcagctccagtcccagagagctcctctctaactcagagcaactgaactgagacagaggaggaaaacagagcatcagaagcctgcagtggtggttgtgacgggtaggacgataggaagacagggggccccaacctgggattgctgagcagggaagctttgcatgttgctctaaggtacatttttaaagagttgttttttggccgggcgcagtggctcatgcctgtaatcccagcactttgggaggccga

SEQ ID NO: 4389 - DNA, 4344 bp, Homo sapiens
  source 1..4344: mol_type = genomic DNA
ggcggcggcggcggtgcctgggcggcagcagcagcagtagcggcagccctgaggacgatatggtgtaagatacttcttcaagattggacagctggggaccttcttctgattaaccttaaaccaacttgtagccatagagacacctcacaaggttcccatttttgttgttgttgttgttgattttctgctcacacctttcctgaccttgcaaccatgtatggaagtgcccgctctgttgggaaggtggagccgagcagccagagccctgggcgttcacccaggcttccacgttcccctcgcttgggtcaccgtcgaaccaacagtacgggagggagttcgggaagcagtgttggaggtggcagtgggaaaaccctttcaatggaaaatatacaatctttaaatgctgcctatgccacctctggccctatgtatctaagtgaccatgaaaatgtgggttcagaaacacctaaaagcaccatgacacttggccgttctgggggacgtctgccttacggtgttcggatgactgctatgggtagtagccccaatatagctagcagtggggttgctagtgacaccatagcatttggagagcatcacctccctcctgtgagtatggcatccactgtacctcactcccttcgtcaggcgagagataacacaatcatggatctgcagacacagctgaaggaagtattaagagaaaatgatctcttgcggaaggatgtggaagtaaaggagagcaaattgagttcttcaatgaatagcatcaagaccttctggagcccagagctgaagaaggaacgagccctgagaaaagatgaagcttccaaaatcaccatttggaaggaacagtacagagttgtacaggaggaaaaccagcacatgcagatgacaatccaggctctccaggatgaattgcggatccagagggacctgaatcagctgtttcagcaggatagtagcagcaggactggcgaaccttgtgtagcagagctgacagaggagaactttcagaggcttcatgctgagcatgagcggcaggccaaagagctgtttcttcttcgaaagacattggaggaaatggagctgcgtattgagactcaaaagcagaccctaaatgctcgggatgaatccattaagaagcttctggaaatgttgcagagcaaaggactttctgccaaggctaccgaggaagaccatgagagaacaagacgactggcagaggcagagatgcacgttcatcacctagaaagccttttggagcagaaggaaaaagagaacagtatgttgagagaggagatgcatcgaaggtttgagaatgctcctgattctgccaaaacaaaagctctgcaaactgttattgagatgaaggattcaaaaatttcctctatggagcgtgggcttcgagacctggaagaggaaattcagatgctgaaatcgaatggtgctttgagtactgaggaaagggaagaagaaatgaagcaaatggaagtgtatcggagccattctaaatttatgaaaaataagattggccaggtgaaacaggagctgtccagaaaggacacagaactactcgccctgcagacaaagctagaaacactcacaaaccagttctcagatagtaaacagcacattgaagtgttgaaggagtccttgactgctaaggagcagagggctgccatcctgcagactgaggtggatgctctccgattgcgtttggaagagaaggaaaccatgttgaataaaaagacaaaacaaattcaggatatggctgaagagaaggggacacaagctggagagatacatgacctcaaggacatgttggatgtgaaggagcggaaggttaatgttcttcagaagaagattgaaaatcttcaagagcagcttagagacaaggaaaagcagatgagcagcttgaaagaacgggtcaaatccttgcaggctgacaccaccaacactgacactgccttgacaactttggaggaggcccttgcagagaaagagcggacaattgaacgcttaaaggagcagagggacagagatgagcgagagaagcaagaggaaattgataactacaaaaaagatcttaaagacttgaaggaaaaagtcagcctgttgcaaggcgacctttcagagaaagaggcttcacttttggatctgaaagagcatgcttcttctctggcatcctcaggactgaaaaaggactcacggcttaagacactagagattgctttggagcagaagaaggaggagtgtctgaaaatggaatcacaattgaaaaaggcacatgaggcagcattggaagccagagccagtccagagatgagtgaccgaatacagcacttggagagagagatcaccaggtacaaagatgaatctagcaaggcccaggcagaagttgatcgactcttagaaatcttgaaggaggtggaaaatgagaagaatgacaaagataagaagatagctgagttggaaaggcaagtgaaagaccagaataagaaggtagcaaatctgaagcacaaggaacaggtggaaaaaaagaagagtgcacaaatgttagaggaggcgcgacgacgggaggacaatctcaacgacagctctcagcagctacaggacagtctccgtaagaaggatgacaggattgaagagctggaagaagcactaagagaaagtgtacagataactgcagagcgggaaatggtgctagcacaagaggaatcagccaggaccaatgctgaaaaacaggtggaggagttactgatggccatggagaaggtaaagcaggaactagaatccatgaaagcaaagctgtcctccacccagcagtctctggcagaaaaggaaactcacttgactaatcttcgggcagagagaaggaaacacttagaggaagttctggagatgaagcaagaagctcttctggctgccattagtgaaaaagacgccaatatagctctcttggagctttcgtcctctaagaagaagacccaagaggaagtggctgccctgaagcgggagaaggatcgtctggtacagcagcttaagcagcagacgcaaaatcgaatgaagctaatggccgacaactacgaggatgaccacttcaaatcctcccattccaatcaaacaaatcacaagccctccccagaccagatcatccagcccctcttagaacttgaccaaaatagaagtaaattaaagttgtacattggacacctgacaaccctctgccatgaccgagaccccctgatcctccgtggactcactccaccagcttcctataacttggacgatgaccaggcggcttgggagaatgagctgcagaagatgacccgggggcagcttcaggatgagttagagaaaggtgaacgggacaatgcagaactgcaggagtttgccaacgccattcttcagcagatagcagaccattgtcccgacatcctagagcaagtggtcaacgccctggaagagtcctcttgaccctgctttatggggaagcctgaggtagtcaacccaggagccaagaaaagagaactacgaggaacaggtgcccggaaccttcttggcaccaaacactacaaacttcatcccaacttgctcacttgaagaagtgtgattccagcaccgtttctacatctgccatcttactctgcctttctgctttggatgtggtctctacactaaccttcttgatgtccagggtagataaagggtcgaatctctctgaagaactgccacctggtcatcagcagtggagaactgtgggagctggtggctctgccctgacagagagccatggagcagaggagcctctcacctcctgtcctctgacatgagaatgaaaccaggaatggacttggagttcaacaggctgagaggatgcctccaatggaccagagagctgagtgttctaatatcacaataggtgctttctcctaaaagggcaaaaaacaatctcaaaaagattagaaaaagagaaggggggaagggaagagaaaatcgactcttctttttactgtctcttctgcttactttccacatgagatgctttgtaccggggagctgtgagcaggcctcacgatggcttgggagcactcgttctcccaaggtctgagtcttcatccagccctgcctgtctgtcgcagccttcctcactctgttcctcggccagttaacaagaagatggtgtgaggtgttctccaccagtctctcctgtttgagactgttgacgttatcatactgaggtgttagatcaaatatctctaattgaagaacatgtgaggttgaaagagcaccagccagggcaacatagcgtgaccctgtctctacaaaaaattaaaaaga

SEQ ID NO: 4390 - DNA, 2130 bp, Homo sapiens
  source 1..2130: mol_type = genomic DNA
agccaggggagaagatttcttacttctgtgacacaattaaaatggataggtacccactctgaagtgtattctgcgacagtagaaaaggggatcaaggagaaacttcaattaatgaaaaatatgctttcggaattttttttttgacagatcgctttaaatatcatatcgttaagcagatcttctctggaggagaccagacttttgtactttgctccaaatacgagaattgatgaacattttaaaacgagtcccaaaatccctgggattgacctgaactcaactagggtgttatttgagaagttaatgaactctcagcactccatgattctagaacagataactggtggtctcaggtatgcccgaaatatttcatgaagctggtaaacctctataaaggtgcagtcctttatctactgaggggaagaaagacattcttaattcccgtactgtttaacaattatatcacagcagctctcaaactcttggagaagttatataaggtaaatcttaaagtgaagcatgtggaatatgatacattttacattcctgagatttccaatctcgtggacattcaggaagactacctcatgtggttcttgcatcaagcagggatgaaggctagaccatcaataatacaggatactgtaacactttgttcctaccctttcatctttgatgcccaagccaagaccaaaatgttacagacagatgctgaactacagatgcaggtggcagtcaatggagccaacctgcagaatgtcttcatgcttctcaccctggagcctctgctggccagaagccccttcctggtccttcacgttcgcaggaacaaccttgttggagatgccctaagagagctgagcattcattctgatattgatttgaaaaagcctctcaaagtaatctttgatggtgaagaagcagtggatgccggtggtgttacaaaggaattttttcttttgctgttaaaagaacttttgaatcccatctatggaatgtttacctactatcaagattcaaatctcttgtggttttcagacacgtgttttgtagagcacaactggtttcacttgattggtataacctgtggactagctatctacaactccactgtggtcgatctccacttcccattggctctctacaagaagttactcaatgtaaagcctggcttggaagacttaaaggagttgtcacccactgaaggaaggagtctccaagagcttttagattaccccggggaggatgtggaggagactttctgcctcaacttcacgatctgccgagaaagctatggagtgattgaacagaagaagctgatacctgggggagataatgtaactgtgtgcaaggataacaggcaggaatttgtggatgcttatgtgaattatgtcttccaaatctcagttcatgaatggtacacagccttctctagtggcttcctaaaggtgtgtggtggcaaagtacttgagctcttccagccttcagaactgagggctatgatggtggggaacagcaactacaactgggaagaactggaagagactgccatctacaagggagattactcggccacacatcccactgtaaaactattttgggaaacatttcatgagtttccattggaaaagaagaagaagtttctcttgttcctgacaggcagcgatcggattcccatctacggcatggccagtctgcagattgtcatccagtccacagccagcggggaggagtacttgccggtggcccacacttgctacaaccttcttgacctccccaagtacagcagcaaagagattctgagtgcccggctgacccaggcccttgacaactatgaagggtttagtttggcctgaggcttctcagcttgtccagtatttcccttcgttcctcagtgtccacattgaggcctatacagaaaatcatggggagtgatttctatttttttattgtctaagtgggttgggacttttaaatactgagcctggttgatgtgtttctgggattgtatagcagtaaacaacctttttgaaaaattagaggttggggatggggtgaaaaattggcccttgtatgggaggtgtttttgtttttgttttaaaccaaactacccagtattccttgcacttg

SEQ ID NO: 4391 - DNA, 2692 bp, Homo sapiens
  source 1..2692: mol_type = genomic DNA
agtggtgtggtaccgggtacccggagacgtgtatcggacggtgggccgcagccatggccgagagaaaacctaacggtggcagcggcggcgcctccacttcctcatcgggcactaacttacttttctcctcctcggccacggagttcagcttcaatgtgcccttcatcccagtcacccaggcctccgcttctccggcctccctgctcttaccgggaggttccttcttcagtgcagtcaccggcacagcagcaggtacctgccagacctggggctccctctgttcaagtgccatctccttttctacttcaaaaccaatatgagcctgttcagccccactggttttactgcaaggaggtagaatacaaacaactgtggatgccttttagtgtgttcgactctttgaatcttgaagaaatctataattcagttcagccagatccggagagcgtggttcttggcacggatggagggcgctacgatgtttacctctatgaccgaataaggaaggctgcctactgggaagaggagccagccgaagtgagacgctgtacttggttttacaagggggacacagatagtcgatttattccctatactgaggagttcagtgaaaaactagaggctgaatataaaaaagctgtaaccactaatcagtggcaccgaagattagagtttccaagtggagagacaattgttatgcacaatccaaaggttattgttcagttccagccctcctcagtgccagatgaatggggcaccacgcaagatggacagacaaggcccagggttgtaaagcgtggaattgatgataaccttgatgaaattcccgacggggagatgcctcaagttgaccatttggtgtttgtggtgcatggcattggacctgtgtgtgacttacgctttaggagcattattgagtgtgtggatgattttagggtggtttctctcaaattgctgcggacacatttcaagaaatctttagatgacgggaaagtaagcagagtggagttccttccagttcattggcatagttctttgggtggggacgccacaggtgtggacaggaatattaagaaaatcactttgccaagtattggtcgatttcgtcactttaccaatgaaactttgctagatattttattttataacagccccacctactgtcagacaattgtggaaaaagtaggaatggagataaaccatctgcatgcactctttatgagtcggaacccagacttcaaaggaggtgtctctgttgctggtcacagtttaggttctttaatattgtttgacatcctgtctaatcaaaaagatttgaatttatcaaagtgccctggacctcttgctgttgctaatggagttgtgaagcagctacattttcaggaaaagcagatgcctgaagagccaaagctgactttggatgagtcgtatgaccttgttgttgaaaataaagaagtcctaactttgcaagaaactctggaagcacttagcctctctgaatattttagcacttttgaaaaggaaaagattgatatggagtccctgcttatgtgtacagttgatgacctgaaggaaatggggataccccttggacccagaaagaagatagctaactttgtagaacataaagcagccaaactgaaaaaagcagcgtcagaaaagaaggcagtggcggccacttctacaaaaggacaagagcaaagtgcccagaagactaaagacatggcttccctcccctcagaatccaatgagccaaagaggaaacttccagttggtgcttgcgtgtcttctgtgtgtgtgaattatgaatcttttgaagttggcgccggacaggtttctgttgcttacaactcattagattttgaaccagagatattctttgccttggggtctccaattgctatgtttctcactattcgaggagttgataggatagatgagaattacagccttcctacctgtaaagggttcttcaatatttatcatccgcttgatccagtggcatatagattagaacctatgattgttccagatttggacctaaaagctgttctcattccacatcacaaaggcagaaaaagacttcatttagaattgaaagagagtctctctcgtatgggatctgatttgaagcagggttttattagctctctcaaaagtgcttggcagacattaaatgagtttgcccgtgctcatacgtcttcaacccagttgcaagaagaattggagaaggtggccaatcagatcaaagaagaagaagaaaagcaagtagttgaagcagaaaaggttgttgaaagtccagatttttccaaggatgaggactacttaggaaaggttggaatgttaaatggaggccgccgaattgactacgttctccaagaaaaaccaatagagagttttaatgaataccttttcgctcttcagagtcacttatgctattgggaatctgaagatactgctctgttactacttaaagaaatttatcgaacaatgaacattagtccagaacagccccagcattgatcaaacttcagttttactgtactttcttgtctgcacagaaagtcccagtacaacttccattgctgagaaaatcctcagaggactttcccacttcgctcctgtgatggatgacagaagagtgattcattaacaattgctcagccacaattctcggatatagggattcaaa

SEQ ID NO: 4392 - DNA, 2127 bp, Homo sapiens
  source 1..2127: mol_type = genomic DNA
aggtacccagtgcagtcctgatctccagctctccagcggcttagaacagacacagaatgggccgggaccagggacccaccagagacgtctgtagttaatagctggcgctcttccactaataaagttttattgaaataaagcatttaaaaaggcgcccgtcattcttcccccagcgaccaatcgaagagtagaatgcctgcgtccctcactggagcttcagcggtcggaacgcgggggtggggcatgtcctgccgaaatttgcgtccttagagcggaagtacggccggaagcccgccatagagtttagtggccagagcgactcttcagggaggtggcaggaaaggcttggaacagctgccggaggtgacggagcggcggccccgcccggtgcgctggaggtcgaagcttccaggtagcggcccgcagagcctgacccaggctctggacatcctgagcccaagtcccccacactcagtgcagtgatgagtgcggaagtgaaggtgacagggcagaaccaggagcaatttctgctcctagccaagtcggccaagggggcagcgctggccacactcatccatcaggtgctggaggcccctggtgtctacgtgtttggagaactgctggacatgcccaatgttagagagctggctgagagtgactttgcctctaccttccggctgctcacagtgtttgcttatgggacatacgctgactacttagctgaagcccggaatcttcctccactaacagaggctcagaagaataagcttcgacacctctcagttgtcaccctggctgctaaagtaaagtgtatcccatatgcagtgttgctggaggctcttgccctgcgtaatgtgcggcagctggaagaccttgtgattgaggctgtgtatgctgacgtgcttcgtggctccctggaccagcgcaaccagcggctcgaggttgactacagcatcgggcgggacatccagcgccaggacctcagtgccattgcccgaaccctgcaggaatggtgtgtgggctgtgaggtcgtgctgtcaggcattgaggagcaggtgagccgtgccaaccaacacaaggagcagcagctgggcctgaagcagcagattgagagtgaggttgccaaccttaaaaaaaccattaaagttacgacggcagcagcagccgcagccacatctcaggaccctgagcaacacctgactgagctgagggaaccagctcctggcaccaaccagcgccagcccagcaagaaagcctcaaagggcaaggggctccgagggagcgccaagatttggtccaagtcgaattgaaaggactgtcgtttcctccctggggatgtggggtcccagctgcctgcctgcctcttaggagtcctcagagagccttctgtgcccctggccagctgataatcctaggttcatgacccttcacctcccctaaccccaaacatagatcacaccttctctagggaggaggcaaatgtaggtcatgtttttgttggtactttctgttttttgtgacttcatgtgttccattgctccccgctgccatgctctctcccttgtttccttaagagctcagcatctgtccctgttcattacatgtcattgagtaggtgggtagccctgatgggggtcgctctgtctggagcataacccacaggcgttttttctgccaccccatccctgcatgcctgatccccagttcctataccctacccctgacctattgagcagcctctgaagagccatagggcccccacctttactcacaccctgagaattctgggagccagtctgccatgccaggagtcactggacatgttcatcctagaatcctgtcacactacagtcatttcttttcctctctctggcccttgggtcctgggaatgctgctgcttcaaccccagagcctaagaatggcagccgtttcttaacatgttgagagatgattctttcttggccctggccatctcgggaagcttgatggcaatcctggaagggtttaatctccttttgtgagtttggtggggaagggaagggtatatagattgtattaaaaaaaaaaaggtatatatgcatatatctatatataatatgacgcagaaataaatctatgagaaatct

SEQ ID NO: 4393 - DNA, 576 bp, Homo sapiens
  source 1..576: mol_type = genomic DNA
agttccctgctcctccctctctgagcacggagcagaatctgttctgctgaagctgctgttccactttttagcttgctatatttgtacagcaacagcaggagcagcccactagctaggccgtgtggccaccctttggcacccgcaccggctcagacctgctcaggactcagccagggcacacagtttgtgttcttacgtgcatccatctgtctgtctgtgtgcgtctctgtggaggactgaggttttcaagtgaaagaggctgaacataacttctttttttcaaagttccctgtgttgtgaactgagcttgggtgaagtgaaatctttgagctcaaagaaaatgaacggcaccctggaccacccagaccaaccagatcttgatgctatcaagatgtttgtgggccaggttccaaggacctggtctgaaaaggacttgcgggaactcttcgaacagtatggtgctgtgtatgaaatcaacgtcctaagggataggagccaaaacccgcctcagagcaaagggtgctgttttgttacattttacacccgtaaagctgcattagaagctcagaatgctct

SEQ ID NO: 4394 - DNA, 2319 bp, Homo sapiens
  source 1..2319: mol_type = genomic DNA
agaatcagctgtcctctcagactgtgtgggtggtttccccggccgcagctccgtacgggcttggattgctgggcctcggtgcaccccagcctcccccactcgggttctgagcttgagctggcggctctttaactctgcttcactgttgctcttggcaacatccacttccgggagcgagtgccgtttcccccgctcaccgcgggctagggagcgtgggattccggactgtgagcggctgttagtgcgtcgcagctgctggcgatccggcgaccctcggccggcagtacctcggcgggaccgccatggttctgctgcacgtgaagcggggcgacgagagccagttcctgctgcaggcgcctgggagtaccgagctggaggagctcacggtgcaggtggcccgggtctataatgggcggctcaaggtgcagcgcctctgctcagaaatggaagaattagccgaacatggcatatttctccctcctaatatgcaaggactgaccgatgatcagattgaagaattgaaattgaaggatgaatggggtgaaaaatgcgtacccagcggaggtgcagtgtttaaaaaggatgatattggacgaaggaatgggcaagctccaaatgagaagatgaagcaagtgttaaagaagactatagaagaagccaaagcaataatatctaagaaacaagtggaagccggtgtctgtgttaccatggagatggtgaaagatgccttggaccagcttcgaggcgcggtgatgattgtttaccccatggggttgccaccgtatgatcccatccgcatggagtttgaaaataaggaagacttgtcgggaacacaggcagggctcaacgtcattaaagaggcagaggcgcagctgtggtgggcagccaaggagctgagaagaacgaagaagctttcagactacgtggggaagaatgaaaaaaccaaaattatcgccaagattcagcaagtaagtactttttgctttaatgtgtcagtagtttttgttatttcccttcaaactgataaaaatgtacagtgaatccgaaagatttaaactactggtacaaatattttaatcttattggctcgggtttaaactaaaaatatcctcttcctgcacaccaacaaaaactggaagaaaatatggattgagtaccaatatctagagtttgttttaatatgtgggggagaggaaatatactatgttaatttcaagcgtaaaaatagggctgcaagtaaacagatatgttccttgaaatgtaaaatttcgcccgtcactgatttcaggctttttcaaactgctgatgctgtgtacaggagggggaggaggaaaggttcgagacctttgaaggacatcgtgtagcgctgtaacctgaggggccgccttggttttgtgggtgctcctacgtcactaggctgtgattttggggaaatggggccctccaccttatgtagatccagagtccgtggctctgagcatcctccctttcccactggacctgcctgcagtgtctgccttgggaatggtcaagacagagatggtatcgtgcagcctctggtctccacacagtgagagtccagggctcagggctgctcaagaccaaggcttcccttgatgcttcacttcgggtgatcagacatgggggacctgtttatctttagtagccggcaaaggcaatcgtaaaacatttgttgtaacttcaggattgtcactctaagaacaccttaatccacaatttgctctgctctcctctttgcagaggggacagggagctccagcccgagagcctattattagcagtgaggagcagaagcagctgatgctgtactatcacagaagacaagaggagctcaaggtagcaggggacagatgggctttctgcagtgctggcgcccacacatagcctgtgtgccttacctggggctgctggggagcagtgagctctgcagaatgccggggaggggtctttctagagcttctgtctgcaggtctgtcggggtcctgccaggtgtcccctggtgttagacatggcagtatcctgctcctagagggcagggagagggggaggtcagtcatggactctttcttcagtctctttatgtgcaaaacactttcctgaaatgcctgcctgaataaaacatacttatttccagagattggaagaaaatgatgatgatgcctatttaaactcaccatgggcggataacactgctttgaaaagacattttcatggagtgaaagacataaagtggagaccaagatgaagttcaccagctgatgacacttccaaagagattagctcacctttctcctaggc

SEQ ID NO: 4395 - DNA, 548 bp, Homo sapiens
  source 1..548: mol_type = genomic DNA
attgtatgtgaattagccacccttgtgactatttgaggagagagaagttagtctaaaatattatgttaaattatgatattacataattttattgcataagttcatcaaactacttccatctgaaaaatcctgatctcaaaatagtttccgttactatggcaatgacggcagggactacaacaacctttcctatgagcaaccatacccgggaaagagtgactgtagccaagctcacattggagaatttttatagcaacctaattttacagcatgaagagagagaaaccaggcagaagaaattagaagtggccatggaagaagaaggattagcagatgaagagaaaaagttacgtcgatcacaacacgctcgcaaagaaacagagttcttacggctcaaaaggaccagacttggcttggatgactttgagtctctgaaagttataggaagaggagcttttggagaggtgcggttggtccagaagaaagatacaggccatatctatgcaatgaagatattgagaaagtctgatatgcttgaaaaagagcag

SEQ ID NO: 4396 - DNA, 4729 bp, Homo sapiens
  source 1..4729: mol_type = genomic DNA
aagcactttcgcgccgtatccctccgccccccttcccgacaccctcgcggcgagcggttcttgccgcatcctgcgcagcccctgcctactttggtgcagaggcgtggggggcgggacgcgtctttcccgttcggatcgcggggaaagcagtggctccaagtgagccagaggagagctgaggagaggagggggaggccgacgacctgggccctgggcctctgaaggtctggcgtattctgacaggacacagtgagcgtctgtagaggagaggcttgaaataaaggagcacgaatattgcctggatttctggaggcctactttaaggctggccaattctgcaagaaaggcaaggaggaggagactggctcacagctctggaggacccccttctgtcagctgtggggcttgacaccacttgaacaagaaaaggagggggaaactgcaccacatcagtgaaggaggcagccggtccagagagactttctcaaagcccagctgtcccacctagcattcaacatcagtcgcactgcatacgtctcatacaattggaagagactcaaagcctcatttcattctctctccctagatccacctccagtggctgctctgctggtggtggagttgctgctgacaaccaccctcaacgggtctgcacccatccaggaaatatctgtcttcctttagcttggttgtacctgttctcactctatctgtattattgaattattgactgagactgtgtttgggaaggaggctgagtgactactggactggatattgactctaactcttattcccaagcttatatccttaatcacctaaagatcagagtgtgaagaaacaaacctgtgacagatctgtggttgaggtttagactacgggaggagtatattacctgactttctttgtaacttgtaccatgactggggcagagattgagcctagtgcccaggccaagcctgaaaagaaggctggggaagaggttatcgctgggcctgagagagagaatgatgtccctctggtggtcagacccaaggttaggacccaggcaactactggggcaaggcccaaaactgagaccaagtctgtgcctgcggcaaggcccaaaactgaggcccaagcaatgtctggggcaaggcccaaaactgaggtccaagtaatgggtggtgcaagacccaaaacggaggctcaaggaatcacaggggccaggcccaaaaccgatgccagggcagtaggtggcgctcgttctaaaactgatgccaaggcaatccctggagcaaggcccaaggatgaggcccaggcatgggcccagagtgaatttgggactgaagcagtgtcacaggcagaaggagtgtcccagactaatgccgttgcttggccactggccactgctgagtctggatcagttactaaatctaagggcctgtctatggatagagaactagtcaatgtggatgctgaaacctttcctggcacccagggtcagaaaggaatccagccctggtttggaccaggggaggagactaatatggggtcttggtgctattccaggcccagggccagagaggaggcctctaatgagtctgggttctggtcagcagatgagacctctacagcgtcttctttctggactggagaagagacaagtgtcagatcatggcccagggaagagtccaataccaggtccaggcacagggctaaacatcagactaatcccaggtccaggcccagatccaagcaagaagcctatgttgattcctggtctggatctgaggatgaggccagcaacccattctccttctgggttggagaaaataccaataacttgttcaggcccagagtcagggaggaggcaaatatcaggtccaagctcaggacaaatagagaagattgttttgaatctgagtctgaagatgagttctataagcagtcctgggttttgcctggagaagaggccaatagtagattcaggcacagagacaaagaagatcctaatactgccttgaaactcagggcccagaaagatgttgacagtgatagggtcaaacaagaacccaggtttgaggaggaagtcattattgggtcctggttctgggcagaaaaagaggccagtttggagggtggagcttcagcaatctgtgaatctgagccaggaactgaggagggggccattggcggatccgcgtactgggctgaggaaaagtccagtttgggggctgtggccagagaagaggccaagccggagtctgaagaagaggccatatttgggtcctggttctgggacagagatgaggcctgctttgacctaaatccctgtcctgtgtacaaggtcagtgataggttcagagatgcagctgaggagcttaatgcatcctccaggccccaaacctgggacgaggtcactgttgaattcaaacctggtctttttcatggggttggcttccgatccacaagcccctttggaattcccgaagaggcttctgaaatgcttgaggcaaagcccaagaacctggaacttagcccagaaggagaagagcaggaatctttgcttcagcctgatcagcctagtcctgagttcacatttcagtatgatccttcctaccggtcagtccgggaaattcgagagcatcttagggccagggagagtgcagagtctgagagttggtcctgcagctgcatacaatgtgagctgaaaattggttctgaagagtttgaagaattccttttattaatggacaaaattcgggatccttttattcatgaaatatctaaaattgcaatgggtatgagaagtgcttctcaatttacccgagatttcattcgagattcaggtgttgtctcacttattgaaaccttgcttaattatccatcctctagagttaggacaagttttttggaaaatatgattcacatggctccaccttatccaaatctaaacatgattgagacattcatatgtcaagtgtgtgaggaaacccttgcacatagtgtggattcccttgagcagctgactggaataaggatgcttagacacctcactatgactattgactatcacacactgattgccaactatatgtccgggtttctctccttattaaccacagccaatgcgagaacgaagtttcacgttctgaaaatgctattgaatttgtctgaaaatcctgctgtggcaaaaaaactattcagtgccaaagctctttcaatatttgtgggtctctttaacatagaagagacaaatgataatattcaaattgttattaaaatgtttcagaatatcagtaacattataaaaagtggaaagatgtccttaattgatgatgatttcagtcttgagccgcttatttctgcatttcgtgaatttgaggagttagctaagcaactacaagcccaaatagacaaccaaaatgatcctgaggtgggacaacaaagttaatatgattaaccacctgccgctgatcagccttatgttcccaaagagccctgagtagtgctttggtgttcacagtctgtttttttgttgtaacttatattttttaatgctgatgttaactttgtcaaactcttgttttgagctggatcattttgtggatgccaaatgaatatcaaaactgaaaacacatttgttgatatttgtcttgctgtccagattgcggtatttttcagtattaagttttcaatgaactgtgtcacctaagtaagctaccctgctattcgttgtttaaatatatggttctctatttgagtctgtgttttcaataaagttctatgttaaaattggcataagtgacccttcttcagtttaagaaccatgtacagataaatcgtgtgcacttacaaacataggtaattattagtatgacaaacatgcgcttattagaaaattctgttcttgagttaagaagggagagattattgtgggccctgatacttgaggaatgtttccgagaagagggacccacttaaattggtcaggatagaacaaattggtcaggataggagagcaagacaacttgcccgcctgcttgcccaattatgagccttcccaacaagcaacctaaaattaatacttcttataggacccatttaaattaccatcttagccctgggatttgcctaagggtaggataagacaaatcattaggttgctcttggaagtgggcagtggtggtttgaagaaaagtgtgtaattgaataatctgttctagtagcatggatgaacccagtctgcttgaaacaagtaaaaggagtttgatgagaaatgcagttagaaagttgggaagaggccaatttggggaacagaataagccaaatctgcatatttaacaattcaaagtacaggtgttacttcaatgccacctaaaggctgaaagagtaggatagcacaattaaatggagtggggaatatgatttcctttatattcctagacaaaggaaagtgttaaggaaataccatgcagccgttggaatgattatgtatggataggtttattgacacaaaaggacattaattattttatatttggtgaaacagagaatgtgacatcatgtatggaaaattagattccatttttaaaacatctgtaaatgtacacaattcctatgcaatttcaatatgaatttctaaacacagtctggaataaaatatataccttgttaaaaaatgcttagagacaggcgttggggagatacaaacattaataagacaaattaaaaaattaatatgctt

SEQ ID NO: 4397 - DNA, 2010 bp, Homo sapiens
  source 1..2010: mol_type = genomic DNA
cgggcgggcaggcgggcaggccggcaggcgggtgcgcggagggctggtgccccgcagcaggtgggcggggtgcggttggcggcggcggctgggccgggggctgccggctgcgctcgggccgtgcgcggcggccgtgcgggcacgccatggacttcaacatgaagaagctggcgtcggacgcgggcatcttcttcacccgggcggtgcagttcacggaggagaaatttggccaggctgagaagactgagcttgatgcccactttgaaaaccttctggcccgggcagacagcaccaagaactggacagagaagatcttgaggcagacagaggtgctgctgcagcccaaccccagtgcccgagtggaggagttcctgtatgagaagctggacaggaaggtcccctcaagggtcaccaacggggagctgctggctcagtacatggcagacgcggccagtgagctggggccgaccaccccctatgggaagacactgatcaaggtggcagaagctgaaaagcaactgggagccgcggagagggattttatccacacggcctccatcagcttcctcacacccttgcgcaacttcctggagggggactggaagaccatctcgaaggagaggcggctcctccaaaaccggcgtctggacttggatgcctgcaaagcgaggctgaagaaggccaaggctgcagaagccaaagccacggccgagggtcccacggtgcctgactttcaggagactagacctcgtaattacattctctcggccagcgcctccgcgctctggaatgatgaagtggacaaggccgagcaggagctccgcgtggcccagacagagtttgaccggcaagcagaagtgacccgtctcttgctggagggaatcagtagcactcacgtgaaccacctgcgctgcctccacgagttcgtcaagtctcagacaacctactacgcacagtgctaccgccacatgctggacttgcagaagcagctgggcagctcccagggtgccatatttcccggcaccttcgtgggcaccacagagcccgcctccccacccctgagcagcacctcacccaccactgctgcggccactatgcctgtggtgccctctgtggccagcctggcccctccgggggaggcctcgctctgcctggaagaggtggccccccctgccagtgggacccgcaaagctcgggtgctctatgactacgaggcagccgacagcagtgagctggccctgctggctgatgagctcatcactgtctacagcctgcctggcatggaccctgactggctcattggcgagagaggcaacaagaagggcaaggtccctgtcacctacttggaactgctcagctaggcaggtgcccccatcccccccgcattctggcctaggcaggagaggatgggcgcagccctgccacttaacttgtttgttggtgacacagttgttcagagtggggagaattcaccccattctgtccctgcccctagtcacctagctgtgagggtgcctgaggctgaatggctccacccctcccccagccctgcttctgacctgtggctctggagcccctgcccctgcctgcatccccgagcaccccaccctccaggctccactaaggagggaggggctgtctgcagcagctgcactcagcacctaggccagggtggggccgccgcagatgggctcaggaagccccaggtgcactcagcgagagccctgcctttcagttgccaaaagctgcatcaggggaatgcggcaaggcacacagggctctggcagcccctggggactgggcgctgcccctgggaggggagagcctggccagggctggtgttgggcccggagcagcatcttccggtgctatcctcccctcccacccctcacagctcaagccaagtccagcggccgcagtcttcacctctccacactcactttttatctggtgtttttacttctgcctgcgtttgctctctagccaataaaccgtccttgtgtgcgagtc

SEQ ID NO: 4398 - DNA, 495 bp, Homo sapiens
  source 1..495: mol_type = genomic DNA
atgacctgctgccagaccagcttctgtggatatcccagcttctccatcagtgggacctgtggctccagctgctgccagccaagctgctgtgagaccagctgctgccagccacgcagctgccagactagcttctgcggatttcccagcttctcaaccagtgggacctgcagctccagttgctgccagccaagctgctgtgagaccagctgctgccagccaagctgctgccagatcagctcctgcggaactggctgtggcattggtggtggcatcagctatggccaggagggcagcagtggagctgtgagcacccgtatcaggtggtgccgcccagacagtcgtgtggagggcacctacctacccccctgctgtgtggtgagctgcacgcccccatcctgctgccaactgcaccatgcccaggcctcctgctgccgcccgtcctactgtggacagtcctgctgccgcccagtctgctgctgtgagcccacttgctga

SEQ ID NO: 4399 - DNA, 1889 bp, Homo sapiens
  source 1..1889: mol_type = genomic DNA
gtaacgttcgggctccgtctcaggggctgaagtttgtgaggtgtagtattgagtcctgtttgagctattgttctctttttcctgaaaaatggcactgtcaaagagggagctggatgagctgaaaccatggatagagaagacagtgaagagggtcctgggtttctcagagcctacggtggtcacagcagcattgaactgtgtggggaagggcatggacaagaagaaggcagccgatcatctgaaaccttttcttgatgattctactctccgatttgtggacaaactgtttgaggctgtggaggaaggccgaagctctaggcattccaagtctagcagtgacaggagcagaaaacgagagctaaaggagttccaggaagcgctcgcccctggccgaggatatgtccttgcaaaacacgagccctcctagtgaagaggggatgtcacccaaagcctaccaccggaggtgtttggtgatgactctgagatctctaaagaatcatcaggagtaaagaagcgacgaataccccgttttgaggaggtggaagaagagccagaggtgatccctgggcctccatcagagagccctggcatgctgactaagctccagatcaaacagatgatggaggcagcaacacgacaaatcgaggagaggaaaaaacagctgagcttcattagcccccctacacctcagccaaagactccttcttcctcccaaccagaacgacttcctattggcaacactattcagccctcccaggctgccactttcatgaatgatgccattgagaaggcaaggaaagcagctgaactgcaagctcgaatccaagcccagctggcactgaagccaggactcatcggcaatgccaacatggtgggcctggctaatctccatgccatgggcattgctcccccgaaggtggagttaaaagaccaaacgaaacctacaccactgatcctggatgagcaagggcgcactgtagatgcaacaggcaaggagattgagctgacacaccgcatgcctactctgaaagccaatattcgtgctgtgaagagggaacaattcaagcaacaactaaaggaaaagccatcagaagacatggaatccaataccttttttgacccccgagtctccattgccccttcccagcgccagagacgcacttttaaattccatgacaagggcaaatttgagaagattgctcagcgattacggacaaaggctcaactggagaagctacaggcagagatttcacaagcagctcgaaaaacaggcatccatacttcgactaggcttgccctcattgctcctaagaaggagctaaaggaaggagatattcctgaaattgagtggtgggactcttacataatccccaatggctttgatctaggaaaatcccaagagagaagattattttggaatcacaaatcttgttgaacatccagcccagctcaatcctccagttgacaatgacacaccagttactctgggagtatatcttaccaagaaggaacagaaaaaacttcggagacaaacaaggagggaagcacagaaggaactacaagaaaaagtcaggctgggcctgatgcctcctccagaacccaaagtgagaatttctaatttgatgcgagtattaggaacagaagctgttcaagaccccacgaaggtagaagcccacgtcagagctcagatggcaaaaagacagaaagcgcatgaagaggccaacgctgcccgaaaactcacagcagaacagagaaaggtcaagaaaattaaaaagcttaaagaagacatttcacagggggtacacatatctgtatatagagttcgaaatttgagcaacccagccaagaagttcaagattgaagccaatgctgggcaactgtacctgaca

SEQ ID NO: 4400 - DNA, 1146 bp, Homo sapiens
  source 1..1146: mol_type = genomic DNA
aaatttcccgggccgggagcgctgggcctgccgggaaggcgctgggacggttacccagcgggccgccggcggtcgtgggcaagcttcgccatgcagagcactgacctaggcaacaaggagagcggcaagatatggcaccgcaagccgtccccggccacgcgggacggaattatagtgaacattattcacaacacttccgattaccatccaaaagttttgcgatttttgaatgtggcttttgatggcacaggcgactgcttaattgctggggaccaccaaggaaatatttatgtttttgacttacatggaaacaggttcaatcttgttcagcgaacagcacaagcttgcacagctctggcctttaatcttcgtaggaaatctgaattccttgtggcattagctgattattctattaaatgttttgatacagtcaccaaggagctagttagctggatgagaggacatgaatcatcagtattttcgatctctgtgcatgcatcagggaaatatgccatcacaacttcttctgatacagcacaattatgggacttggatacctttcagagaaaaagaaagctgaatattcgccagtctgtgggtatacagaaggttttctttctaccattaagtaataccatcctcagctgttttaaagataattccatttttgcctgggaatgtgacacacttttttgcaaatatcaattgccagctccacctgaaagctctagtatattatacaaagtgtttgctgtaaccagagatggccgaatcctggctgctggaggcaagtcaaatcatcttcatttgtggtgcttggaagctaggcagctctttagaattatccagatgcccactaaagttcgagccattcgccatctggaatttcttcctgatagttttgatgctggttctaatcaggttcttggagtactaagtcaagatggtattatgagatttatcaatatgcagacttgtaaacttctctttgagattgggagcctcgatgaaggaattagctcatcagcaattagcccacatggacggtacattgcatctattatggaaaatggaagtctaaacatatattcagttcaggctttaacacaagaaataaataaggaagaagttcgtgctcaaaattaa

SEQ ID NO: 4401 - DNA, 1616 bp, Homo sapiens
  source 1..1616: mol_type = genomic DNA
agcgaggacttctaccgctgcggctactgcaagaacgagtcgggcagccgctccaatggcatgtgggcacattccatgacagtacaggattatcaggatctcatagaccgaggatggcgaagaagtggaaaatatgtgtacaaacctgtcatgaatcaaacatgttgtcctcagtacacaataagatgagcccatggattccacaatggatgatgctgttgcgggtgactttgcattgataaataaactggatatacagtgtgatcttaaaacactcagtgatgacatcaaagagagtttagagagtgaaggaaaaaattcaaagaaagaagaacctcaggaattacttcagtcacaagatttcgtaggagagaagttgggctctggtgaaccgtcacattcagttaaagttcacacagttcctaagccaggcaaaggggctgatttgagtaagcctccatgtcgaaaagcaaaggaaatccggaaagaaaggaaaaggttaaaactaatgcagcagaacccagctggagaacttgagggtttccaggctcaaggtcacccaccatctttgtttccaccaaaggctaaatccaaccagccaaaatcactcgaagatttaatttttgagtctttaccagagaatgcatcacacaagttagaggtgagggtggtgagatcatctccaccaagttcgcagttcaaagccacacttctggagtcttaccaggtctataaacgttaccagatggttattcacaagaacccacctgatacgccaaccgaaagccagttcacaagattcctttgcagttcacccttggaggcagagactccccctaatgggccagattgtggctatggctcctttcaccagcagtactggcttgacggaaagatcattgctgtgggggtgattgacatcctcccaaactgtgtatcatctgtgtatttgtactacgatcctgattattcgtttttgtctttgggcgtctactctgcactacgagaaattgcttttactaggcagcttcatgagaaaacttctcaactcagctattattatatgggtttctacattcattcatgtcccaagatgaaatataagggtcagtatagaccttctgatttgctgtgccctgagacatatgtttgggtacccattgagcaatgcctgccttcacttgaaaactccaagtactgccgtttcaaccaggacccagaagcagtggatgaggatcgcagtacggaacctgaccgattgcaggtgtttcacaagagagccatcatgccttacggtgtttataagaaacagcagaaagacccaagtgaggaggctgctgttctgcagtacgccagcctggtggggcagaagtgctccgagcggatgctgctgttcagaaactgacctgttcacctctgccgggaagttcctgtgttgtgctgatgatttgtgccaggatacatattcagtacctgtggggaaataactgtcaccacccacaaattagacattttttattttgactatctatggcttttaaaaaatattttgtggcaatgtatctgtgagaatctcatagttaatataaagattttaaaactgcattatgacctag

SEQ ID NO: 4402 - DNA, 1047 bp, Homo sapiens
  source 1..1047: mol_type = genomic DNA
ggcccggcgcgccgcggccgcgcgaggcccccgccgtcgccgacgcccgagcgccggagccccggccccgccccgcgagcgccgagacttgttggccgcggagactgcgaccctcttctctcagtctgccttactaccatgccgctctacgagggcctggggagcggcggggagaagacggcggtcgtgatcgacctgggagaggcctttaccaagtgtggatttgctggagaaactggtccaagatgtataattcctagtgtgataaaaagagctgggatgcctaagcctgtcagagttgttcagtataatatcaatacagaagaattatattcctacctaaaggaattcatccacatactatatttcaggcatctattggtgaatcccagagaccgccgagttgtgattatcgaatcggtattatgtccttctcacttcagagagacactcactcgtgttcttttcaaatattttgaggttccatctgtcttgcttgctccaagtcatctaatggctcttctgacgcttggaattaattctgccatggtcctagattgtggatatagggaaagcctggtgttacccatatatgaaggaatcccagttctaaattgttggggagcactacccctaggaggaaaagctcttcacaaagagttggaaactcaactattggaacaatgtactgttgacacaagtgttgctaaagaacagagccttccctcagtgatgggttcagttccggaaggtgtcttagaggacattaaagcgcgtacttgctttgtaagtgatctgaagcgaggactaaaaatccaagcagcaaaatttaatattgatgggaataatgagcgtccctccccacccccaaatgttgactatccattagatggagagaagattttacatatccttggatcaatcagagattcagttgtggaaattctttttgaacaagataatgaagagcaatcagttgccactttaatattggattcccttatacagtgttgctcttgttgcccaggctggagtgcaatggcatga

SEQ ID NO: 4403 - DNA, 563 bp, Homo sapiens
  source 1..563: mol_type = genomic DNA
aacgcacacttaaggctccagcaaagtaagtgccaaaaaggggagaatgggaagaatatgctgtatttcacaaaaagcatctaagtagccatctggaaaagccagaatgaacttcaatggtgcatccaggtggctccgctgccggatgggagtgccccagtgtgctggatgaagctggcgcatgcaccatgtcatcatgtgtctctagccagcccagcagcaaccgggccgccccccaggatgagctggggggcaggggcagcagcagcagcgaaagccagaagccctgtgaggccctgcggggcctctcatccttgagcatccacctgggcatggagtccttcattgtggtcaccgagtgtgagccgggctgtgctgtggacctcggcttggcgcgggaccggcccctggaggccgatggccaagaggtcccccttgacacctccgggtcccaggcccggccccacctctccggtcgcaagctgtctctgcaagagcggtcccagggtgggctggcagccggtggcagcctggacatgaacggacgctgcatctgcccgtcc

SEQ ID NO: 4404 - DNA, 1362 bp, Homo sapiens
  source 1..1362: mol_type = genomic DNA
ttcttctcttccccggcagcacagtgtggctgtttgtctccttgcccgccaaagttctgcccagtccaacgactccacgcagctcgcccttggttatttggacaagaggcacattgacccaatttggagacgtattttggaaggaggcgaacagttgtctccaaacgtggtgttgccgtcagtggtcccaccaagaggaggggaatggcagattcactggagtcaacccccttgccttcccccgaagatcgtctggccaaactccatccttctaaggagctcctggaatattatcaaaagaagatggctgagtgtgaggcagaaaatgaggacttgctgaagaaactggaactctacaaagaagcttgtgaaggacagcataaacttgaatgtgatttgcagcagagggaggaagagattgctgaattgcagaaagctctaagtgatatgcaggtctgcctcttccaggaacgggaacatgttttacgcctctactcagaaaatgaccgactgagaatcagggagctagaagacaagaaaaagattcagaatctcttggctcttgtgggaacagatgctggagaagtgacctatttttgtaaggagcctcctcacaaagtcaccattctccaaaagactatccaggctgtaggtgaatgtgagcagagtgaatcttcagctttcaaagcagatcctaaaataagcaaaagaagaccatcgagagagagaaaagaaagttctgagcattaccaaagagacatacagacactcatcctacaggtggaagcactgcaggctcagctgggagagcagaccaaactttctcgagaacaaattgaagggctcatcgaggacagacggattcaccttgaggaaatacaagttcagcaccagagaaatcagaacaaaatcaaagagctaaccaaaaatcttcaccacacccaagaactgctctatgagagcaccaaagattttctgcaactcagatctgaaaaccaaaataaagagaagtcatggatgcttgaaaaagataatttgatgtcaaagattaagcaatatagggtgcagtgtaagaagaaagaagataaaattggaaaagtgttgcccgttatgcatgagagtcaccatgctcaaagtgaatatattaagtccctaaaagataagttagtacaagagaaaaagctgtccaatatgtaccaagagcagtgcatttccttagaagaagaacttgcccgaattcgtgaggaagagggaatgaggagagagatcttcaaggatcgcactaacaagatggggaagcgtttacagataatgacaaaacgctatgaggcattggagcgtcgacgtatcctggaagtagaa

SEQ ID NO: 4405 - DNA, 1976 bp, Homo sapiens
  source 1..1976: mol_type = genomic DNA
agtcacctgtgctgagccatcatggagagtgagggcctgtaagggtggacacagtatgcaggagggacaaatcttcctcaccggacaggtggggatccctgcggtgcactaggggaatgcacacagggggcactatgacctggcggcccacggggcacggggacgcaccaggtagccttgggatctgcaagtccctcccggaccctggggagtgccatgacggcttccagcagcagtcactgtcctgggcgcgtcccgcgctctagcccaggtgggtcccacaacggtgtgaccaaggacgtcctatgaccaccccttgacagcactctcgagtggaccctgaggagctcttcaccaagctcgaccgcattggcaagggctcgtttggggaggtctacaagggcatcgataaccacacaaaggaggtggtggccatcaagatcatcgacctggaggaggccgaggatgagatcgaggacatccagcaggagatcactgtcctcagtcagtgcgacagcccctacatcacccgctactttggctcctacctaaagagcaccaagctatggatcatcatggagtacctgggcggcggctcagcactggacttgcttaaaccaggtcccctggaggagacatacattgccacgatcctgcgggagattctgaagggcctggattatctgcactccgaacgcaagatccaccgagacatcaaagctgccaacgtgctactctcggagcagggtgacgtgaagctggcggactttggggtagcagggcagctcacagacacgcagattaagaggaacacattcgtgggcacccccttctggatggcacctgaggtcatcaagcagtcggcctacgacttcaaggctgacatctggtccctggggatcacagccatcgagctggccaagggggagcctccaaactctgacctccaccccatgcgcgtcctgttcctgattcccaagaacagcccacccacactggagggccagcacagcaagcccttcaaggagttcgtggaggcctgcctcaacaaagacccccgattccggcccacggccaaggagctcctgaagcacaagttcatcacacgctacaccaagaagacctccttcctcacggagctcatcgaccgctataagcgctggaagtcagaggggcatggcgaggagtccagctctgaggactctgacattgatggcgaggcggaggacggggagcagggccccatctggacgttcccccctaccatccggccgagtccacacagcaagcttcacaaggggacggccctgcacagttcacagaagcctgcggagcccgtcaagaggcagccgaggtcccagtgcctgtccacgctggtccggcccgtcttcggagagctcaaagagaagcacaagcagagcggcgggagcgtgggtgcgctggaggagctggagaacgccttcagcctggccgaggagtcctgccccggcatctcagacaagctgatggtgcacctggtggagcgagtgcagaggttttcacacaacagaaaccacctgacatccacccgctgaagcgcactgctgttcagataggggacggaaggtcgtttgtttttgttctgagctccataagaactgtgctgacttggaaggtgccctgtgctatgtcgtgcctgcagggacacgtcggatcccgtgggcctcacatgccaggtcaccaggtcaccgtctccttccacccctgcagtgtgctgttgtgcacgtcagggacgctgttctctatgcccactgccctcctccctctcctggcccagcagtattgctcacgggggctccagccgccggcgtggccctcatgagctacgcctgggtcttctgcagactcatgcagccctatggccgctcagaccaaggcgcagagcaactatcagggcagctctgcctcctcctcccatgaggtggggagaggcaaca

SEQ ID NO: 4406 - DNA, 1918 bp, Homo sapiens
  source 1..1918: mol_type = genomic DNA
gcaacaagttaagctgaagaccgaagcaagagctggttcaggtggcagccacagcagcctcaggtggcctctcagagtctgagactgggcccatggaggaagtggagcggcaggtcctcccagaccccgaggtgctggaagctgtgggggacaggcaggatgggctaagggaacagctgcaggccccagtgcctcctgacagtgtccccagcctgcaaaacatgggtcttctgctggacaagctggccaaggagaaccaggacatccggctgctgcaggcccagctgcaggcccaaaaggaagagcttcagagcctgatgcaccagcccaaagggctagaggaggagaatgcccagctccggggggctctgcagcagggcgaagccttccagcgggctctggagtcagagctgcagcagctgcgggcccggctccaggggctggaggccgactgtgtccggggcccagatggggtgtgcctcagtgggggtagaggcccacagggtgacaaggccatcagggagcaaggccccagggagcaggagccagaactcagcttcctgaagcagaaggaacagctggaggctgaggcacaggcattaaggcaagagttagagaggcagcgacggctgctggggtctgtacagcaggatctggagaggagcttgcaggatgccagccgcggggacccagctcatgctggcttggctgagctgggccacagattggcccagaaactgcagggcctggagaactggggccaggaccctggggtctctgccaatgcctcaaaggcctggcaccagaagtcccacttccagaattctagggagtggagtggaaaggaaaagtggtgggatgggcagagagaccggaaggctgagcactggaaacataagaaggaagaatctggccgggaaaggaagaagaactggggaggtcaggaggacagggagccagcaggaaggtggaaggagggcaggccaagggtggaggagtcggggagcaagaaggagggcaagcgacagggcccgaaggaacccccaaggaaaagtggtagcttccactcctctggagaaaagcagaagcaacctcggtggagggaagggactaaggacagccatgaccccctgccatcctgggcagagctgttgaggcccaagtaccgggcaccccagggctgctcaggtgtggacgagtgtgcccggcaggagggcctgactttctttggcacagagctagccccagtgcggcaacaggagctggcctctctgctaagaacatacttggcacggctgccctgggctgggcagctgaccaaggagctacccctctcacctgctttctttggtgaggatggcatcttccgtcatgaccgcctccgcttccgggattttgtggatgccctggaggacagcttggaggaggtggctgtgcaacagacaggtgatgatgatgaagtagatgactttgaggacttcatcttcagccacttctttggagacaaagcactgaagaagaggtcagggaagaaggacaagcactcacagagcccaagagctgcggggcccagggaggggcacagccatagccaccaccaccaccaccggggctgacaccctgccccacagggaatggccttggcctggcccagcccaagatcccagcgttatctaactcctggagggtggactctgtcctggcttgtttggtgtcctcagatatctttcacacagtagagcaaaatcaccagccctgcactgatgtcactttatgtagaaaaaggccttagctggacctgcgttgccgtctatgcaaatgcatgcaaatactccaggccctgggatgtgggcttgtgttttgtcactgtgaagggggagatgggagaggagcctgttttggggtggggtctggggaa

SEQ ID NO: 4407 - DNA, 5437 bp, Homo sapiens
  source 1..5437: mol_type = genomic DNA
attatcttctggcctctggagaaagatagagtagctcgctgattggatcctgaggttgaaataactccacatctcactgcgctccgactagagcaacgagaagagtgtctggaatggttgggagacattttaagcaggacaaatccagccttaggctagactgcacctgtccacagcccagcccaggcccatggaaaagaatagtaaaacctttgtctttaagcacatagaatatgtgtgaaacccagaaggctagaaaagaaagggaagtggaggagaaaaggcactgggactccagctgggagtatgaagactacgggagtgtacggaaaaggaaccttacagtgctggatggactctacagagaaaatgacttggatcccaggtactgggccaagggacagcatcagccctacagaaaaagggattgtggatactgggattttgaacagagtgaaccaagctatatggactgtggggaagcacatgaaagtggaaagggctgtgtgtaccacggaggtcatgatggttataggagtccagaaaatgtagattatgagagtctcagccctgggacgaaggataattcacctacgagaagcccagatgtgacctcgaaagctggtggatacggggaggcaaatggctactcagactgtaagaatctgaattataatcctgaggactctaaaaaagctgaacagttgactgactgtaggggtttggatgattcttcagcgaatttaggtcaacctcagttgtggtatatagaccatgagaatgttaaccataatcttgaggattgttgggcaactaatttttattgtagagaacacagcaatttatatcatgttcctgggagttatcctgatggtcagcctgtgagcttttcagattcgaatggtgtcaatgaagataaggaatttatcaaataccatgaaggggacaggaatgttcatcaaaatgacaacatgtatcccaaagcaaagactcatattatggatcagggtgattttgatacagaaaataaaggctatgatgctttatttgcaaactgtgcatataaatctcgtaattccagagggacagattctctccatcaaatggagaatttggagtataatggcactgacataccaagaacaaaggcacatgggggcagcaggatccttctggatggtctgcagactcagtgtaccaggggagaacaaggaggacatcatttggggattcctcagagctcgtcattagagaagaacatctggcatttagaggaagagaaaaaattaaatggcccagagacttggagaaggaatagttgcctccgccgcacagcacccagcaccctgaggcgctcagagttcgtgcaaaacagcaagaaaacccaagaaatgacgctcctctcctcccagtcttcatcactggtggccccttctgggtctgtgtctgccgaaaatccagagcagaggatgctggagaagagagccaaggtcatagaagaacttcttcagacagaaagagactacattcgggatctggaaatgtgtattgagcggatcatggtacccatgcagcaggcacaggtaccaaacattgattttgagggactttttggaaatatgcagatggtgattaaggtctcgaagcaattattggctgctctggaaatcagcgatgctgtaggacctgtgtttcttggtcaccgggatgagcttgagggaacatacaagatttactgccagaatcatgatgaggccattgcgctgcttgaaatctacgagaaggatgagaagatccagaagcatcttcaggactccttggcagatctgaagagcctatacaacgaatggggatgcacaaattatattaacctgggctccttcctcatcaaaccagtacagagagtaatgcgttacccgctgttgctaatggagttgctgaattccaccccagaatcccacccagataaagtgcctttaaccaatgcagtccttgcggtcaaggaaatcaacgttaacattaatgaatataaacggcgaaaggacctggtcctcaagtaccgtaagggtgatgaagatagccttatggagaaaatttccaaactgaacatccactccatcatcaagaaatccaaccgagttagcagtcacctgaagcatctcactggctttgctcctcagataaaagatgaagtatttgaagaaacagaaaaaaacttccgaatgcaagaaagattgattaagtcttttatccgagacctgtctctctacctccagcacatccgggagtccgcatgtgtgaaagtggtggctgctgtgagcatgtgggatgtgtgcatggagagaggacaccgggacctggagcagtttgagagggtgcatcgctacatcagtgaccagctcttcacaaactttaaggagaggacagagcggcttgtcatctcccccttaaatcagttactgagcatgtttacagggccccataagctggtacagaaacgctttgacaagctcctggacttctataactgtacagaacgggcagaaaagctaaaggacaagaagaccctggaggagctgcagtcggcccggaacaactatgaggccctgaatgcacagctgctggatgagctgcccaagttccaccagtacgcccagggcctcttcaccaactgtgtccacggctatgctgaagcccactgtgactttgtgcaccaggctctggagcaattaaagccactgctttcgttactcaaagtggctggcagagagggaaaccttattgccatcttccacgaagagcacagcagagttctgcagcaactccaggtttttaccttcttcccggagtctcttccagctaccaagaagccatttgagaggaaaaccattgaccgccagtctgctcgaaagccactcctgggcctgccaagttacatgctacagtcagaagaactccgggcctccctcctggccaggtatccccctgaaaaactcttccaggcagaacggaacttcaatgctgctcaagacttggatgtctcacttttggaaggtgacctggtgggtgtgattaagaaaaaagaccccatgggcagccagaaccgctggctgattgacaatggagtcaccaaaggcttcgtgtacagctctttcctaaagccctacaatcctcgccgcagccactccgatgcctccgtgggtagccactcctccacagagtctgagcacggcagctcctcccccaggttcccacgccagaacagcggcagcaccctgaccttcaaccccagcagcatggctgtatcctttacctcggggtcttgccagaagcagcctcaagatgcatctcctccgccaaaagaatgtgaccaaggaactctcagtgcatccctaaatccgagtaattcagagagtagtccttccagatgcccttcagacccagactccacctcccagccaaggtcaggggactctgcagatgtagctagagatgtaaagcaacccactgccacgccgaggagctaccggaacttcaggcatccagaaatagttggctactccgtaccaggacgaaatgggcaaagtcaagacctcgtcaaaggatgtgcaagaacagcccaggctccggaagacagaagtacagagccagatggcagtgaggcagaaggcaaccaggtctattttgctgtctacaccttcaaggcacgaaacccaaatgagctgagcgtgtcagccaatcagaaactcaagatcctcgagtttaaagatgttacaggaaatacagagtggtggttagctgaggttaacgggaagaagggctacgttccctccaattatatccgcaaaaccgagtacacctgagcccacgttgcctgccacccagccttgctgcctttgctttcagtccgccgagggttctggcggcccaccgagagggcgcctgctcctgagacacaggccctgtctgcgttgcttaaccatggcatggtggagcacaccacagatcttgttctcctcgattgggttgtaaaccttgatgctcactagaatctctagaatttgaaatggaccctggggctttgcaaatgacttagtgactatgagaagagagacaagtcttagagctggcttttggaaaggagaaacttgcagtcagaagcccagtgtcctatgtatgcaggaagctgtgctctagcaatagacagtgttggtaatggttgtgctgtacggcgtttggggtggccccatgttccatgctcagctgaccggatgccaactcagatgaaaagaattcatggctctgggcaccccgtgaggcagtgcttgcacatggctgggagtttgtcgggattgaaccaaacctagtgcttcaaagctcctgggacacctccagtgtccagcacacattctcatacatactgcccctaatttctaaagtccctaaagcactacattctgtaaccttgtttcttttactccattcccagattagttatgcaaaattcaactgcgttctacttttagaagtgtttagggtctttattttctgttgacccttcatctgaaagattctcttcccttgttaggtacaatcactgcccccccgcttttttttttgagatggggtcttgctatgttgcccaggctggtcttaaacgcctgggctcaagcaaccctcccgcctccctgctgagattacaggtgtaagccaccataccgcaacctcaatgacacctttctgatggtctttacacagtctgtgatgtctggtggcccccctgccctggactcaataattgatagattttcctagagtaacagtatgagagctccagccattccattaaaagtattagttctgctttgagctgaaaccagttgagcctaatggaagactggatgtctttcttcttcatccaagcaccctaatgactgtttagttacatccatagatgcagacaacataacacctgtgacttacttgaattgggataagccattccagaagtagcttatcctagacttggaaataagatttttttcaccactaacttccatgcttcagagatgacattcaaagccagattcccaagtgcctgatcatacctcccagtctcaggaagatatttgcttaccccttagaccaagaatcttaagatcttccccagctatgaagcctatcttggaatgggaaaccatgaaatttgtcttttaaaagaaagggaagaaatagccttacagcccctgttcctccaagtgcacatttagccttaaaatcctgggagtcgggagacaccgtggagtcctaacatccacagtgtctgctggtcgtggtcagaaggcagtaatgcaagagtccttttgtgaagagtgtttctatgtagagatgtttatatttaagtagttcttttataaataaaagcatttctaatggc

SEQ ID NO: 4408 - DNA, 636 bp, Homo sapiens
  source 1..636: mol_type = genomic DNA
agacaagtttagagcaagtcctgattgtataacaatcctgtgcaaaccgaacggtcaagccattgcgtggtacacccctatccactggaagcaagcgtgggaaaaattagatgctgacgttgaatttaacagatgttcagtagtatctccaacattccgaaagcgtgtgtttcagtggacagcatctacagctacaataactaaagaaaaacaagatcaacctaagaaagatatctcaaattatcaggtggaacaagctcaagttcttcttaagagagagaaggaaatcccaccaaccgttttccctaatcgcagcccttggtgccagaatccctatgtctctgcacatccttactgtcctctgattgaaccacacaatacatccaccgctggaggcagattggatagacagcccaggactcggtcaaccagacctaatcgagcctcagggtctaagaaaaagaagacatctgagtcacaaaagcaataagcagtcaactcaacctttaaagactttcaggattaagcatttcctggccaagaaacaaaagcaaaatcgtcccattccccagtggattcggatgaaaactggtaatacaatcaggtacaactccaaaaggagacaatggagaagaa

SEQ ID NO: 4409 - DNA, 1399 bp, Homo sapiens
  source 1..1399: mol_type = genomic DNA
cacaacgttcccgtttgcttatagttgtcaacgaccatgatctctggacccacactacagtaacaagtttgtcagtcattttcagataaggtgcaaatcaagggatggctttgtccccacttcggcgcaggtgggacagacttggggaagacgcagctgaagagacaaattctcaggacatgggaaagcggaaccaccaaaaggagtgatgatcaacgatctcatgataaatctggatgctagttctcatgcctcaggacatcctactgggaacgacacaccagctcctgggatcagactttcatctacttaggacccctctttgcccagactactaaagccagtcttcactagccacgaatggctacccaaaggaaacacttggtgaaagattttaatccttacattacctgctatatctgtaaagggtatctgatcaagccaacaacagtgacggaatgcctccatacattctgtaagacttgtattgttcagcactttgaagatagcaatgattgcccaaggtgtggcaaccaagttcatgagacaaatccattagaaatgttgaggttggacaatacattagaggaaattatatttaagctggtccctggactacgagaacaagaacttgagcgtgaatctgaattttggaagaaaaataagcctcaagaaaatggacaagatgatacttcaaaagctgacaaaccgaaagtagatgaagaaggtgatgaaaatgaagatgataaagattatcacagaagtgacccacaaattgctatctgtctagattgtttacgaaataatgggcaatcaggggacaatgtagtaaagggtttaatgaagaaattcattcgatgttctacacgtgtaactgtgggaactattaaaaaatttctaagtttaaaactaaaacttccaagttcttatgagttggatgtgctgtgcaatggtgaaattatggggaaggatcatactatggaattcatctacatgacaagatggcgactaagaggcgaaaactttcggtgtctgaactgctcagcttcgcaagtctgctctcaggatggccctttgtatcagtcataccctatggtactgcagtatcgaccaagaattgatttcggttagaccaaggggcccagacctcactgagatgaatcctgcactatttgtttactcgtcaacagattgcacagttaacggtgtgtggactagaggaacacaaccagattttcagcatgcaaataaggccattgtctatctctaaattgtcagttgcattcatgttgtttctattaggagcaaaccaagtgccattctgctactgaaccatctgcataaggtatttgtgttgtctcaaagtgtgcaagtcatggtaaaaatcagttagctgtgc

SEQ ID NO: 4410 - DNA, 2870 bp, Homo sapiens
  source 1..2870: mol_type = genomic DNA
ggagaacatattgtgatgttcgtgcctcagagctaaaactatgagtgaatttcggattcaccatgacgtcaatgaactgcttagcctgctgcgtgtccacggaggagatggggctgaggtctacattgacctgcttcaaaagaacaggaccccgtacgtcactaccactgtctctgctcacagtgccaaggttaaaattgcagagttttctcgtactccagaagactttctaaagaaatatgatgaactgaaatctaaaaatacaaggaaccttgacccgctggtgtacctgttgtcaaagctcacggaagacaaagagactctgcagtacttacaacagaatgcaaaagaaagagctgagcttgcagccgctgctgtgggcagcagtaccaccagcatcaacgtccctgccgcggcctccaagatctccatgcaggagcttgaggaactgaggaagcagcttggcagcgtggccacaggctccacgctgcagcagtctctggaacttaaaagaaagatgcttcgagacaagcagaacaaaaaaaattcaggccagcacctccccatcttcccagcatgggtgtatgagagacctgccctgatcggggatttcctgattggtgctggcatcagcacagacaccgctttgccgatagttcttttgagatggaatctcgctctgtcgcccaggctgaagtgcagtggcgtgatctcggcacactgcaacctccacctcccaggcacgttgcccctggcctcgcaggagtcggccgtggtggaggacctgctgtacgtgctggtgggcgtggacgggaggtacgtcagtgctcagcccctggctgggaggcagagccggaccttcctcgtggaccccaacctggacctgtccatcagggagctggtgcacaggatcctcccagtggccgccagctactccgctgtgaccaggttcattgaagagaagtcttccttcgagtacgggcaggtgaaccacgccctggcggccgccatgcgcaccctggtgaaggagcacctgattctggtgtcacagctggagcagctgcacaggcagggcctcctttcgctgcagaagctctggttctacatccagccagccatgcgcaccatggacatcctggcctccctcgccacctcggtggacaaaggcgaatgtcttggggggtccacgctgagcctgctccacgacaggagcttcagctacacaggggacagccaggcgcaggagctatgcctgtacctaaccaaggcggccagtgctccctacttcgaggttctggagaagtggatctacaggggcatcatccacgacccatacagtgagtttatggtcgaggagcacgagctgcggaaggagaggatccaggaggattacaacgacaagtactgggaccagcggtacaccatcgtccagcagcagatcccgtccttcctgcagaaaatggcggacaagatcctcagcacaggaaaatatctaaatgtggtcagagagtgtggccatgacgtcacctgcccggtggctaaagagatcatctacacgttaaaagagcgggcgtatgtggagcagatcgagaaggcgtttaactacgccagcaaggtgctgctggacttcctgatggaggagaaggagctggtggctcacctcaggtccatcaagcgctacttcctcatggaccagggcgacttcttcgtgcacttcatggacctcgcggaggaggagctccggaagccggtggaggacatcacgccccctcgcctggaagcgctcctggagctggcgctgcgcatgagcacggccaacactgaccccttcaaggacgacctcaagatcgacctgatgccccatgacctcatcactcagctcttgcgcgtcctggccatcgagaccaagcaggagaaggcgatggcgcacgccgaccccacggagctggcgctgagcggcctggaggccttctctttcgactacatcgtcaagtggcccctttcgctcatcatcaacaggaaagccctcactcgctaccagatgctcttcaggcacatgttctactgcaagcacgtggagcggcagctctgcagcgtctggatcagcaacaaaaccgccaagcagcactcgctgcactccgcccagtggtttgctggggctttcactctgcggcagcgaatgctcaacttcgtccagaatattcaatactacatgatgtttgaagtgatggaaccgacctggcacatcctggagaaaaacctgaaatccgcctccaacattgacgacgtccttggccaccacacaggcttcctggacacctgcctgaaggactgcatgctcaccaaccccgagctgctgaaggtcttctccaagctcatgtctgtgtgcgtcatgttcaccaactgcatgcagaaatttacacagagcatgaaattagatggcgagctgggcgggcagacgctggagcacagcaccgtcctggggctgcccgcaggggccgaggagcgggcccggaaggagctcgccaggaagcacctggctgagcacgcagacactgtgcagctggtgtccggcttcgaggccaccatcaacaagtttgacaagaacttctcagcccacctgctggacctcctggcccggctgagcatctatagcaccagtgactgtgagcacggcatggccagcgtcatctccaggcttgacttcaatggtttctacacggagcgcctggagcgcctgtctgcagagaggagccagaaggccaccccccaagtgcctgtcctgcgggggcccccggctcctgcacccagggtcgcagtcaccgcacagtgagccctggctgtgacaggaaggaagggtgtggggtcag

SEQ ID NO: 4411 - DNA, 2902 bp, Homo sapiens
  source 1..2902: mol_type = genomic DNA
attcctgccctggtggagcttacattatagaagggaggtccagaccatcaataaatatacagcgaagctccaaggaaaaacagagcagggcaaagagaagacagctatgggaggtggtttattttatataaattagccagacagtgcctctgagaggtgatgtctaagcagggactcggagatgagggaataagctaatggatatctgaagaaagaaccttccacatggatgaagcatcgcatgcaaagctcaaggaaggagcatgtttagtcaagtgcctaaagtggctggagcagagtgagtgagagttgagaggtagaagatgaattcggagagggagcattggggccagactatgtagcctagtgggccaagtgaggtcaggcctttaagaaggagcgtattgaggaagaaccatgcacactactgctagtgctagggtgagaaagatgaggactgagaactgacctggatttgggatcttgggtgaatgagtgacatccgcaagagtagtctctgttgactggttagggacagatgtctgattaactgggagcacaggaagctggggcagtgactctaggtaacacgctcttgaggcattggtatatgtaaagggtcacaatggaaaggaaagctagcaggagggcaagggaattagggttttgtttttgtgtttatttttggtgctgggataaacagcgtatgtgtcactgggtagaaatgatccagtaaaggaaaaattgtgaactttgttctctcttaatatgtgtgtttcgttgattcattcctgacttgtatctcccacatcttatcccttaattaagccattcttcctcttgcataattgcaaattattatgatataaatagctttgttgtactcttttatgagttttacagggaggaaattgcataaactctctataaagtaatttctatgtttaaaagcccttaagttctcccgccccatagcctgaccaaaaaagtcttactaaacaaaaataggatacaaatgatccatacacatcatcctggctagagaagggtcagaaactacagtgttgttagaaccaatagagcttaactttatatctcactggctttaataaaaaacttttctgagctatttgacacaaaaatcactaagattaagaaaatatcttaacacaggtggaaatagtaaaaggatgtttgcatgaaaaccgtcaaatgtaataaacagcactattctctgataataaaagatgaatctggctgtcagatgcaattttataatagcttcgaccatcatgtacggcaggagtatttttttttatttactatcgttaagtttgtggaaccagtgattgttgttttactattttgttaaggaaacctaaaacattcttagaatgtacagaaagaatatggtcattcttataggaccaaagggcgtatcaagtgagctgcttttgtaaataccatgaaaatccaagtctgacatggaattaaaatcatctctactacaagatgcagaaaaaaaccaaactcttttttttctatatcagagacttaaaaatattagtgatgaccaatgtgattagaagctttaaaatcctaacatttatgtgaacaaaaatcttcctgttttcagagacttaagcatatcatctgagcattgaaaaaagctcttaatagtacctttcagatttctcatctgttttcagatcccatattaaactccttgtggaagaatgagaaagaaagctactctaaattttacagaatagaattcaggctctttatttacaaaatggagtgtgaaccttgctgtttactcatctaccccctcaagcaattgtgttttccttccttatcagcacagaccatcacagttccaggatttgtctgagatgctagccacctctgattgctattcactggacactcttgtgattgtgatttaagattgtaggccaggcatgagccaccgcgcccagccggcatgtaaatttttatgtgacactttttttttggtggggggtggcaggggagagggtctcactgttgcccaggctagagtgcagaggtgctgatcacagctcactgcagggcacgcaccaccatgcccggctaagtttttgtattttttgtggagtcagggtctcactctgttgcccatgctggtctggaactcctgggctcaagcaattcacccgccttggcatcccaaagtgctgggattgcaggcatgagctactccgccctggctgtgatactctttaattattctaatgcttctaacttacgtcatggtgccaatcctatttatataatagaatcaatctcatactctcagctgacaatgaggggtatttcattttttacttgtatataagattccttttatataggatgaaatgcatacacactctgcatagaaattcttatgtgtttgtatattactccattcaatcatactatgattccaagttaagaactcctagataaattagcgtctgtagctgtaacagttgaggctttcaattcaaatgtcagataacattcttctgtgtattgtattattttctgcagtaattcaaatctttattgagttgaggtttgctcacttactataaggtagaatgaggtgatctaagtaggttttgtttaaatacatgtgtcttctccccatcagagtaaaagaagccgaagaggtgtgtagacagaagaaaggaaaatcactttataaaataaaaccaagacatgactctggaattaaagcaaagataagcatgaaaacttgaacaatgaaaagcagaatgaaaatgagtcattgcaacgactttcacaaaattcagctgacctgagagtgggagggaaactaccgtcattctgctcatgtttcttcttgacctct

SEQ ID NO: 4412 - DNA, 2704 bp, Homo sapiens
  source 1..2704: mol_type = genomic DNA
gcctgaactgtttgtacctctgggccatattgcagaaccctgcccttctttgttgactgaggaaagctcgctccctgcccaggtttttcattgttgatcgaaattaacaccaggtggtgaatagagcccctcctaaggttgctcaggataaatcatttattaaataggtctgcttatcaggaggggcgtgaaggctcccaaaaggaaatgctggcacctgggcccagaagccagggcctctaactcctggggttgatttcttcagtgaagttgcaccctacaaagggaatatggccaaagcggcactcaactgaaggctgatatcaggcgattagacagccatgcattctgcgtttgtctggaatggattgtagagagatggacttatatgaggactaccagtccccgtttgattttgatgcaggagtgaacaaaagctatctctacttgtctcctagtggaaattcatctccacccggatcacctactcttcagaaatttggtctgctgagaacagacccagtccctgaggaaggagaagatgttgctgccacgatcagtgccacagagaccctctcggaagaggagcaggaagagctaagaagagaacttgcaaaggtagaagaagaaatccagactctgtctcaagtgttagcagcaaaagagaagcatctagcagagatcaagcggaaacttggaatcaattctctacaggaactaaaacagaacattgccaaagggtggcaagacgtgacagcaacatctgcgaggagcaagcttctagcagcagaaaccgaactgctctgtcttctgtattgagagccatctgcagagctgttacaagaagacatctgaaaccttatcccaggctggacagaaggcctcagctgctttttcgtctgttggctcagtcatcaccaaaaagctggaagatgtaaaattgcaagccttttcacattcctttagtatacgttccattcagcattcaattagcatgcctgctatgagaaactccccaacttttaaatcatttgaagaaaaggtcgaaaacttaaagtctaaagtagggggaaccaagcctgctggtggtgattttggagaagtcttgaattcggctgcaaatgctagtgccaccaccacggagcctcttccagaaaagacacaggagagcctgtgagattcctacctttgttctgctacccactgccagatgctgcaagcgaggtccaagcacatcttgtcaacatgcattgccatgaatttctaccagatgtgcttttatttagctttacatattcctttgaccaaatagtttgtgggttaaacaaaatgaaaatatcttcacctctattcttgggaaacaccctttagtgtacatttatgttcctttatttaggaaacaccattataaaaacacttatagtaaatggggacattcactataatgatctaagaagctacagattgtcatagttgttttcctgctttacaaaattgctccagatctggaatgccagtttgacctttgtcttctataatatttcctttttttcccctctttgaatctctgtatatttgattcttaactaaaattgttctcttaaatattctgaatcctggtaattaaaagtttgggtgtattttctttacctccaaggaaagaactactagctacaaaaaatattttggaataagcattgttttggtataaggtacatattttggttgaagacaccagactgaagtaaacagctgtgcatccaatttattatagttttgtaagtaacaatatgtaatcaaacttctaggtgacttgagagtggaacctcctatatcattatttagcaccgtttgtgacagtaaccatttcagtgtattgtttattataccacttatatcaacttatttttcaccaggttaaaattttaatttctacaaaataacattctgaatcaagcacactgtatgttcagtaggttgaactatgaacactgtcatcaatgttcagttcaaaagcctgaaagtttagatctagaagctggtaaaaatgacaatatcaatcacattaggggaaccattgttgtcttcacttaatccatttagcactatttaaaataagcacaccaagttatatgactaatataacttgaaaattttttatactgaggggttggtgataactcttgaggatgtaatgcattaataaaaatcaactcatcattttctacttgttttcaatgtgttggaaactgtaaaatgatactgtagaacctgtctcctactttgaaaactgaatgtcagggctgagtgaatcaaagtgtctagacatatttgcatagaggccaaggtattctattctaataactgcttactcaacactaccaccttttccttatactgtatatgattatggcctacaatgttgtatttgttatttattaaattgtgattgttttattattgtttatgccaaatgttaactgccaagcttggagtgacctaaagcattttttaaaagcatggctagatttacttcagtataaattatcttatgaaaaccaaattttaaaagccacaggtgttgattgttataaaataacatgctgccattcttgattgctagagtttttgttagtactttggatgcaattaaaactatgtgctatcacatgtgaaaagcttaataaattccatctatcagtag

SEQ ID NO: 4413 - DNA, 5219 bp, Homo sapiens
  source 1..5219: mol_type = genomic DNA
acgcgcgcagccagcccttccccctccggctcccgcaccgccggccgcctcccctcgccctcctactctcccctccctgctccttcgctttttcctcctcctcctctcccggccccggctgccagcaccatgtccgcagggggagattttgggaatccactgagaaaattcaagttggtgttcttgggggagcagagcgtcgggaagacgtctctgattacgaggttcatgtacgacagcttcgacaacacataccaggcaaccattgggattgacttcttgtcaaaaaccatgtacttggaggaccgcacggtgcgactgcagctctgggacacagctggtcaggagaggttccgcagcctgatccccagctacatccgggactccacggtggctgtggtggtgtacgacatcacaaatctcaactccttccaacagacctctaagtggatcgacgacgtcaggacagagaggggcagtgatgttatcatcatgctggtgggcaacaagacggacctggctgataagaggcagataaccatcgaggagggggagcagcgcgccaaagaactgagcgtcatgttcattgagaccagtgcgaagactggctacaacgtgaagcagctttttcgacgtgtggcgtcggctctacccggaatggagaatgtccaggagaaaagcaaagaagggatgatcgacatcaagctggacaaaccccaggagcccccggccagcgagggcggctgctcctgctaatgcagagccgacctgtggcttcccatgacactccttgcttgttgtgttgcttcctattggctagcttcctaaggggggagggaaccgagttatcaagatgggaggatttttcttttctctctgtctttaggagtagggtgggatggggagggaggctgggcatcagggatcacatcactcttaacggctgttacttaaacaactattttttggtttggttgtaatatattgtactttattaagattgccaaaaactgttaaaatttaaaaaaaatttaaatcatgtgtatacaattttttgccagataaaaatgtagtcatttttatttgaaagatgtgctttttgtttttgtatatttgtaaacttatagagaaccttttccacacacctcctccttcctgttctctttgaaccattcatcacctctgccttcctcctatccccagcccaataaattaaaacaattaactgagcaaattaattaggcttcagtctggggccatctggccccactctctaggccctactccagttaaatcaaacattggttgaacacatcagcctctgaaaaggtagctctgactcttgtctttccatggccagagtgggtcgtcaacctcgtgtggagctgagaccaaggtctgtgggctctaggcagcccggcagcagcccccagaggaactgctcccacctctccttctctttccctgaaaagccttgaagggggttgagggtacaggcaaccttgtgttctctgtgccctcagggactggcagagcaagaggccatcagaaggacgaggtgctgttggcaattgcagctgcgtggtgcgtggtttatagactggggtgccatgtgtacttctgaaaatattttaaccagcccacccagcagtcagtacacatgcctgggccaagtctaagaaactcagtgtgtgatgttgggcagtgtgccatcctgaagccttcctcctggatgtcagggaagctggaccacctggagttgatcctctgtgatggggaggcgggggggggggggggtgttgtctgcagaaccaccaccttgaaagatccatgttcttagagcctcagctgctaatattgttgagtgctttctggaaaagctgatttgttgctatgttttcaccccagtggcatggcgcagttgaagtctttgtggacatatctttgtggctactgtggctgcgctgtggtcacctgaggatgtggttcaggtggggtctccagaaggctgcttgcccccagagagccatctcttccatttttgattcattcctgagaatggcttagtcctgagaatctgcaaagtctctgaagagaactctctcttcccactaagtgagtctggccaaaatgtaaaccccaccctccctgctgtcattggctctccctccaggctgctgctgggcatgtcatagatgggatgaatgaccatctggggtatggtgggctgaactccacaaggtcgttggaatgaattttgaaacttctcagaaattaatctgaaatggcaggcagtaagtgcagcagaatctggcaggactgatatttgtgcagtgggcctgccacacaccctctgcctaggaggctgtatgccagagctcatctctagcaaggaatttatcttcaggtgaagaagagaggaagcaggatcccactgagcacctcttgcagaaggcaaggaccaatgtttgaacgtgtttcagatgtcatgtgtttagtttttatatgtgtgtacataattatatatagagatagacttgtgtatacaccttccacaaacacatcctcacggagatacatgtgctcaatgtatattcttgtttctcctgctctcaagttggaacttgcattgtgataagttttggaaattcaaaagtactgcaacgtgttgaaataagaaatacttaatattgtcaaataacttgtgattgtcttgccatcaataaaataatgcatagttgtgttaaactacaggcaaacatagcccacgggaatatctccaccatttctctatgtactttatatgcacgggtgtgcatgcctgtgtgggccagtgtccccccaccatgggcacacccccaagtggtgcttgttggaagagtgcttacttacctcgagagaatttacaggagtccacatgacagtgtcctgcctggttggcagcgggggccatcacctgtggcctctgagaccgccccatttacaggaatctgcactgggtctcagtgaatgaacgtatggtagatttttattttcttggcactaaagattagcttttttaaaaaaacatcccataaaacagtagaaactcagttcccttctcaggggcacacacatccaaggcaccgtggactgtgtttccatcctggcctagaggagcagtaaaagatagcatttggtttgacatggccttagtgagtcctgcctttcctagcatgcacacaacatcctctctttgagtttgggttctccccagccccttggcctctgaggctgagggtggcttcctcccatcctcccatctcagtggttccatggcgctcccttcggcacgtgcggtttccgcccctcccttcctggggtgtggaaaggcagccagacctctttttcagaagttgttggttccctgatttttgtcttgagcaggcaccatccctgtccccttgcttgcaggtagaattggcacagagttaaggttccataataaactgttaggtgctcttgaagaagatgtcatggcattgcctcagcaccccagcaagagcattgcatctttgctgaatccagatgggttagcagagggcaaattggaggattcctttgaggaaatgttctcaattgagcaattcagtccctctccccaaagactagacgtgacctggcagattagcaggatcctcttggccttcttttttggggatggtgggagtgaagggggtgaatcttaaaagcttatcaacaaagctcctgttctgcaggcatcaggaaagttgagtgtaagatggaaaaagcaaacagcctatttacaagtggaaacacattggttctgatcactcctaacttgctgggtgatcatacatacatcaacatgaaggtgtgacatcagaatcatgagcaccatggctgcagttgtgtgatccaaggctagttggcttggtagctgttggcagcagtttcccttggtcagaggcctccttgctatctatcgctgctctcttcttgtcatccttaaacattcagtcatgttcccaggtctgaggggagcaatggccagaccagtttcagtatctctggcaacagaaacaaggattgaaatggtggtagttaagagtgcagacacatctggggtgcaacgtctgcatcatcctggtggctagccagtgcggggaggccctgccctgggataccagttgtgacaataaagggatggccctcctggcttcagcatcctgcaggtagagcagcctcattccttcacaagatggaaggcaggtgaggatgtcaggatgagatgggaccaggtagccgaggacagtgaggcatgtctgagccacttgaggggcagctgaacagaaggatgtctgtgtgcatcaaccgagcagattgtgcgcacactcgtttccgaactgcctctccccaaagaatgtgaggcattgtcaccttgttacagctatgtgaagcagagctgtcacaacttttcctgtctacaggcaggaaaaccaggatggagaagggcaacttgcttattaagatcacccagcaagttaggagtgatcagaaccagtgaagtttccatttttcatccattgctgccctgtgtgtgaacaaatgtgactccatatttattacacagcaaggactgctgtgtgtgggtgtgttcctcagaccatctctactctttttggttaggacactaggttcttcccagcatatgagtgagaatattggtggtattttgggctcctctactgcacaagggccagtccccaagtctactctgattgattgtcatgggcacccacacagatcaggacaccctttgaatttttgtttgacatgaactatttaggtgttccaaaaccttgggatctcaatgtgcaaactccttggactccagacccctgtctggttggcactcccagcagtgtgtggtttcatcaggaaatccttgcagcaggggtttagatggttccttcaggaggtgggaagcctccatagcattgaaggccagcctgcatctcgcggtgtgtgtccacttctcccctcactttcccctcacccatccctttaaagtgattggctgtgaggagcacagagggtggcaattccatctgttatgggctcagaagacatagccgccatgttgatttcacattaaactgtgtaaaatgtggaaaagactcagcatgttggtcaaacaataaactgtcctaattctc

SEQ ID NO: 4414 - DNA, 1685 bp, Homo sapiens
  source 1..1685: mol_type = genomic DNA
cgaggaaggacctggtgttttgatgaccgctgtcctgtctagcagatacttgcacggtttacagaaattcggtccctgggtcgtgtcaggaaactggaaaaaaggtcataagcatgaagcgcagttcagtttccagcggtggtgctggccgcctctccatgcaggagttaagatcccaggatgtaaataaacaaggcctctatacccctcaaaccaaagagaaaccaacctttggaaagttgagtataaacaaaccgacatctgaaagaaaagtctcgctatttggcaaaagaactagtggacatggatcccggaatagtcaacttggtatattttccagttctgagaaaatcaaggacccgagaccacttaatgacaaagcattcattcagcagtgtattcgacaactctgtgagtttcttacagaaaatggttatgcacataatgtgtccatgaaatctctacaagctccctctgttaaagacttcctgaagatcttcacatttctttatggcttcctgtgcccctcatacgaacttcctgacacaaagtttgaagaagaggttccaagaatctttaaagaccttgggtatccttttgcactatccaaaagctccatgtacacagtgggggctcctcatacatggcctcacattgtggcagccttagtttggctaatagactgcatcaagatacatactgccatgaaagaaagctcacctttatttgatgatgggcagccttggggagaagaaactgaagatggaattatgcataataagttgtttttggactacaccataaaatgctatgagagttttatgagtggtgccgacagctttgatgagatgaatgcagagctgcagtcaaaactgaaggatttatttaatgtggatgcttttaagctggaatcattagaagcaaaaaacagagcattgaatgaacagattgcaagattggaacaagaaagagaaaaagaaccgaatcgtctagagtcgttgagaaaactgaaggcttccttacaaggagatgttcaaaagtatcaggcatacatgagcaatttggagtctcattcagccattcttgaccagaaattaaatggtctcaatgaggaaattgctagagtagaactagaatgtgaaacaataaaacaggagaacactcgactacagaatatcattgacaaccagaagtactcagttgcagacattgagcgaataaatcatgaaagaaatgaattgcagcagactattaataaattaaccaaggacctggaagctgaacaacagaagttgtggaatgaggagttaaaatatgccagaggcaaagaagcgattgaaacacaattagcagagtatcacaaattggctagaaaattaaaacttattcctaaaggtgctgagaattccaaaggttatgactttgaaattaagtttaatcccgaggctggtgccaactgccttgtcaaatacagggctcaagtttatgtacctcttaaggaactcctgaatgaaactgaagaagaaattaataaagccctaaataaaaaaatgggtttggaggatactttagaacaattgaatgcaatgataacagaaagcaagagaagtgtgagaactctgaaagaagaagttcaaaagctggatgatctttaccaacaaaaaattaagaaagaaagaaagaaa

SEQ ID NO: 4415 - DNA, 2676 bp, Homo sapiens
  source 1..2676: mol_type = genomic DNA
acgcgtttcccattggtgacatcttggcgggcccggcaatggcacttcctcctctgcaccccgtgacccacgtccggctgccggtcttggatcacgaggcctccgcttcccggactccggaccccgcgcctcctcggggccgacgggccagtccctggcgtggttgagaacaaaaacatgcacctggagtttccccggagccctctgcgtggttgagcttcggtggaatttcggggctcttggctgccagccgcgcttgcctggtagcaacagaaaccagtcctgctcgcctccgtggacatttcattaccatccagaagtgtctcccactgaaggcatccgtggttgtttttaagccacaaaaaagccacacccaagatcacctgacacccaccctgacaagtgtccatgatgctgggccctgagggaggtgaaggctttgtggtcaagctccgtggcctgccctggtcctgctctgttgaggacgtgcagaacttcctctctgactgcacgattcatgatggggccgcaggtgtccatttcatctacactagagagggcaggcagagtggtgaggcttttgttgaacttggatcagaagatgatgtaaaaatggccctgaaaaaagacagggaaagcatgggacaccggtacattgaggtgttcaagtcccacagaaccgagatggattgggtgttgaagcacagtggtcccaacagtgccgacagcgccaacgatggcttcgtgcggcttcgaggactcccatttggatgcacaaaggaagaaattgttcagttcttctcagggttggaaattgtgccaaacgggatcacattgcctgtggaccccgaaggcaagattacaggggaagcgttcgtgcagtttgcctcgcaggagttagctgagaaggctctagggaaacacaaggagaggatagggcacaggtacattgaggtgtttaagagcagccaggaggaagttaggtcatactcagatccccctctgaagttcatgtccgtgcagcggccagggccctatgaccggcccgggactgccaggaggtacattggcatcgtgaagcaggcaggcctggaaaggatgaggcctggtgcctacagcacaggctacgggggctacgaggagtacagtggcctcagtgatggctacggcttcaccaccgacctgttcgggagagacctcagctactgtctctccggaatgtatgaccacagatacggcgacagtgagttcacagtgcagagcaccacaggccactgtgtccacatgaggggcctgccgtacaaagcgaccgagaacgacatttacaacttcttctctcctctcaaccctgtgagagtccatattgagattggcccagatggaagagtgacgggtgaagcagatgttgagtttgctactcatgaagaagctgtggcagctatgtccaaagacagggccaatatgcagcacagatatatagaactcttcttgaattcaacaacaggggccagcaatggggcgtatagcagccaggtgatgcaaggcatgggggtgtctgctgcccaggccacttacagtggcctggagagccagtcagtgagtggctgttacggggccggctacagtgggcagaacagcatgggtggctatgactagttttgttaggaacatttgagttacttcaatcattttcacaggcagccaacaagcaattaagagcagttataatagaggaagctgggggacccattttgcaccatgagtttgtgaaaaatctggattaaaaaattacctcttcagtgttttctcatgcaaaattttcttctagcatgtgataatgagtaaactaaaactattttcagcttttctcaattaacattttggtagtatacttcagagtgatgttatctaagtttaagtagtttaagtatgttaaatgtggatcttttacaccacatcacagtgaacacactggggagacgtgcttttttggaaaactcaaaggtgctagctccctgattcaaagaaatatttctcatgtttgttcattctagtttatattttcatttaaaatcctttaggttaagtttaagctttttaaaagttagttttgagaattgagacacaatactaatactgtaggaattggtgaggccttgacttaaaactttctttgtactgtgatttccttttgggtgtattttgctaagtgaaacttgttaaattttttgttaactaaatttttttcttaaaataaagactttttcacaatgactggcacagattactcagcaaaagatagcaaaacgggtggttgaagataattcattttaatcgtaatgtattttagtgtgaatttaaaaatttcatacatcaaatctatgatctcccttatattcttatgatgaggctaaataaaagtctaataaaaatgttaaatatgtgaatggtggaaatggtgactagcagcacacattctgggaagcatcaaatagacacacggccccagccacctgcaacttatgtgcactgttgtaaaccattcagaattttcctgctaggcccttgatgctggagtcacatctgttgatagctggagaactttagtttcaagtactacattgtgaaagcaattattttgtttctagtttttataaaatgctgatttaaactttt

SEQ ID NO: 4416 - DNA, 1672 bp, Homo sapiens
  source 1..1672: mol_type = genomic DNA
atcccgcccccgttgccgggatacgccgcggcgcacggcagttagtgggtaggcctgagagccgaggaaaactgagcgtgggcctcagaaagaagttaaggcacccgcgagccgggcaactgccctccttccgcgccggcggagcgattaaagtgaagaaacaatggccagcaatcacaaatcttcagcagctcgccctgtttcaagaggtggagttgggttaacaggaaggcctccttctgggatacgacccctatcaggaaatattcgagtggcaactgcaatgccacctgggacagcaagaccaggttctcgtggttgtcccatagggactggtggagttctgtcttctcaaatcaaagttgcccatcgccctgtaacacaacaaggtttgactggaatgaaaactgggacgaaaggtccccagaggcaaattttagacaaatcttactatcttgggcttcttagaagtaaaataagtgaacttacaactgaagttaataaacttcagaagggaatagaaatgtacaatcaagagaattcagtatatttgtcatatgaaaagagggctgagactttagctgttgagataaaagagcttcaaggacaactagcagactacaacatgttggtagataaacttaataccaacactgaaatggaagaagtaatgaatgattacaatatgcttaaagctcaaaatgatcgagaaacacaaagtttggatgtcatatttactgaaagacaagcgaaagaaaaacaaatcagaagtgtcgaagaagaaattgaacaggaaaaacaagcaacagatgacattatcaaaaatatgtcttttgaaaaccaagtcaagtacctagagatgaaaaccacaaatgagaaactgttacaggaattagatacacttcaacaacaattggattcacagaacatgaaaaaagagagcctggaagcagaaatagctcactcccaggtgaaacaggaggcggtattgctgcatgaaaaactttatgagttggagtcccatcgagatcaaatgattgcagaagacaaaagcataggatctccaatggaagagagagagaaattacttaagcagattaaagatgataatcaggaaatagccagcatggaaagacagttaacagatacaaaagaaaagataaatcagtttattgaagaaattagacaacttgacatggatttagaggaacaccaaggtgaaatgaaccagaaatacaaggagctaaagaaaagggaggaacatatggacacttttattgagacttttgaggaaacaaagaatcaggaactgaaacgaaaggcacagatagaagccaacattgttgcactcttggagcactgcagtcgaaatataaatcgtatagaacagatatcctctatcaccaatcaagagctaaagatgatgcaggatgacctcaattttaaatctactgaagtgcagaaatcacaaagtacagctcagaatttgacttcagacattcaacgtctgcagttggatctgcagaaaatggagcttctagaaagtaagatgactgaagaacagcattctctaaaaagcaaaattaagcaaatgacaactgatctggagatatataatgatttgccagctttaaaatcatcaggtgaaaaaaaaaaaaaaaaaaaaaaaaaa

SEQ ID NO: 4417 - DNA, 1892 bp, Homo sapiens
  source 1..1892: mol_type = genomic DNA
agtttcgggtggcccagccaactttcatgccagccgtcctcagcccttcctggtgctgggtctgccaggctcatggtcagccaggcctggggccctggagaggtcctctgcatcttgaattctgtggagcaccatgacttgtggatcttactgtggtggccgcgccttcagctgcatctcggcctgcgggccccggcccggccgctgctgcatcaccgccgccccctaccgtggcatctcctgctaccgcggcctcaccgggggcttcggcagccacagcgtgtgcggaggctttcgggccggctcctgcggacgcagcttcggctaccgctccgggggcgtgtgcgggcccagtcccccatgcatcaccaccgtgtcggtcaacgagagcctcctcacgcccctcaacctggagatcgaccccaacgcgcagtgcgtgaagcaggaggagaaggagcagatcaagtccctcaacagcaggttcgcggccttcatcgacaaggtgcgcttcctggagcagcagaacaaactgctggagacaaagctgcagttctaccagaaccgcgagtgttgccagagcaacctggagcccctgtttgagggctacatcgagactctgcggcgggaggccgagtgcgtggaggccgacagcgggaggctggcctcagagcttaaccacgtgcaggaggtgctggagggctacaagaagaagtatgaggaggaggtttctctgagagcaacagctgagaacgagtttgtggctctgaagaaggatgtggactgcgcctacctccgcaaatcagacctggaggccaatgtggaggccctgatccaggagatcgacttcctgaggcggctgtatgaggaggagatccgcgttctccagtcccacatctcagacacctccgtggttgtcaagctggacaacagccgggacctgaacatggactgcatcattgccgagatcaaggcacagtacgatgacattgtcacccgtagccgggctgaggccgagtcctggtaccgcagcaagtgtgaggagatgaaggccacggtgatcaggcacggggagaccctgcgccgcaccaaggaggagatcaacgagctgaaccgcatgatccagaggctgacggctgaggtggagaatgccaagtgccagaattccaagctggaggctgcggtggctcagtctgagcagcagggtgaggcggccctcagcgatgcccgctgcaagttggccgagctggagggtgccctgcagaaggccaagcaggacatggcctgcctgatcagggagtaccaggaggtgatgaactccaagctgggcctggacatcgagatcgccacctacaggcgcctgctggagggcgaggagcagaggctgtgcgagggcgtcggctcggtgaatgtctgcgtcagcagctcccgcggtggcgttgtctgtggcgatctctgcgcctccactactgcccctgttgtctccaccagagtcagtagcgtccccagcaacagcaacgtggtggtgggcactactaacgcctgcgccccctccgcccgggttggcgtctgcggcggcagctgtaagaggtgctaggaggctgccgcctccgccagcgcctgtcgccgtcactctccacccagccagtacctcgcgccaccagaacgcgccgcccgcgccggcctcccaatagccgccgcccgctgcctgcactctaagcgccctccccaccgctccgctccgggagccatccccggtcgcaggagtccggggagggccgggaggcgccatggtctctctctgtagcctttcctggtagtcaatttgttgtcccgaggattcatctttttcttccgcctgccttctgttttttttgctgtatacattggtcttg

SEQ ID NO: 4418 - DNA, 2502 bp, Homo sapiens
  source 1..2502: mol_type = genomic DNA
atgtgtaccatgcataaagatgaaaaggcgaagcgagaagtgtcttcctggactgtggaaggtgatattaatactgacccatgggcaggttatcgatatactggtaaactcagaccacattatccactgatgccaacaaggccagtgccaagttatattcaaagaccagattatgctgatcatcccttaggaatgtctgaatctgaacaggctcttaaaggtacttctcagattaaattactctcatctgaagatatagaagggatgcgacttgtatgtaggcttgctagagaagttttggatgttgctgccggcatgattaaaccaggtgtaactactgaagaaatagatcacgctgtacacttagcatgtattgcaagaaattgctacccttctcccctgaattattataatttcccaaagtcttgttgtacctcagtgaatgaagtcatttgccatggaataccagacagaaggcccttacaagaaggtgacattgttaatgtggatatcactctttatcgcaatggttatcatggggacctgaatgagacattttttgttggagaagtggatgatggagcacggaaacttgttcagaccacatatgagtgcctgatgcaagccattgatgcagtgaagcctggtgttcggtacagagaattgggaaacattatccagaagcatgcccaagcaaatgggttttcagttgttcgaagctattgtgggcatggaatccacaagctttttcatacagctcccaatgtaccccactatgctaaaaataaagcagttggagtgatgaagtcgggccatgtatttacaattgagccaatgatttgtgaaggcggatggcaggatgaaacctggccagatggttggactgcggtgacaagagacggaaagcggtctgctcagtttgagcacaccctcctggtcacagacactggctgtgaaatcctaacccggcgacttgacagtgcacggcctcacttcatgtctcaattttaatttctcccaagatggcacatctcagtaccttcttactgtgctatgcattttattgagagtacagaaaggaagaggaacctttttttaatcacttgttttgttttgactatagataagaaaggactacagcatttgatgtgtgtcctcaagaacttgtcttgggtctgaaaaagctgagaagaataaaggaaacattgctcaactcttcagccccctccccctgcacacctgttttctcatttgccctttgagcacttttacttaaacttgcttgtagttgcttttatcactgccgcaaaacagccatcaagagccatctgctttccaggtgaacattggaaatgagaatctttgaaacttagcaatatgtgttgcaccagattttttaaattatatatatggaaatatatatgtatacattttaagttctgtatacataattaccaaacactatgtgacctggagtttgtgttgtttctgctctgacaggtttatatgttcttacaaatggatccatagtttgcagtgatttaattcctggttgggatttggcctcccctctcccccatgctaattatttacccttgtaattgtgcatagggaagcactcacccaatgagactttctccaatgtggactctgtgtgtcagtgaatgaatgtagtaaaattcactttggaaggttatcaggcttttaaaaatctagtttatggcaaaaatagccattttccaagtggtggctgactgttgcagggaatgagaatttcataatacactgctatttcagacctctgtttggtcagaaatggaaaagaaaaagccccctttcttcccttttctgttttacttcaagggcataccttggaggtgctcagagaagcgtgaagtttgcactatggtggaggatggggaaagagttctaaagtgtctccagctgtgaacccaggaggtcaagtgggctattaaaatctaacgttgagtaaatgtgatagtgatgagaaaggaattttgtgtactgtaaccttgcagtagagatgcagctgtccttcgtgtgtggaaacacacctctcctttacatagttgggaacctcattagaaatgacctcagctgccccatatctacgttcctttcagcagttgtccaagtaggagtgtatccagtgaagacatatcaaatcacaaagtcattgtcattagagtgtacttgattactgggcatccttgtaatataatttcataccactgacacattatacttgtaagagaacatctttcccagagtgcctcagaccttattgctttaaaatataataatgttttcattacttttattatttgaatgatttagtaaagttgactgaatctggtatagactttgggagtatgtgtgtgaagtttttatcaaactgtaatatttgtgaatggaatgccttgcaatatgaatgttaatataatgtgtaaagggagattaaaaagtttgaatgattatcct

SEQ ID NO: 4419 - DNA, 3270 bp, Homo sapiens
  source 1..3270: mol_type = genomic DNA
attgcatgtaaaatgggacaggaacacgcacctcggttcatgtgcttgaggagtgtttagtgagcacctgctatgcgccaggcctttgggcagtggacacagggatatggccgggatgatagacaggttcagccctgccaacacaggcatccggtcttgggatgtcgatcctggcgtctgcaaccttgatgaacagctcaaggtctttgtgtcccgacactctgccaccttctccagcattgtgaaaggccagcggagcctgcaccaccgtggagacaacctggagaccctggtcctcctgaacccatcagacaagtccctgtatgatgagctccggaaccttctgttggaccctgcctctcacaagctactggtgttggctgggccctgcctggaggagacgggggagctgctgctacagacagggggcttctcgcctcaccacttcctccaggtcctgaaggacagagagatccgggacatcctggccaccacgcccccacctgtgcagccgcccatactcaccatcacctgccccaccttcggtgactgggctcagctggcacccgctgtgcctggccttcagggggcgctccggctccagctgcggctgaaccccccggcgcagctgcccaactctgagggcctgtgcgaattcctggagtacgtggctgagtctctggagccaccgtcccccttcgagctgctggagcccccgacctccgggggcttcctcaggctgggccggccctgctgctacatcttccctggaggcctcggggatgccgccttcttcgccgtcaatggcttcactgtgctggtcaacggtggctcaaaccccaagtccagtttctggaagctggtgcggcacctggaccgcgtggatgccgtgctggtgacccaccctggcgccgacagcctccccggcctcaacagcctgctgcggcgcaaactggcggagcgctccgaggtggctgctggtgggggctcctgggacgacaggctgcgcaggctcatctcccccaacctgggggtcgtgttcttcaacgcctgcgaggccgcgtcgcggctggcgcgcggcgaggatgaggcggagctggcgctgagcctcctggcgcagctgggcatcacgcctctgccactcagccgcggccccgtgccagccaaacccaccgtgctcttcgagaagatgggcgtgggccggctggacatgtatgtgctgcacccgccctccgccggcgccgagcgcacgctggcctctgtgtgcgccctgctggtgtggcaccccgccggccccggcgagaaggtggtgcgcgtgctgttccccggttgcaccccgcccgcctgcctcctggacggcctggtccgcctgcagcacttgaggttcctgcgagagcccgtggtgacgccccaggacctggaggggccggggcgagccgagagcaaagagagcgtgggctcccgggacagctcgaagagagagggcctcctggccacccaccctagacctggccaggagcgccctggggtggcccgcaaggagccagcacgggctgaggccccacgcaagactgagaaagaagccaagaccccccgggagttgaagaaagaccccaaaccgagtgtctcccggacccagccgcgggaggtgcgccgggcagcctcttctgtgcccaacctcaagaagacgaatgcccaggcggcacccaagccccgcaaagcgcccagcacgtcccactctggcttcccgccggtggcaaatggaccccgcagcccgcccagcctccgatgtggagaagccagcccccccagtgcagcctgcggctctccggcctcccagctggtggccacgcccagcctggagctggggccgatcccagccggggaggagaaggcactggagctgcctttggccgccagctcaatcccaaggccacgcacaccctcccctgagtcccaccggagccccgcagagggcagcgagcggctgtcgctgagcccactgcggggcggggaggccgggccagacgcctcacccacagtgaccacacccacggtgaccacgccctcactacccgcagaggtgggctccccgcactcgaccgaggtggacgagtccctgtcggtgtcctttgagcaggtgctgccgccatccgcccccaccagtgaggctgggctgagcctcccgctgcgtggcccccgggcgcggcgctcggcttccccacacgatgtggacctgtgcctggtgtcaccctgtgaatttgagcatcgcaaggcggtgccaatggcaccggcacctgcgtcccccggcagctcgaatgacagcagtgcccggtcacaggaacgggcaggtgggctgggggccgaggagacgccacccacatcggtcagcgagtccctgcccaccctgtctgactcggatcccgtgcccctggcccccggtgcggcagactcagacgaagacacagagggctttggagtccctcgccacgaccctttgcctgaccccctcaaggtccccccaccactgcctgacccatccagcatctgcatggtggaccccgagatgctgccccccaagacagcacggcaaacggagaacgtcagccgcacccggaagcccctggcccgccccaactcacgcgctgccgcccccaaagccactccagtggctgctgccaaaaccaaggggcttgctggtggggaccgtgccagccgaccactcagtgcccggagtgagcccagtgagaagggaggccgggcacccctgtccagaaagtcctcaacccccaagactgccactcgaggcccgtcggggtcagccagcagccggcccggggtgtcagccaccccacccaagtccccggtctacctggacctggcctacctgcccagcgggagcagcgcccacctggtggatgaggagttcttccagcgcgtgcgcgcgctctgctacgtcatcagtggccaggaccagcgcaaggaggaaggcatgcgggccgtcctggacgcgctactggccagcaagcagcattgggaccgtgacctgcaggtgaccctgatccccactttcgactcggtggccatgcatacgtggtacgcagagacgcacgcccggcaccaggcgctgggcatcacggtgttgggcagcaacagcatggtgtccatgcaggatgacgccttcccggcctgcaaggtggagttctagccccatcgccgacacgccccccactcagcccagcccgcctgtccctagattcagccacatca

SEQ ID NO: 4420 - DNA, 2627 bp, Homo sapiens
  source 1..2627: mol_type = genomic DNA
attttggctgcctctgtcggtctgttcagttaccacgtgaaccgccgacggagacccgtagtgggggaggcggcggcagcgttaagtgagaaaggattaacattgaactgtttggggaaaaaggaagaagcttatgaattggttcgtagaggtttgagaaatgacttgaagagtcatgtgtgttggcacgtttatggccttcttcagaggtcagacaagaagtatgatgaagccattaagtgttacagaaatgcactaaaatgggataaagacaatcttcaaatcttaagggacctttccttactacagattcaaatgcgagatcttgagggttacagggaaacgaggtatcagttacttcagcttcgacctgcgcagagagcatcatggattggttatgctattgcttaccatttattagaagattatgaaatggcagcaaagattttagaagaatttaggaaaacacaacagacatcccctgacaaggtggattatgaatatagtgaactactcttatatcagaatcaagttcttcgggaagcaggtctctatagagaagctttggaacatctttgtacctatgaaaagcagatttgtgataaacttgctgtagaagaaaccaaaggggaacttctgttgcaactatgtcgtttggaagatgctgcagatgtttatagaggattgcaagagagaaatcctgaaaactgggcctattacaaaggcttggaaaaagcactcaagccagctaatatgttagaacggctaaaaatttatgaggaagcctggactaaatatcccaggggactggtgccaagaaggctgccgttaaactttttatctggtgagaagtttaaagaatgtttggataagttcctaaggatgaatttcagcaagggttgcccaccagtcttcaatactttaagatcattatacaaagacaaagaaaaggtggcaatcatagaagagttagtagtaggttatgaaacctctctaaaaagctgccggttatttaaccccaatgatgatggaaaggaggaaccaccaaccacattactttgggtccagtactacttggcacaacattatgacaaaattggtcagccatctattgctttggagtacataaatactgctattgaaagtacacctacattaatagaactctttctcgtgaaagctaaaatctataagcatgctggaaatattaaagaagctgcaaggtggatggatgaggcccaggccttggacacagcagacagatttatcaactccaaatgtgcaaaatacatgctaaaagccaacctgattaaagaagctgaagaaatgtgctcaaagtttacaagggaaggaacatcagcggtagagaatttgaatgaaatgcagtgcatgtggttccaaacagaatgtgcccaggcttataaagcaatgaataaatttggtgaagcacttaagaaatgtcatgagattgagagacattttatagaaatcactgatgaccagtttgactttcatacatactgtatgaggaagattacccttagatcatatgtggacttattaaaactagaagatgtacttcgacagcatccattttacttcaaggcagcaagaattgctatagagatctatttgaagcttcatgacaacccccttacagatgagaataaagaacacgaagctgatacagcaaacatgtctgacaaagagctaaagaagctacgtaataaacaaagaagagctcaaaagaaagcccagatagaagaagagaaaaaaaatgcagaaaaagaaaagcagcagagaaatcagaaaaagaagaaggatgatgatgatgaggagataggaggtccaaaagaagaacttattccagagaaactggccaaggttgaaactccattggaagaagctattaaatttttaacaccgttgaagaacttggtgaagaacaagatagagactcatctttttgcctttgagatttactttaggaaagaaaagtttcttttgatgctacaatcagtaaagagggcatttgctattgattctagtcatccctggcttcatgagtgtatgattcgtctctttaatactgcagtgtgtgaaagtaaagatttatctgatacagttagaacagtattaaaacaagaaatgaatcgtctttttggagcaacgaatccaaagaattttaatgaaacttttctgaaaaggaattctgattcattgccacacagattatcagctgccaaaatggtatattacttagatccttctagtcagaagcgagctatagagttggcaacaacacttgatgaatctctcactaacagaaacctccagacatgtatggaggtattggaagccttgtatgatggtagcctaggagactgtaaagaagctgctgaaatttatagagcaaattgtcataagcttttcccttatgctttggctttcatgcctcctggatatgaagaggatatgaagatcacagttaatggagatagttctgcagaagctgaagaactggccaatgaaatttgaacatcactaaacaagcaaatggaatgactttggaccatatctagtatataatatttttgtcacgcacctgctgcattgctctaacttac

SEQ ID NO: 4421 - DNA, 582 bp, Homo sapiens
  source 1..582: mol_type = genomic DNA
agcgccggtcggaggcggtcggcggaggtgtctaccccgccggtgatggcgttgaacgccactggcttcccggccttccgtccgctgcctccgtccgattctgcgtctgcttgctgaggaggcggattaggggggcgcggagtctcttcccttgagtgcataggtcccggttggtagagggtttgagtccgcatcgccacagctgaaggctgcgagggactaagagcagagaagatgcaagagttagaattataatgcaactttatgtaagaagcagaagttcttccaagaagaggttgagactttaatgtagcatgacacattgaggccacttcggctggtcagcagtgtttgtgaacagtgtgtcaagtcacctgaccaagcagagatatatctttagaaatgagttgcacaattgagaaggcacttgccgacgctaaagctcttgttgaaagattaagagatcatgacgatgcagcagaatctctgattgagcaaaccacagctctcaacaagcgagtagaagccatgaaacagtatcaggaagaaattcaagaacttaatgaagtcgcgagacatcgg

SEQ ID NO: 4422 - DNA, 1558 bp, Homo sapiens
  source 1..1558: mol_type = genomic DNA
gcgctcgtggggaaaaggcagggagggggtggtgtccccagccggtttggggggtgcgttgcccggagacggaaagtttgggagcccgagcaggctcggctgcagcctcggggagggggtccagcgggtggcggccctggggatggggaaggagcaggagctgctggaggcggcccgcaccgggcacctcccggcggtggagaagctgctgtccgggaagcggctctcctcaggctttgggggcggcggcggcggtggctctgggggcggcggcggcggcagcggcggcggcggcggcggcctcggctcttccagccaccccctctccagtctgctcagcatgtggagagggccaaatgtgaactgtgttgacagcactggctacacacccctgcaccatgctgctttgaatggccataaggatgtggtcgaggttcttctgaggaacgatgcgctgaccaacgtggctgactcaaaaggctgctaccctctgcatttggcagcctggaaaggagatgcccagatagtgcggttgctcatccatcaagggccttcacacaccagagtcaatgaacagaacaatgacaacgagacagccctgcattgtgcagcgcagtatggccacacagaggtggtgaaggtgctcttagaggagctgacggaccccaccatgcgcaacaacaaattcgagacccctttggacctggcagcactgtacgggcgactggaggtggtgaaaatgctccttaatgcacaccccaacctcctgagctgcaacactaagaagcacacccctctgcacttggcagcaaggaatggccacaaagccgtggtccaggtcctcctcgatgctggcatggacagcaactaccagacggagatgggcagtgctttgcatgaggctgctttgtttggcaagaccgatgtggtgcaaatcctgctggctgcaggaactgacgtcaacataaaagataaccatggactgactgccctagacactgttcgggaactgccttctcaaaagagccagcaaatagcagcattaattgaagatcacatgactggaaaaagaagtacaaaagaagtagataaaacccccccaccccagccacctctcatctccagtatggactccatatcacagaagtctcagggtgacgtggagaaagcagtgactgaactgattatagattttgatgcaaatgctgaagaagagggtccctacgaagctctgtataatgccatctcctgccattcgttggacagcatggccagcgggcgatcatctgaccaagactccacgaacaaggaggctgaggcagcaggagtgaaacctgctggagtgaggcctagggaacgtccaccacctccagcaaagccaccgcccgatgaagaggaagaagaccacatagataagaagtattttcccttgacagcttctgaggttctgtccatgagacctaggattcatgggagtgcagcccgggaagaagacgaacacccttatgaactgttgttaacagcagagacaaaaaaaaaaaaaaaaaaaaaaaaaaaa

SEQ ID NO: 4423 - DNA, 3715 bp, Homo sapiens
  source 1..3715: mol_type = genomic DNA
gccgccgccgccgccgccgccgcgccgcggcttgagggcgggaggctgggggagggtagcggagccggcgccgccgccatgttgggtctgaagcggctgctgtaggcgccgacggagcgagcgggcgtgcggagcgggcgacagtggcgtgggatctgcctctctgcgagcagctgggagcggcggcggcggcgccatgagcgggggcaccccttacatcggcagcaagatcagcctcatctccaaggcggagatccgctacgagggcatcctctacaccatcgacaccgaaaactccaccgtagcccttgccaaagttcgatcctttggtacagaagacagaccgacagatcgtccaataccacctcgagatgaagtctttgaatacattatattccgtgggagtgacattaaagaccttactgtttgtgagccaccaaaaccacagtgttctttgcctcaagacccagctattgttcagtcctcactaggctcatcgacttcttcattccagtccatgggttcttatggacctttcggcaggatgcccacatacagtcagttcagtccgagttccttagttgggcagcagtttggtgctgttggtgttgctggaagctctttgacatcctttggaacagaaacatcaaacagtggtaccttaccccaaagtagtgcggttggttctgcctttacacaggatacaagatctctaaaaacacagttatctcaaggtcgctcaagccctcagttagaccctttgagaaaaagcccaaccatggaacaagcagtgcagaccgcctcagcccacttacctgctccagcagctgttgggagaaggagtcctgtatcaaccaggcctttgccatctgccagccaaaaggcaggagagaatcaggagcacaggcgagctgaagtacacaaagtttcaaggccagaaaatgagcaactcagaaatgataacaagagacaagtagctccaggtgctccttcagctccaaggagagggcgtgggggtcatcggggtggcaggggaagatttggtattcggcgagatgggccaatgaaatttgagaaagactttgactttgaaagtgcaaatgcacaattcaacaaggaagagattgacagagagtttcataataaacttaaattaaaagaagataaacttgagaaacaggagaagcctgtaaatggtgaagataaaggagactcaggagttgatacccaaaacagtgaaggaaatgccgatgaagaagatccacttggacctaattgctattatgacaaaactaaatccttctttgataatatttcttgtgatgacaatagagaacggagaccaacctgggctgaagaaagaagattaaatgctgaaacatttggaatcccacttcgtccaaaccgtggccgtgggggatacagaggcagaggaggtcttggtttccgtggtggcagagggcgtggtggtggcagaggtggtaccttcactgcccctcgaggatttcgcggtggattcagaggaggtcgtgggggccgggagtttgcggattttgaatataggaaagacaacaaagttgctgcatagtctacaaacaagtctctgaaaataggtgaatttctagctcttcatggtcctgaacattgatttcagtctttgcaaagaatgaagaagtgaattcgctgtacatttgtcaccagcactgggtttttgttttttgtttgtttttccgcttaatttcaaagataaaatgcagttacttttgggggtggaaggctcatcttaaaacatgagcattaaatatatttggaatagcagaaggttaagtaatttcttatgtatagttaaactaaagcagtacttcagtgggacttaacaagtattttttcatcactgaaaggttttttttttttatcactaaattgtatttggcaattgcaagttgcctgcagatagggccgtgatactgtgttttgagccacagaaggttgtgtgtgtgtgtgtgtgtgtgtgtgtgtgtgtgtgtgtatgtgtgtgtctttttcctcctttcttttggggaatcctgtaatatgaggtagcttatttcgtcaattaattagggtgctggatggtagagaattttgtcagtcaactatgtacacacagtaaatactgtttcttaggcaaaggtaacttttttatatagttgtaaaattccattatattccattgccaaagaaacattaagaactttgtatagctgtataaaaagcaactaattttttaaagaataaacattttaaagtcagcaaacatactgtgtccttgcagaagttgatgtgctgagcagcagccttatgggtgggtctttttttcttagttttccaggcttaacatttttgattttgttttttaatgtttggaacataaatgaagatttgatacattatttcattatctaaaaaggattaattattcatgctcattgtaagaacttcattttgtagcaaatggcatatcacaggatctgtccagataatcgatattttcagtatacaaatgtaaataatcacagatgagaatgtacttagctgtattttcaaataagtaatcttccccccttttgtaggactttaaaactaggcatcaatgaacctgtttttcctattatgcctggaatttagtcatgataccttgactcattccatcatatttcaagaggattcagagtgctagaaattattttggtagcctgtaacacacggcaacactggtccttgggcctatgatgacccacagatgactcagtatagagttcattgctaattataaattactagtgaatctttttgatattttaagctctagtgggaaaaatctggccacttttgtgtttttatgaaggccatggaataaaaggatccaaagatttaaatatttttatctaatattttgattgttttcttaactttctccttaaaacattcagtagtgataaagatatagaaactgcactgtaggagaattggaatatttaaggctggttgacattttttattttcattttatatcttttgtatagctctacaaggcagtgttttgtaatttggtttcattatgaagatccagtacttggcagccatagtttagacaatattgttcagtgctgtttgcttgcatgttaacaacaaaaccttttagaggacccacaaatcatgatattgaacacagttccgaggcattcagagcatcagagcaagtaccatggcaatacatgtgtagactgttggagatgtcccgggccaatttcaagaaagaaaactgtaaatactagttctacttgctctgaaattatgagtttatgcgttttcccagccctccgaatcactgactggggcgttttgtgccccagcaataactggcagcatggcatacctgcagtaccccttacaatattaaagcaaagtttttattctaaaacagaataaaactgttcaataaaaaatgctcgtcaaagttctttctctttaaatagtaacattctgtttcagtaggaacataatgaaaggaatcttttaaatggaagagcggaattataatgtttgtattccctgtaataactataaatcagttactttatttctaagattgagttattgttgcagatgtttagggaaagctaaaagccccttccttcccctcctgtgtgtaaataaaatacttctgagatca

SEQ ID NO: 4424 - DNA, 2186 bp, Homo sapiens
  source 1..2186: mol_type = genomic DNA
gggccggagccggagcccaagccagagcggcgcggcctggaagaggccagggcccgggggaggcggcggcagcggcggcggctggggcagcccgggcagcccgagccccgcagcctgggcctgtgctcggcgccatgagcggcggcgggccttcgggaggcggccctgggggctcgggcagggcgcggactagctcgttcgcggagcccggcggcggaggcggaggaggcggcggcggccccggaggctcggcctccggcccaggcggcaccggcggcggaaaggcatctgtcggggccatgggtgggggcgtcggggcctcgagctccgggggtggacccggcggcagcggcggaggaggcagcggaggccccggcgcaggcactagcttcccgccgcccggggtgaagctgggccgtgacagcgggaaggtgaccacagtcgtagccactctaggccaaggcccagagcgctcccaagaagtggcttacacggacatcaaagtgattggcaatggctcatttggggtcgtgtaccaggcacggctggcagagaccagggaactagtcgccatcaagaaggttctccaggacaagaggttcaagaaccgagagctgcagatcatgcgtaagctggaccactgcaatattgtgaggctgagatactttttctactccagtggcgagaagaaagacgagctttacctaaatctggtgctggaatatgtgcccgagacagtgtaccgggtggcccgccacttcaccaaggccaagttgaccatccctatcctctatgtcaaggtgtacatgtaccagctcttccgcagcttggcctacatccactcccagggcgtgtgtcaccgcgacatcaagccccagaacctgctggtggaccctgacactgctgtcctcaagctctgcgattttggcagtgcaaagcagttggtccgaggggagcccaatgtctcctacatctgttctcgctactaccgggccccagagctcatctttggagccactgattacacctcatccatcgatgtttggtcagctggctgtgtactggcagagctcctcttgggccagcccatcttccctggggacagtggggtggaccagctggtggagatcatcaaggtgctgggaacaccaacccgggaacaaatccgagagatgaaccccaactacacggagttcaagttccctcagattaaagctcacccctggacaaaggtgttcaaatctcgaacgccgccagaggccatcgcgctctgctctagcctgctggagtacaccccatcctcaaggctctccccactagaggcctgtgcgcacagcttctttgatgaactgcgatgtctgggaacccagctgcctaacaaccgcccacttccccctctcttcaacttcagtgctggtgaactctccatccaaccgtctctcaacgccattcttatccctcctcacttgaggtccccagcgggcactaccaccctcaccccgtcctcacaagctttaactgagactccgaccagctcagactggcagtcgaccgatgccacacctaccctcactaactcctcctgagggccccaccaagcacccttccacttccatctgggagccccaagaggggctgggaaggggggccatagcccatcaagctcctgccctggctgggcccctagactagagggcagaggtaaatgagtccctgtccccacctccagtccctccctcaccagcctcacccctgtggtgggctttttaagaggattttaactggttgtggggagggaagagaaggacagggtgttggggggatgaggacctcctacccccttggccccctcccctcccccagacctccacctcctccagaccccctcccctcctgtgtcccttgtaaatagaaccagcccagcccgtctcctcttcccttccctggcccccgggtgtaaatagattgttataatttttttcttaaagaaaacgtcgattcgcaccgtccaacctggccccgcccctcctacagctgtaactcccctcctgtcctctgcccccaaggtctactccctcctcaccccaccctggagggccaggggagtggagagagctcctgatgtcttagtttccacagtaaggtttgcctgtgtacagacctccgttcaataaattattggcatg

SEQ ID NO: 4425 - DNA, 1093 bp, Homo sapiens
  source 1..1093: mol_type = genomic DNA
aatggagaagcaaatggcaaggatggttaccttggctaccaagataaagaaccttgaaaagggaagaagatgaaatcagcttcggatatcaggcaggcagctgggtctgtgggtcagaggcttaaggatggatgcagagcatccggaactcaggagttacgctcagagccaaggttggtggacgggagagggcgagttcaatttttccgaagtcttttctccagttgaggatcatctagactgcggtgctggcaaagacagcttagaaaaacaagaagaaagcatcacagtgcagactatgatgaacaccttacgggacaaagccagcggagtgtgcatagactctgagtttttcctcaccacagccagtggagtgtctgtcctgccgcagaatagaagctctccgtgcattcactacttcactggaacccctgatccttccaggtccatattcaagcctttcatctttgttgatgacgtaaaacttgtccccaaaacacagtctccctgttttggggatgacgaccctgccaaaaaggagcctcggttccaggagaaaccagaccgccggcatgagctgtacaaagcccacgagtgggcacgtgccatcatcgaaagtgaccaggagcaaggtcgcaagctgaggagcaccatgctggagctggagaagcaaggcctggaagccatggaagaaatcctgaccagctccgagccactggaccctgcggaagtgggggaccttttctatgactgtgttgacacggagattaagttctttaagtgaagtaagcgttccctttccccttcttatttaagacttcccaccttactaaattaccagcaaaacaaaccactctcctgtttgagtaaaatgagaaagttaatatgtggcctccttttctgaagccagatcaaactgttaccttgtgttccaccttgaatctcacagcgtccccttctgcaatgtaggtctccttcctgtgcagtgtaacatgtatcccgttgcctgttgttcggttgtgtgactaattgtggattttaagctgctattattgtatttcagtggcaatggacacattagccttttacaaga

SEQ ID NO: 4426 - DNA, 914 bp, Homo sapiens
  source 1..914: mol_type = genomic DNA
acgcccgcggcgccggctggggcatcaccgcgggcctcgaccccgaaatggcgctgctggccgaacacttgctgaagccgctgcccgcggacaagcagatcgagaccgggcccttcctcgaggcggtgtcccacctgccgcccttcttcgattgccttgggtccccagtgtttactcccatcaaggcagacataagcggcaacatcacgaaaatcaaagctgtgtacgacaccaacccagccaagttccggaccctgcagaacatcctggaggtggagaaagaaataggcctccgcttcatccaggtcttcctccagagcatctgcgacggggagcgggacgagaaccaccccaacctcatccgtgtcaacgccaccaaggcctacgagatggccctcaagaagtaccatggctggatcgtgcagaagatcttccaggcagcactgtacgcagcaccctataagtctgacttcctgaaagcgctctccaaggggcagaatgttacggaggaggagtgcctggagaagatccgcctcttcctagtcaactacacggcgaccatcgatgtcatctacgagatgtacacccagatgaacgctgagcttaactacaaggtgtaggcatgcccactgctggacacgtccccgactcgtggccacatggagaaacaggcaaaccagaatcactgtgaatcaagtcggtgaactgcccctggcctgtgtcccccagagcagcccagggtcctgccagagtctgcaggggacagccctcgttttttaagtcttttttttttttttttttggtctattctaaaggaccagtaaataatgatcttacttccaaatctccttggaatttcacgacagcacagactgactttataccttcatttcagcgtggtaaaaaccgattaa

SEQ ID NO: 4427 - DNA, 1391 bp, Homo sapiens
  source 1..1391: mol_type = genomic DNA
atgctcagtagctgaggtagggatgccatccttctcaaaagacttattgacagtgccaaagctcggtactggacacaacgagggacctgggtctacgataacgcgcttttgctcctcctgaagtgtctttggtccaacgttgttccaggtttgtcaccgtttctctccggccggtcagggcaagagccagacctgtgcaacagacctgcagaccaaagctgaccgattggcacagatgagcatatgttcttcattggcccggaaattccccaaactcacaattataggggaagaggatctgccttctgaggaagtggatcaagagctgattgaagacagtcagtgggaagaaatactgaagcaaccatgcccatcgcagtacagtgctattaaagaagaagatctcgtggtctgggttgatcctctggatggaaccaaggaatataccgaaggtcttcttgacaatgtaacagttcttattggaattgcttatgaaggaaaagccatagcaggagttattaaccagccatattacaactatgaggcaggaccagatgctgtgttggggaggacaatctggggagttttaggtttaggcgcctttgggtttcagctgaaagaagtccctgctgggaaacacattatcacaactactcgatcccatagcaacaagttggttactgactgtgttgctgctatgaaccccgatgctgtgctgcgagtaggaggagcaggaaataagattattcagctgattgaaggcaaagcctctgcttatgtatttgcaagtcctggttgtaagaagtgggatacttgtgctccagaagttattttacatgctgtgggaggcaagttaaccgatatccatgggaatgttcttcagtaccacaaggatgtgaagcatatgaactctgcaggagtcctggccacactgaggaattatgactactatgcaagccgagttccagaatctattaaaaatgcacttgttccttaaaggaaagtttcatttggccgggcgcggtggctcatgcctgtaatcccagcactttgggaggccgaggcaggtggatcacttgagctcaggagtttgagaccagcctgggcaatatcgtgagaccccatctctacaaaaatacaaattaactgggcatcctgtcatgcgcctgtcatcccagctacttgagaggctgaagcagaagaatctcttgagcccggaaggcagaggttgcagtgagctgagatcgtgccactgcactccagcctgagtgacaggagttaagccctgtctcagaaaaaaaaaaaacaaaaacccaaaaagtacttaaagtttcatttacttagctaggagaaagacttggttctcaaaataatacattttaagattaatt

SEQ ID NO: 4428 - DNA, 1988 bp, Homo sapiens
  source 1..1988: mol_type = genomic DNA
atgggtgcctacctctcccagcccaacacggtgaagtgctccggggacggggtcggcgtctccatggaggatgctcacaactgtattcctgagctggacagtgagacagccatgttttctgtctacgatggacatggaggggaggaagttgccttgtactgtgccaaatatcttcctgatatcatcaaagatcagaaggcctacaaggaaggcaagctacagaaggctttagaagatgccttcttggctattgacgccaaattgaccactgaagaagtcattaaagagctggcacagattgcagggcgacccactgaggatgaagatgaaaaagaaaaagtagctgatgaagatgatgtggacaatgaggaggctgcactgctgcatgaagaggctaccatgactattgaagagctgctgacacgctacgggcagaactgtcacaagggccctccccacagcaaatctggaggtgggacaggcgaggaaccagggtcccagggcctcaatggggaggcaggacctgaggactcaactagggaaactccttcacaagaaaatggccccacagccaaggcctacacaggcttttcctccaactcggaacgtgggactgaggcaggccaagttggtgagcctggcattcccactggtgaggctgggccttcctgctcttcagcctctgacaagctgcctcgagttgctaagtccaagttctttgaggacagtgaggatgagtcagatgaggcggaggaagaagaggaagacagtgaggaatgcagcgaggaagaggatggctacagcagtgaggaggcagagaatgaggaagatgaggatgacaccgaggaggctgaagaggacgatgaagaagaagaagaagagatgatggtgccagggatggaaggcaaagaggagcctggctctgacagtggtacaacagcggtggtggccctgatacgagggaagcagttgattgtagccaacgcaggagactctcgctgtgtggtatctgaggctggcaaagctttagacatgtcctatgatcacaaaccagaggatgaagtagaactagcacgcatcaagaatgctggtggcaaggtcaccatggatgggcgagtcaacgggggcctcaacctctccagagccattggggaccacttctataagagaaacaagaacctgccacctgaggaacagatgatttcagcccttcctgacatcaaggtgctgactctcactgacgaccatgaattcatggtcattgcctgtgatggcatctggaatgtgatgagcagccaggaagttgtagatttcattcaatcaaagatcagccagcgtgatgaaaatggggagcttcggttattgtcatccattgtggaagagctgctggatcagtgcctggcaccagacacttctggggatggtacagggtgtgacaacatgacctgcatcatcatttgcttcaagccccgaaacacagcagagctccagccagagagtggcaagcgaaaactagaggaggtgctctctactgagggggctgaagaaaatggcaacagcgacaagaagaagaaggccaagcgagactagcagtcatccagacccctgcccacctagactgttttctgagccctccggacctgagactgagttttgtctttttcctttagccttagcagtgggtatgaggtgtgcagggggagctgggtggcttcactccgcccattccaaagagggctctccctccacactgcagccgggagcctctgctgtccttcccagccgcctctgctcctcgggctcatcaccggttctgtgcctgtgctctgttgtgttggagggaaggactggcggttctggtttttactctgtgaactttatttaaggacattcttttttattggcggctccatggccctcggccgcttgcacccgctctctgttgtacactttcaatcaacactttttcagactaaaggccaaaacct

SEQ ID NO: 4429 - DNA, 2634 bp, Homo sapiens
  source 1..2634: mol_type = genomic DNA
gactcccgggtccccgcgccggactgggactgggagcaggcagcccgggcggagcgggccggtgccgaggacggccccaggcattgctctgccccgggcattgcgcggcgcgcgtgagggggatgcggcaggaggcggcgcggcgggaggagtaggcggcggcgccctcgggagggagctgcgcgcgggccagacggcgcccggaggctccgcagtgccgccgccgtcgcccgggaggctccgcgcgggagccatgtaaccctgcggcgggctccgggctgctccgtccttccccagctcccgggctagcgcggcagcggggccacgatgaagaagcagttcaatcgcatgcgccagctggccaaccagacggtgggcagggctgaaaagacagaagttttgagtgaagaccttcttcaggtggagaagcgtctggagctggtgaaacaggtgtcccacagcacgcacaagaagctcaccgcatgtctgcagggccagcaaggggcagaggctgacaagcgctccaaaaagttgcctttgacaacactggctcagtgtctgatggaggggtcagctatcctgggagatgacacacttcttgggaagatgctgaaactctgtggagagacggaggacaagctggctcaggagctgatacattttgagttgcaagtagagagagacgtgattgagcccctgtttttgctggcggaggtggaaatcccaaatattcaaaagcagaggaaacacttagccaagttggtgctggacatggattcctcacgaaccaggtggcagcagacttccaagtcttcaggtttgtccagcagcttacagcctgcgggtgccaaggctgatgccctcagggaagaaatggaagaggctgccaacagagtggagatttgcagggaccagctctcagctgatatgtacagttttgtggccaaagaaattgactatgcaaactactttcaaacgctaatagaagtgcaagctgaataccacaggaagtccctgacactattgcaggctgtattgcctcagatcaaagcacaacaggaggcctgggtagagaagccttccttcgggaagccgctggaggagcacctcaccatcagcggccgggagatcgccttccccatcgaggcgtgtgtgaccatgctgcttgagtgtgggatgcaggaggagggactcttccgagtagccccctctgcctccaaactgaagaagctgaaagcggccctggactgctgcgtggtggatgtgcaggagtactcggcagacccccacgcaattgcaggagctttgaaatcttacctccgagagttgccagaacctcttatgacctttgaactctatgatgagtggatccaggcttccaatgtccaggagcaagacaagaagcttcaggctctatggaatgcttgtgaaaagttgcccaaggccaatcacaacaacatccgatacttgataaaatttttatccaagctgtcagaatatcaagatgtaaacaagatgactcccagtaatatggcaattgttttaggacccaacctcctatggccacaagcagaagggaacattacagagatgatgaccacagtgtcgctgcaaattgttgggatcattgaacctatcatccagcatgcagactggttcttccctggggagatagagttcaacattactggcaattatgggagtccagtacacgtgaaccataatgccaactacagctcaatgccctccccagacatggaccctgctgaccggcgccagcccgagcaggcccgccggcccctcagcgtcgccacggataatatgatgctggagttttacaaaaaggatggcatgggtgtgagggtcatggacacaaactgggtggctcgaagaggctcctcggccggtcggaaagtgtcctgcgccccgccctccatgcagcctcccgccccgcccgccgagctggctgcgcccctgccttcgccgctgccggagcagcccctggacagccccgcggcccccgcgctctctccatccggcctgggcctccagcctgggcccgagcgcaccagcacaacaaaaagcaaggaactttctccaggctctgcacagaaaggaagtccaggctccagccagggcacagcctgtgcagggactcaaccaggggctcaacctggagctcagccgggcgccagccccagccccagccagccgcctgcagaccagagtcctcacaccctccggaaagtttcaaagaagctggcaccgattccacccaaggtcccctttggccagccgggggctatggcagaccagtccgctggccagccgtccccagtcagcctgtcccccaccccgcccagcaccccgtcaccctatggactgagctaccctcaggggtactccttggcctcgggccagctctccccagctgcagctcctcccctggcctctccttctgtctttacaagcactttgagcaaatcgcggcccactcctaagccgcgacagagacctactctgccgcctcctcagcctcccacagtaaacctctcggcctctagtccacagtccacggaggcccccatgctagatggcatgtcccctggggaaagcatgtctacagctgtgtga

SEQ ID NO: 4430 - DNA, 3681 bp, Homo sapiens
  source 1..3681: mol_type = genomic DNA
tctcccggccttgttgactttggcgtccgcggggagctgcccctgtgcccgtggttctctgcgcatgcccggaccccggcggctccggagtccgggaggctctggctgctccagtcgcgggtccgggccccgcctctccactcggcggtggcgtccgtgttgttattgtggtggtagcggcgtctggctgctgcggaccccgccgagtcctagcgcctggcctgcgcgccgctgcccgcgccacagatttgagttctgtgaacctgcatttgttgttggtaattgcctccagatagcttctgacagtcatcagtatgatcgaatttattgtggagctggagtgcagaaagaccatgaaaactacatgaaaatattactaaaagttggaggcatattagtcatgcctatagaggatcagttaacacagattatgcgaactggacagaacacttgggaaagtaaaaatatccttgctgtttcatttgctccacttgtgcaaccaagtaagaatgataatggcaaaccagattctgtgggactccctccctgtgctgtcaggaatctacaggacttggctcgtatttacattcgacgcacacttagaaatttcataaatgatgagatgcaggccaaggggattcctcaaagggctccacccaaaaggaaaagaaagagagttaaacagagaattaacacttacgtatttgtgggtaatcagcttattcctcagcctctagacagtgaagaggatgaaaaaatggaagaggataacaaagaagaggaggaaaaagatcacaatgaagcaatgaagccagaggagccacctcaaaatttactgagagaaaaaatcatgaagctgcccctccctgaatctttaaaagcttacttgacatattttagagacaaataacttagatcaagaagaaaaatgcctactgataattcctttagtcttgaaaatgtagcatttgttaggagttaaaagagagaattatttctttcatcagagcaaattatagtggaaaaaaaatcacttgtttctgtcagtaacacaaatgatgtattcagtgaataaaagaatcccttttataaaatctatttttctttaaatcttggaaaaatgttgttttagctcagagtgatttcaaagtggaatgcaacagtagtcaagacttgtgtactataaatccttttctgattccttacagatttgtagtgatgaggtttagatttaattttatatatggtttaaataattgttaagcttatataacctgatctgaattgcagttgtttgcatttcctctatgaaaacttcatttatctaataaggaagtcaaatgctttgtagactatttaccttacttttgttgcaatcactgttgttgggttgctgtatatatattccgggcaatatatgagtgcaataacaatacaagatattgaataatttagctttaaaaaatcccacaaattttatgaaattttacagccctgctacttttgcttttgaatctcttgccaaaagacatgggtaaaatatctgcctctctcatagagattttaagagcacagcaagtgaattattaaaacaaagtctatacttaatacaactctttatatggaccctttacattttcagtatttaaaaaaatgaggttatcttaactctatagaattttaaaagtatatttagaattgttttttctgtagttcactgtataaagtatttggttttttaaaaaaagcaaaaccattgttatgtgtgactcttgataggacacagaacgagtgaatgagcatgagtgaggccactttcttggatggctgtaagtagcagggccagggtagacctggtcagcggatgcactttagcagatggaacttctagtttatctgaatatttatctttgacaaggtagggctgagcctacatttgcttttgatctatctagtataagaaatattcacagaaattgtatgtagataccctttgttttgaaaatgctgttcagaatcatagtgtaatctttgggacctatgccatgttcatttcactccttcccatattttttgtgtttcttttggtaaaactataatggttttcattttttacttaatatcacacagttaaactgtccatatttgagctttattttagcttatcagtgataaaaaacaggtagtaactgccattgtttgtttgttttcctaataaggcctgaaaacagccattccttgttaagaaagtgtacaatgtaacatatttgctagagttacatggattatatatttcttaaagggaaaaatttgagagtatcatggactaccaccagcattattattacagtagttactcagatttggttaaggaagcccaagcaatgtatagtgaaaggattattatctctctgctaagattcagatattgtttcagaaatctcagctccagtaattccacaacatctaaaaacaaatgtttgtgatcatgtgtaagcatgaaattgttccaagtaagtgaggatattttagttatgtgaaagacagtttcatggaaggtatttgttttataccagtggctgggatggtggaattggggttatttctacaattattcttagacgattactaaactgttaagaaatgccccatatcatttttgtatctaggaaagaaaaaaatcagtttcatactgttgtcatctgtcagaaatgctcattttattttgaattaaatgtggcttttgaagtacctagttaccttgaattcctggtgaccacatgtttttatctggaaaacctggagaaagttatctgtcccatctcccctgcttgtttttttttttttttttggttggagctgctgtttagatgatgcttttactatgcaggagagagtttttgttaaggatatatttgaagattggcttttccatattgtccttcattctttgaccatggcaaagtgtacagtagattttcatgatcattgcatatttcttgtcattgaaatgtatcttttatgtttttaaatgcattcattttacacttgtgagtttatcattgactttaagaggtagaaatgaaaaatgaaaattaaagctaaagcctttttatctattaatgcagatatattagaataagaatattttgggtttgtgtttattttttaatgaatttatgtttacttgatatggaaaattacgctttataggtggaaaagtagcaaataaagattaagtaaaagtaagtgaaaatgatggggaatatagtattggaattttatagctagttaaaacagtaagtatcatctaatttgggtgtttattttgcagatgagaaaacagacctagaaccgtggcatgttttgcctgaaacatacagtgagttagagacagggcctaagatagcttctagcatcagatcaatcccaagaatccatcagcaacctcagaccaacccaagaagataatttaaatctatactgcttattggtcaatatatttggttctagtattaataaagaaaaatgttattaaaatagcatacatagtagtaaaataaaatacaaaaagtgtgttgatttatagctgtttgagatgataaaagtgaagcaaagcctgttaaatcattggaagacttggaaaattattttaaataaacaattacatgtaattaagca

SEQ ID NO: 4431 - DNA, 3770 bp, Homo sapiens
  source 1..3770: mol_type = genomic DNA
gagagggagccttgctctgttgtccaggctggagtgcagtggcataatctcagctcactgcaacccctatctcccaggttcaagcctcagccttctgcatagctgggactacaggcatgcaccaccacacccagctagtttttgtattttttagtagagacagagtttcactatatgttggccaggctggtctcgaactcctgacctcagctgatccacctgcctcggcctcccagagtgctgggattacagacgtaagccaccatgcccggctggaatcattcatttcttttcaagtgggtatcttatggtattttagggcatggctgggagcagttttgttttctcttctcaagactgagtgtttgcaggatgtcatagagttcatgtctgcagctcacagtgtcattgcctgtgtccccagctccacgtactggcaggtgtgctgcaagctgggtaggtgccctgtgtccctgggataccttaaccgacactcctggccctcctctgcaagctgtgccctgatcctccctgcagggactggggattgggtctgctcacctagaagccaggatacctggctgagggcacttctctccctcttctctttgaacagagtggccacaaactcaaaggtgcgggagcaagtgcggctggagctgagcttcgtcaactcagacctgcagatgctcaaggaagagctggaggggctgaacatctcggtgggcgtctatcagaacacagaggaggcatttacgattcccctgattcctcttggcctgaaggaaacgaaagacgtcgactttgcagtcgtcctcaaggattttatcctggaacattacagtgaagatggctatttatatgaagatgaaattgcagatcttatggatctgagacaagtatgactctctcaccggggttccggtcagccagcagaacctgctgctggagaaggccagtgtcctgttcaacactggggccctctacacccagattgggacccggtgtgatcggcagacgcaggctgggctggagagtgccatagatgcctttcagagagccgcaggggttttaaattacctgaaagacacatttacccatactccaagttacgacatgagccctgccatgctcagcgtgctcgtcaaaatgatgcttgcacaagcccaagaaagcgtgtttgagaaaatcagccttcctgggatccggaatgaattcttcatgctggtgaaggtggctcaggaggctgctaaggtgggagaggtctaccaacagctacacgcagccatgagccaggcgccggtgaaagagaacatcccctactcctgggccagcttagcctgcgtgaaggcccaccactacgcggccctggcccactacttcactgccatcctcctcatcgaccaccaggtgaagccaggcacggatctggaccaccaggagaagtgcctgtcccagctctacgaccacatgccagaggggctgacacccttggccacactgaagaatgatcagcagcgccgacagctggggaagtcccacttgcgcagagccatggctcatcacgaggagtcggtgcgggaggccagcctctgcaagaagctgcggagcattgaggtgctacagaaggtgctgtgtgccgcacaggaacgctcccggctcacgtacgcccagcaccaggaggaggatgacctgctgaacctgatcgacgcccccagtgttgttgctaaaactgagcaagaggttgacattatattgccccagttctccaagctgacagtcacggacttcttccagaagctgggccccttatctgtgttttcggctaacaagcggtggacgcctcctcgaagcatccgcttcactgcagaagaaggggacttggggttcaccttgagagggaacgcccccgttcaggttcacttcctggatccttactgctctgcctcggtggcaggagcccgggaaggagattatattgtctccattcagcttgtggattgtaagtggctgacgctgagtgaggttatgaagctgctgaagagctttggcgaggacgagatcgagatgaaagtcgtgagcctcctggactccacatcatccatgcataataagagtgccacatactccgtgggaatgcagaaaacgtactccatgatctgcttagccattgatgatgacgacaaaactgataaaaccaagaaaatctccaagaagctttccttcctgagttggggcaccaacaagaacagacagaagtcagccagcaccttgtgcctcccatcggtcggggctgcacggcctcaggtcaagaagaagctgccctcccctttcagccttctcaactcagacagttcttggtactaatgtgaggaaacaaacatgttcaggccctgaacatttccggtgctgactcggccttaaacgtttgtgccataatggaaaatatctatctatctgttctcaaatcctgtttttctcatagtgtaaactcacatttgatgtgtttttatgaaggaaagtaaccaagaaacctctaggaattagtgaaaaaagaacttttttgaggtgtgttactatactgctgtaagttatttattatataaagtattgtaaatagaatagtgttgaagatatgaaatatggctatttttaatggtgacaattatgacttttagtcactattaaattggggttacctatatcagtacaatttgtagttgtttccaggtttggctaataatcattccttaacctagaattcagatgatcctggaattaaggcaggtcagaggactgtaatgatagaattaaattagtgtcactaaaaactgtcccaaagtgctgcttcctaataggaattcattaacctaaaacaagatgttactattatatcgatagactatgaatgctatttctagaaaaagtctagtgccaaatttgtcttattaaataaaaacaatgtaggagcagcttttcttctagtttgatgtcatttaagaattactaacacagtggcagtgttagatgaagatgctgtctacaaggtagataatatactgtttgatactcaaaacatttttcattttgtttaaagtagaagttacataattctatattttaagtcttgggtaaaaaagtagttttacattttataaagtaaagatgtaaatgattcaggtttaaagctctatttgacttcctttttttgtttgagatagcgtcttgctgtgttgcccaggctggagtgcagtggtgtgatctcagctcagtgcaacctccgccccctgggatcaagcgattctcctacctcagcctcccaaatagctgggactacaaggtgccctccagcatgcctggctgatttttgtatttttagttgaggtgaggtttcaccatgttggccaggcgggtttcgaaatcctgacctcaaatgatccacccacctcagcctcccaaagtgctgggattacaggcatgagccaccacaaccgtcccactattttactttttaaaatgacattcctactgattgatttttatcttgctataagttcgatgacaccgtgaatctaataaggttcactgttgacacagtacaagttacatagctaaaatacatagcattgaagactaattttaaggattgacaagagtttattttctattgtgcaatatcttaaaggaagcaaccacctttgggaaagtgtatctgctgctcctagggccatgcttgtatacatatttaaataaacatattcatttacccg

SEQ ID NO: 4432 - DNA, 8887 bp, Homo sapiens
  source 1..8887: mol_type = genomic DNA
aggtaaatgcgtgcccggaagcgcgacctcgggcggttggaggggctaccgggtcttaccagtccgtggcgggagtcccggaggaccctcgacgggggagttgccgagaaaaggcctcgccggcattcttcccctccactgggtcctttgaacctagtttggctgggactcgccttcaggcggcgcggaggatttcgaggccctgaggcgcggcccttaatttccggaagtgggggccgcgccgcgccgtcaagatgtgctcgacgcccggaatgccggcgccgggggcctcgctggccctgcgggtgtccttcgtggacgtgcatcccgatgtgatcccggtgcagctgtgggggctggtgggcgagcggcggggcgagtacctgcggctgagccgggaaatccaggaagcggcggccacgcgcggccagtgggcgctgggcagcgcctcggcctcgcccggcgagctgtgcctggtgcaggtcgggcttttgtggcaccgctgccgcgtggtcagccggcaggcacaggagagccgtgtcttcctgctggacgagggccgcaccatcacggccggagcaggctcgctggcgcctgggcgcagagagttcttcaatttgccctcggaagtgctgggctgcgtgctagcgggcctggtgccggcaggctgcggcgcgggctcaggcgagccgccgcagcactggcccgccgacgccgtggacttccttagcaaccttcagggcaaggaggtgcacgggtgcgtcctggacgtgctgctgctccatcgcctggtcctcctggaggtgcctgatgtgttccaacagatgcgggagctgggcctggctcggcgggtgcccgacagcctcttccgttcgctgctggagcgctatctcacagcggccactgctagcgtgggctccggggtcccggttctctcgcgagtcccgctcaagcaaaagcagcctggtctggattacttctatccccagctgcagctgggcgtgacggaggccgtggtcataacccaagtgtgccatccccaccgcattcactgccagctccgcagcgtctcgcaggagatccaccgcctctccgagagcatggcccaggtataccggggttccacggggacaggggatgagaactctaccagtgccacctgggaggagagggaggagagcccagataagccgggctctccgtgtgcatcctgtggcctggatggacattggtacagagcactgttgcttgagacttttcggccccagcgctgtgcccaggtgcttcatgtggactatggaaggaaggagttagtgagttgcagcagccttcggtacttgctgcctgaatattttcgaatgccggtggtgacctacccttgtgctttgtatggactctgggacggtgggagaggctggtctcggtcacaggtcggtgacctgaagacactgatactaggcaaggcagtgaatgcaaagattgaattttattgctcctttgagcatgtgtattatgtcagcctgtatggagaagatgggattaatctgaaccgtgtgtttggagtacagtcgtgttgcttggctgaccgagtccttcagagccaggcaacagaggaggaggaaccagaaacatctcagtctcagtctcctgctgaagaagtagatgaagagatttcactcccagccttaagatctatcaggttaaagatgaatgccttctacgatgcgcaggtagagtttgttaaaaatccttctgagttttggattaggttgaggaaacacaatgtcaccttcagtaagctgatgaggagaatgtgtggtttctattcctctgccagtaagctggatggtgtagttttgaaacctgaacctgatgacctttgctgtgtcaagtggaaagaaaatggttattatagggccatagtcaccaaattggatgacaagagtgtggatgtattcttagttgaccgaggcaattcggaaaatgtggactggtatgacgtaaggatgctgcttcctcagtttaggcagctaccaatattggctgtgaagtgcaccctggctgatatttggcctttgggaaaaacttggagccaggaggcagtttccttttttaaaaagactgtgctccacaaagaattagtcatccatattcttgataaacaggatcatcaatatgttattgagattcttgacgaatcaagaacaggggaagaaaacattagtaaggtaattgcccaagctggatatgccaagtatcaggaatttgaaacaaaggaaaatatcctggtaaatgcccactccccagggcatgtttcaaaccactttactacggagagtaacaaaataccttttgccaagactggagaaggagagcagaaagccaagagagagaataaaaccacatctgtttcaaaagctttgagtgacacaacagttgtaacaaatggttcaactgaactagttgtgcaggaaaaagtgaaaagagcatctgtttattttcctcttatgcagaattgcttggaaattaagccaggctcctctagtaaaggagagctggaagttggaagtacagtagaagtcagagtgtcttatgttgaaaaccctggctatttctggtgtcagctgaccaggaacatacaaggacttaaaactctaatgtctgatattcagtactattgcaaaaatacagctgctcctcaccagagaaacacccttgcttgtttggctaagcgaacagtaaacagacagtggtccagagcacttattagtgggatacagtctgtggagcatgtcaatgtaacatttgtagattatggagacagagaaatggtatctgtgaagaatatttattcaattagtgaagaatttctgaaggttaaggcacaggcttttaggtgcagtctttataatttaattcaaccagttggccagaatccctttgtttgggatgtaaaggcaatacaagctttcaatgaatttatagataatgcatggcaaaaaaatctagaattaaaatgtacaatatttgctctggcttcaattaatgaagaactgtttaacattgtggatttgctaaccccctttcagagtgcatgccatttcttggtagaaaagagacttgcaagaccagtaaaacttcagaagcctttggagtcctctgttcagctacattcctacttctattctacacatgatatgaaaattggaagtgaagaattagtttatataacgcatattgatgacccttggacattttattgccagctggcaagaaatgcaaatattttagaacagttgtcatgtagtattacacaattaagtaaagttttgctgaatttaaaaacatctcccttgaaccctggaaccttgtgccttgccaagtatactgatggaaactggtataggggcatagtaatagagaaagagccaaagaaagtcttctttgttgattttgggaatatttatgtagtaacaagtgatgatctgcttccaatacctagtgatgcatatgatgtcttacttttgcccatgcaagctgtcagatgttcattatctgatattcctgatcatataccagaagaagtggtggtgtggtttcaggagactattttagataagtcattgaaggctttagttgtagcaaaagatccagatggaacactgattatagaactatatggtgacaatattcaaattagtgctagtattaataagaagttggggctacttagttacaaagatagaataagaaaaaaagaaagtgaagtcctctgttctacaactgaaactcttgaagaaaaaaatgagaatatgaagttgccatgtacagagtatttaagtaaatcagtagggtacaagttacctaataaagaaattttggaagagtcatataaacctcagatcaactcatcatacaaggaactcaaacttttacaaagtttaacaaaaacaaacttagtcactcaatatcaagactctgtgggaaataaaaatagtcaagtgtttccattaacaacagaaaagaaagaagaaatttctgctgagacacccttgaaaacagcaagagtagaagctactctttcagagagaaaaataggagattcatgtgacaaagatttgcctctgaaattttgtgagttcccacagaagactataatgcctggatttaaaacaactgtatatgtttctcatataaatgacctttcagacttttatgttcaactaatagaagatgaagctgaaattagtcatctttcagagagattaaacagtgttaaaacaaggcccgaatattatgtaggtccacctttgcaaagaggagatatgatatgtgctgttttcccagaagataatttatggtatcgtgctgtgatcaaggagcaacaacccaatgaccttctctctgtgcagtttatagattatggcaatgtttctgtggttcatactaacaaaataggtaggcttgaccttgttaatgcaatattgccggggttgtgcattcattgctccttgcagggatttgaggttcctgacaataaaaattctaagaaaatgatgcattacttttcccaacggaccagcgaggctgcaataagatgtgaatttgttaaatttcaagacagatgggaagttattcttgctgatgaacatgggatcatagcagatgatatgattagcaggtatgctctcagtgaaaaatctcaagtagaactttctacccaagtaattaaaagtgccagttcaaagtctgttaacaaatcagacattgacacttcagtatttcttaactggtataatccagaaaaaaaaatgataagagcttatgccactgtgatagatggacctgagtacttttggtgtcagtttgctgatacggagaaacttcagtgtttagaagtagaagtacagactgctggagaacaggtagcagacaggagaaattgtatcccatgtccttatattggagatccttgtatagtaagatacagagaagatggacattattatagggcacttatcactaatatttgtgaagattatcttgtatctgtcaggcttgtggactttggaaacattgaagactgtgtggacccaaaagcactctgggccattccttctgaacttctgtcggttcccatgcaagcctttccatgttgcctctcagggtttaacatttcagaaggattatgttctcaagagggaaatgactatttctatgaaataataacagaagatgtgttggaaataacaatactagaaatcagaagggatgtttgtgatatccctttagcaattgttgacttgaaaagcaaaggtaaaagtattaatgagaaaatggagaaatattctaagactggtattaaaagtgctcttccctatgaaaatattgactcagagataaagcagactcttgggtcctacaatcttgatgtaggacttaagaaattaagtaataaagctgtacaaaataaaatatatatggaacaacagacagatgagcttgctgaaataactgaaaaagatgtaaacattattggaaccaaaccaagtaacttccgtgaccctaaaactgataacatttgtgaagggtttgaaaacccctgcaaagataaaattgatactgaggaactggaaggtgaattagagtgccatctggttgacaaagcagagtttgatgataaatacctgattacaggatttaacacattactaccacatgctaatgaaacaaaggagatactagaactgaattcacttgaggtgccgctttctcctgatgatgaatcaaaagaattcttagaactggaatctattgagttacagaattctctggtggtggatgaagaaaaaggggagctaagcccggtgccaccgaatgtgccactctcccaagagtgtgtcacaaaaggcgccatggagctatttacactgcagcttcctctcagctgtgaagctgagaaacagccagaactagaactacctacagcccagctgcctttagatgacaagatggatcctttgtctttaggagttagtcagaaagcacaggaatccatgtgtactgaggacatgagaaagtcaagttgtgtagaatcttttgatgaccagcgcaggatgtcattgcatctacatggagcagattgtgatcctaaaacacagaatgaaatgaatatatgtgaagaagaatttgtagagtataaaaacagggatgccatttcggcattgatgcctttgttctctgaggaagaaagcagtgatggaagcaagcacaataatggtttaccagatcatatctcagctcaactacagaacacctacactctgaaagcctttactgttggatctaaatgtgttgtgtggtcaagtctaagaaacacatggtctaaatgtgagattttagaaacagctgaagaaggaacaaggaaaaggggtttggaggtgatggagatttaaccgtggatctatagctgtggccaatcagtcagaagctgcccttgaacaagtggcatcttacgcagaccaacagagtatttgagaaaattgaaaacatgtaaccacaagaagttgtcattttcaaaaacttctatataggtggaaaacaaattaggtctcaggttgatggtggggtgtgtttatagtgatcctgttatatatacagatctgggatctttcgtctttattgtcttacgtttctaattagttgggaggatttattttgctaaacagtttactaacacattacatttcaaaaactattttggtacctttcaaatacagtgtttaaattaaaatagaaaaataagggctcatgacaagtacattatttgattctacttaggatagctttttagcaggatctccttcagaatttttgtcttgactttgaatctttgcctgtttgtctaaacatttgactaacattctgtttgaatttggaagtattctaatacaagatttgaataaagtttatccttaaataaagtttatccttaatatgatggtctcattttattaaaaaggaaatagaactcttaaatatacttggttccatctctcctctgtaatggaggattggggaaagcatagtaatattaaatgttagctcttatgtattagtcacttagcttatactttaaatgcattttttcactttattcatcaactttgaagtgcatatcaatattatccatattttataggtgagaaaattgaagcttcataaagaggttaaataacttgcctaaggtcagatagctgatgagtctcagaggcttgatcaaacccagacctacctaactttgaagcccatgactttttaaacatgattttgcaaagcatagatcttagcttttagaaacagatctgagctatatgctgcttaacagatatgtgacatgggcaaattatgtaatattttgaactttgatcttcatctgtaaagtggtgataataaaacctttcttgcagtgtttttttaagatgagaaataattgatataaagtccctgaaaaggagtaggcatttgataaatgtgtctttctttaccctgaaaaatactcagtgtgcactatgttaggttatttctttttaaccttaacttattagatattttcaatagttattttctcctttcagcatcagcatgcgccaccaacaaaagactgtaaaaaacaaacaaacaaaaaagtgttgaatgggacatccatacagttggaatgcttatttctaaaatgaatagggaaaaggtttgctaaatgagactggggtaaaggtgtatctctgtgaagcattatcagactctgaagcctaatggaaatagaattatgaaccttaaaaacccattataatttccgtaagtagaagggagagaggtttgcattaaaagtaattgaggtagatgagtatattacttattcctggaataatgaatagacaagtttggcttactcatatagataatataatgtgaattgccagaagcaaagctcagagaagatgcattaggatcagattataggaagccttcaatttcaagctgagtttaactccctattttaaaaaatttaatctgaatggctacagaagtaaaatttctcagaatgagtgactttgcacctgacaccactaagataggactagggtaccaaatgagtggtataaatttttatgtcccctgggaaataaaatcattttccatgattcccatatttataagtataaattcttaagctatatttttacctccatttaatcgtgttattctgttttactactacatatagaattgaaaacattaaataaaattaactggaatatgaagaagctaaatgtaattctgaatgttttattatccttcacagcctttgtgtgagtaactaatgtattctaactggaatccctgctatatgctgtaatacctgtggaacctttctttagcaagtagaatgccttaaagaattaaagaaagtgtcaaaaaattaccaatttaatccactgcctttgcctcatctctaatattcttaacccttctctactccttttagtcatcatttgaaattgtgtagtaccaccaatcctgtgctgaaacaatggcttttgcttgttctaatttttcttaccgtgaccaaaagtcaaagagaagagctgccaaattctacctagaatatcatgttgctataattaaactccactgcccatagtagataataaaaggcaagaaattgttttttactctatgtttagggagtcttgtatcattgcaacaggttttcactgggattttgcctgttttaatctacttgtctgtcaaagtaatgtaaaaacagtttttaacttcgacactgaaaaggaatcatctttaaaattaaaatttaggctgatatgaa

SEQ ID NO: 4433 - DNA, 543 bp, Homo sapiens
  source 1..543: mol_type = genomic DNA
gagtcggtggtggcccaaagtccaggccgcatccaccgcccggcgcctagcgcaggggcagcagccgggtcgccacaggaggggccccgggtgttcttgccggcttgggggaactttcccagggtcagcccggaggcgccctgcagccccggcatttggctaaacaaagcaagcgctgccggcgcggcccgcccgagggcgccgcgggaagaacctgggcaggtggctccgctgccggatgggagtgccccagtgtgctggatgaagctggcgcatgcaccatgtcatcatgtgtctctagccagcccagcagcaaccgggccgccccccaggatgagctggggggcaggggcagcagcagcagcgaaagccagaagccctgtgaggccctgcggggcctctcatccttgagcatccacctgggcatggagtccttcattgtggtcaccgagtgtgagccgggctgtgctgtggacctcggcttggcgcgggaccggcccctggaggccgatggccaagaggtcccccttgacacctccgggt

SEQ ID NO: 4434 - DNA, 2512 bp, Homo sapiens
  source 1..2512: mol_type = genomic DNA
aagaaacaagatggcggctgaaggcgatccggagtggggccccaccccccccagcaccagcgccaccaccgcggcccggagggccgtcaacaaagtggtgtacgatgaccacgagagcgaggaggaggaggaagaggaggacatggtctccgaggaggaggaggaggaggacggcgacgccgaggagacccaggattctgaggacgacgaggaggatgagatggaagaggacgacgatgactccgattatccggaggagatggaagacgacgacgacgacgccagttactgcacggaaagcagcttcaggagccatagtacctacagcagcactccaggtaggcgaaaaccaagagtacatcggcctcgttctcctatattggaagaaaaagacatcccgccccttgaatttcccaagtcctctgaggatttaatggtgcctaatgagcatataatgaatgtcattgccatttacgaggtactgcggaactttggcactgttttgagattatctccttttcgctttgaggacttttgtgcagctctggtgagccaagagcagtgcacactcatggcagagatgcatgttgtgcttttgaaagcagttctgcgtgaagaagacacttccaatactacctttggacctgctgatctgaaagatagcgttaattccacactgtatttcatagatgggatgacgtggccagaggtgctgcgggtgtactgtgagagtgataaggagtaccatcacgttcttccttaccaagaggcagaggactacccatatggaccagtagagaacaagatcaaagttctacagtttctagtcgatcagtttcttacaacaaatattgctcgagaggaattgatgtctgaaggggtgatacagtatgatgaccattgtagggtttgtcacaaacttggggatttgctttgctgtgagacatgttcagcagtataccatttggaatgtgtgaagccacctcttgaggaggtgccagaggacgagtggcagtgtgaagtctgtgtagcacacaaggtgcctggtgtgactgactgtgttgctgaaatccaaaaaaataaaccatatattcgacatgaacctattggatatgatagaagtcggaggaaatactggttcttgaaccgaagactcataatagaagaagatacagaaaatgaaaatgaaaagaaaatttggtattacagcacaaaggtccaacttgcagaattaattgactgtctagacaaagattattgggaagcagaactctgcaaaattctagaagaaatgcgtgaagaaatccaccgacacatggacataactgaagacctgaccaataaggctcggggcagtaacaaatcctttctggcggcagctaatgaagaaattttggaatccataagagccaaaaagggagacattgataatgttaaaagcccagaagaaacagaaaaagacaagaatgagactgagaatgactctaaagatgctgagaaaaacagagaagaatttgaagaccagtcccttgaaaaagacagtgacgacaaaacaccagatgatgaccctgagcaaggaaaatctgaggagccaacagaagttggggataaaggtaactctgtgtcagcaaatcttggcgacaacacaacaaatgcaacttcagaagagactagtccctctgaagggaggagccctgtggggtgtctctcagaaacccccgatagcagcaacatggcagagaagaaggtggcatctgagctcccccaggatgtgccagaagaacctaacaagacatgtgagagcagtaacactagtgctaccactacctccatccagcctaatctggaaaacagtaacagcagcagtgaactaaattcttcccagagtgaatctgctaaggcagctgatgatcctgaaaatggagaaagagaatctcatacacctgtctctattcaggaagagatagtaggtgatttcaaatcggagaagtccaacggggagctaagtgaatctcctggagctggaaaaggagcatctggctcaactcgaatcatcaccagattgcggaatccagatagcaaacttagtcagctgaagagccagcaggtggcagccgctgcacatgaagcaaataaattatttaaggagggcaaagaggtactggtagttaactctcaaggagaaatttcacggttgagcaccaaaaaggaagtgatcatgaaaggaaatatcaacaattattttaaattgggtcaagaagggaagtatcgcgtctaccacaatcaatactccaccaattcatttgctttgaataagcaccagcacagagaagaccatgataagagaaggcatcttgcacataagttctgtctgactccagcaggagagttcaaatggaacggttctgtccatgggtccaaagttcttaccatatctactctgagactgactatcacccaatatggcgagaatctttaggacataccaggttacaccggatgacatcaattg

SEQ ID NO: 4435 - DNA, 1186 bp, Homo sapiens
  source 1..1186: mol_type = genomic DNA
ctttcctcactgcacgctcttgcccctcctcttttctctcctgcccgtgttcttcccgccgcctgacctggcccgcccgcctttccagtctggccgggcgggggcctgaagcacggcggctcgggccgtgggaccgtgttcacaccctttccagaaattcttggctggtaaccgcgaaaccgactggagcaggagctgggagaactggagaaaactgctctaatctcacttgactccagctaggagctgatgctgcatcgtaataacatttgcagagcgctttcacaggcgctggagtgacttgtctgagattcctccagaactgagccctttgttggaaccataccccagcccatggtcccatgactaggtggatagtactccttgtacctcctgcaacccagaaccctggctgaccactttgaaggaggatgctccagcagacatggacgtctcgctgcctaatgaagttctatgctgtggtggccacctcacctgcatcttgggagagccacaagattgcagagaggatagaacagaggatcctgaactccaaccctgtcatggaagcttttgggaatgcgtgtacactgaggaataacaacagcagtcgctttgggaagttcatccagctccagctgaacagggctcagcaaatgactggagccgcagtccagacctacctcctagagaaaactcgagtggcctgccaggcttccagtgagaggaacttccacatcttctatcagatttgcaaaggagccagtgaggacgagaggctccagtggcaccttcctgagggagctgccttctcctggctgcccaacccagagaggagcttagaagaggattgttttgaggtgaccagagaggccatgctccatttgggcattgacacccctacccagaacaacatctttaaggtcagaagaaaagccacgccacttaagtttggcagagatgacgggcagccctttgcatagagcttttccctggacttggagttggtctttccctgaggatctaggactttgggcccctctgggctacctccaaggaatcagtcacctctgttctgctgagtctggagaccaggtggtggggtggacggggcataaggaagagtgatgcatacacagtgctagagtacagaatgcagtaagtgatccatgggggcagagagcaa

SEQ ID NO: 4436 - DNA, 885 bp, Homo sapiens
  source 1..885: mol_type = genomic DNA
gagcataagaacttgccttagtgaagatgcaaaagagattcagaacaaaatagaggtagaagcagatgggcaaacagaagagattttggattctcaaaacttaaattcaagaaggagccctgtcccagaaacatcgaatgaatgctgaaattcctagtctggtttcttcagtggtgtgtttgtgttttagtacaacctgcaaaagagttactccattgtctaaaaatgcaaatgagaatttccaaatatacaaaatgcctccaagctcaaatagctataactgtaccaaagacatggaagaaaccaaaagatcggacccgaaccactgaagagatgttagaggcagaattggagcttaaagctgaagaggagctttccattgacaaagtacttgaatctgaacaagataaaatgagccaggggtttcatcctgaaagagacccctctgacctaaaaaaagtgaaagctgtggaagaaaatggagaagaagctgagccagtacgtaatggtgctgagagtgtttctgagggtgaaggaatagatgctaattcaggctccacagatagttctggtgatggggttacatttccatttaaaccagaatcctggaagcctactgatactgaaggtaagaagcagtatgacagggagtttctgctggacttccagttcatgcctgcctgtatacaaaaaccagagggcctgcctcctatcagtgatgtggttcttgacaagatcaaccaacccaaattgccaatgcgaactctggatcctcgaattttgcctcgaggaccagactttacaccagcctttgctgattttggaaggcagacacctggtggaagaggcgtacctgtaagtgcaagttccctacaactcacttag

SEQ ID NO: 4437 - DNA, 1392 bp, Homo sapiens
  source 1..1392: mol_type = genomic DNA
ttcgccggccgcgcggccagatgaggggggcgatggagctggagcctgagctgctgttgcaggaggcccgcgagaacgtggaggcagcgcagagctaccggcgggagctgggtcaccggcttgaggggctgcgtgaggcgcggaggcaggtgaaatcgccatgcttggtggtgtgggagaagagaatgagaaactgtggagctttaccaaaaaggcctcgcacattcagttggacagcttaccagaagtacctttactggttgatgtgccttgtttatctgctcagttggatgactcaattcttaacatagtgaaagaccacatttttaagcatggaacagtagcatctcgcccaccagtacagatagaagaactaatagagaaacctggaggcatcattgtacgatggtgtaaggtggatgatgactttacagcccaagattacaggctccagtttcgtaaatgtacttcaaatcattttgaggatgtatatgtaggttctgaaactgaattcatagtattgcacatagaccccaacgttgattaccagttcagagtctgcgcccgaggagatggccgacaggagtggagtccttggagtgtcccccagataggtcattccacattggtgcctcatgagtggacagctggttttgaggggtacagtctgagcagtcgaagaaatatagcacttcggaacgattctgaatcatcgggtgttctctactccagagctccgacttatttctgtgggcagacattaacattcagagttgaaactgtgggacagccagacagaagagatagcataggagtgtgtgcagaaaaacaggatggatatgactctctgcagcgggatcaagctgtgtgcattagtacaaatggtgcagtttttgtcaatggaaaagaaatgacaaatcagttacccgcagttacttctgggtccactgtcacgtttgacattgaagccgtgactctaggaaccaccagtaataatgaaggtggacacttcaagcttcgagtaactataagttcaaataatagagaagtggtttttgactggttacttgatcagtcttgtggttctctttactttggatgctcatttttctatcctggatggaaagtgttagtgttttagatgtttgggtgcttggctttggttttcagggtctaacgtagctgtcctcagcccagcgtagttgtaattgctttaaaaaaaaagttgaattcatctctaacttaggccattggaaagtgtttactggattcattttgtaatattttagcaaaaagagacttcaatgttgtggacaaaatcatacaattcagtcaattttatttttagcatactgttaaatatcacatcacaataaaaatcaaattggcatt

SEQ ID NO: 4438 - DNA, 2633 bp, Homo sapiens
  source 1..2633: mol_type = genomic DNA
aaagtggtgtacgatgaccacgagagcgaggaggaggaggaagaggaggacatggtctccgaggaggaggaggaggaggacggcgacgccgaggagacccaggattctgaggacgacgaggaggatgagatggaagaggacgacgatgactccgattatccggaggagatggaagacgacgacgacgacgccagttactgcacggaaagcagcttcaggagccatagtacctacagcagcactccaggtaggcgaaaaccaagagtacatcggcctcgttctcctatattggaagaaaaagacatcccgccccttgaatttcccaagtcctctgaggatttaatggtgcctaatgagcatataatgaatgtcattgccatttacgaggtactgcggaactttggcactgttttgagattatctccttttcgctttgaggacttttgtgcagctctggtgagccaagagcagtgcacactcatggcagagatgcatgttgtgcttttgaaagcagttctgcgtgaagaagacacttccaatactacctttggacctgctgatctgaaagatagcgttaattccacactgtatttcatagatgggatgacgtggccagaggtgctgcgggtgtactgtgagagtgataaggagtaccatcacgttcttccttaccaagaggcagaggactacccatatggaccagtagagaacaagatcaaagttctacagtttctagtcgatcagtttcttacaacaaatattgctcgagaggaattgatgtctgaaggggtgatacagtatgatgaccattgtagggtttgtcacaaacttggggatttgctttgctgtgagacatgttcagcagtataccatttggaatgtgtgaagccacctcttgaggaggtgccagaggacgagtggcagtgtgaagtctgtgtagcacacaaggtgcctggtgtgactgactgtgttgctgaaatccaaaaaaataaaccatatattcgacatgaacctattggatatgatagaagtcggaggaaatactggttcttgaaccgaagactcataatagaagaagatacagaaaatgaaaatgaaaagaaaatttggtattacagcacaaaggtccaacttgcagaattaattgactgtctagacaaagattattgggaagcagaactctgcaaaattctagaagaaatgcgtgaagaaatccaccgacacatggacataactgaagacctgaccaataaggctcggggcagtaacaaatcctttctggcggcagctaatgaagaaattttggaatccataagagccaaaaagggagacattgataatgttaaaagcccagaagaaacagaaaaagacaagaatgagactgagaatgactctaaagatgctgagaaaaacagagaagaatttgaagaccagtcccttgaaaaagacagtgacgacaaaacaccagatgatgaccctgagcaaggaaaatctgaggagccaacagaagttggggataaaggtaactctgtgtcagcaaatcttggcgacaacacaacaaatgcaacttcagaagagactagtccctctgaagggaggagccctgtggggtgtctctcagaaacccccgatagcagcaacatggcagagaagaaggtggcatctgagctcccccaggatgtgccagtaggtgatttcaaatcggagaagtccaacggggagctaagtgaatctcctggagctggaaaaggagcatctggctcaactcgaatcatcaccagattgcggaatccagatagcaaacttagtcagctgaagagccagcaggtggcagccgctgcacatgaagcaaataaattatttaaggagggcaaagaggtactggtagttaactctcaaggagaaatttcacggttgagcaccaaaaaggaagtgatcatgaaaggaaatatcaacaattattttaaattgggtcaagaagggaagtatcgcgtctaccacaatcaatactccaccaattcatttgctttgaataagcaccagcacagagaagaccatgataagagaaggcatcttgcacataagttctgtctgactccagcaggagagttcaaatggaacggttctgtccatgggtccaaagttcttaccatatctactctgagactgactatcacccaattagaaaacaacatcccttcatcctttcttcatcccaactgggcatcacatagggcaaattggatcaaggcagttcagatgtgtagcaaacccagagaatttgcattggctttagccattttggagtgtgcagttaaaccagttgtgatgctaccaatatggcgagaatctttaggacataccaggttacaccggatgacatcaattgaaagagaagaaaaggagaaagtcaaaaaaagagaagaaacaggaagaagaagaaacgatgcagcaagcgacatgggtaaaatacacatttccagttaagcatcaggtttggaaacaaaaaggtgaagagtacagagtgacaggatatggtggttggagctggattagtaaaactcatgtttataggtttgttcctaaattgccaggcaatactaatgtgaattacagaaagtcgttagaaggaa

SEQ ID NO: 4439 - DNA, 3862 bp, Homo sapiens
  source 1..3862: mol_type = genomic DNA
agcctggctgaggcagccgcgcaggtcgcagggccagcgtccgcgaggacggcccggctgggcggccccgagctctgtggcgctgtggaggagcgggagcgcggccgaggaagcggggcgccgagggggtcggcggccttcgggaaatttccgccgacccttcgctcccggctctaaaagttcctgatttcctatttccttttaaatcccgagtggctgttagctcttcgcctgcactttttcttccccaggagataagggggagtgtgaggaacggagcgaataatataaaaaaggatttcctcccggaagagagcggcagttcggagagatttttcttaaggaagcagaagcggcgtttgcggccgctgcaggcgccgggccctgccggccacactatgcgcgagccggccccgggctgctgaggcgcggggacgcggaagcggaggccgagcgcgccggcccgacatggcgccggagctgaccccggaggaggagcaggctaccaagcagtttctcgaagagattaacaagtggacagttcagtacaatgtttccccgctgtcttggaatgtggctgtcaagttcctcatggcaaggaagtttgatgtgctccgtgccatagaattgttccactcctacagagaaactcgaaggaaggaaggcattgtaaagctgaaacctcatgaggaacctcttcgttctgagatcctcagtggaaaattcaccatcttaaatgttcgggacccaacaggagcctccattgccctctttactgccaggttgcatcatccccacaagtcagtccaacatgtggtacttcaggctctgttttacttgctagacagagctgtggatagctttgaaactcagaggaatggactggtgtttatctatgacatgtgtggttctaattatgccaactttgagctggatcttggcaagaaagtcctaaacctgctgaagggagcatttccagctcgtttgaagaaggtgctgattgtgggggcacccatatggttccgagtgccctattccatcatcagtctcctcctgaaggacaaagtccgggagaggattcaaatattaaagacatctgaggtcacgcagcatctgcccagggagtgtcttccagaaaacctgggtgggtacgtcaaaattgatctcgccacttggaatttccagttcctaccccaggtgaacggccacccagatcccttcgatgagatcatcctgttctccctccctcctgccttagactgggactcagtacatgttccaggtccccatgctatgaccatccaagagttggtggactatgttaatgccaggcaaaagcaaggaatctatgaggaatatgaagacattcgtcgtgagaaccctgttggcactttccactgttccatgtctccaggaaacctagagaaaaaccgttatggggatgtaccctgcctggaccaaactagagtgaagctaacaaagcgaagtggccatactcagacagattacatcaatgccagtttcatggatggctacaagcagaagaatgcttacattggcacacaaggtcctttggagaatacctatcgtgatttctggctcatggtatgggagcaaaaagtcttggtgattgtcatgaccacccgctttgaggaaggcggcaggagaaagtgtggccagtactggcctttagaaaaagactctcggatccgatttggcttcctcacagtgaccaatctaggcgtggagaacatgaatcattataagaaaacaacgctagaaattcacaacacagaggaacggcagaaacgccaggtgacccacttccagttcttgagctggccagactatggtgtcccttcctcagcagcttccctcattgacttcttgagagtggtcagaaaccagcagagtctggctgtgagcaacatgggagcacgctccaaagggcagtgccctgagccacccattgtggtccattgcagtgcaggcattggcaggacaggtaccttctgctcactggacatctgcctggcacagctggaggagcttggcacccttaatgtgttccagacggtgtcacgcatgaggacccagagggccttcagcatccagacccctgagcagtactatttttgctacaaggccatcctggagttcgcagagaaggagggcatggtatcctctggccaaaacctgctggccgtggagagtcagtaactctcctacgaacctcctacctgttggccagccttccttaaactaccctggacaccgctgagcctataggttgccatcagttacgctgaagccatggatcaacttctttcttgtgtctcccagcacacgtgtgcacgcaaggcagcctttccctttggctagataaatgtggtgaaattgccactagaaagggccagtagcaatgtgttcttaattcctagcatctgctatcaaactgtgccttattaaaaccaaattgtggctattgatttttgctagggtccccgaggtaagtggggaaggaacctccctcctcctttctcccgccattctttttctgaggtctcctgtctcccactccttccctttcctaggattttatggggaggtttgatgagcatttgcctttctccccagagagcttgaccaagttacatattctagagatcgtcctgagtgccaagcacgtttataagtagggcgtgtattccagtcctttctgtcattctgtgtgtgtgtgtgtgtgcacttatgtgtatgggtccatatgtacgtgtgtatataatatatattgtatgtgataatatgatcgtattctataaatacatatacacacgatactcctttccagaagttcctggggctccgtgttgcagttcaggactccttgcttcttggaccctactatttatcctggactagcttgggttggtgatcatgtctcctcttgtcaggctacagagtggtggaagaggacacacacacatctcctccatgttcctgccacagggccccttccttaagtaatgacttatctccttccagttgccacctgttggagccaagaatgtattagtttgtggtgacactgggttagctcagcatggatttcccttatccgatgatttttctacatttacttggccaatttggggaacagacctccactgtgattccatactctctctttgctttcactatcccagggatgggaggcggagggtagagatgaactcactgagcagccagagccaaatgcaatcggtacgaatcttagaaggaaggagggggagcccaggtatgagaaagaaaaaaccactaagaaaatacctccctgggaggatgagctggggccctttttcttttgctggatggttcctttatgcagcttggccctgtctaccgagatgcccatctcttcctgcctgctagcctgctagaccctcaaactgggtgggttctgtgtcaataaaaagcttcaccccctggctgagtgaggtggtcccctgcaatcactgtttgtcccctacccacccaacctgtccctgcctgctcccagcccactcatccttatgtgctagggataaatcaagagtcctcagcactccacattcccaaaaaatcccaggaactcctaaaccttcccctgtgacagaagatgaggttggcagctgatcagacctcaataattttatactgtaataagctctttgaatgtgtatattattattttttacaatcatttcattttgtatttaatatcaatggactgagtctgattcagaaaataattgtaatgttcatattcaatatcttacagtgatacagttttgtatttacatataaatataccgacatgatc

SEQ ID NO: 4440 - DNA, 526 bp, Homo sapiens
  source 1..526: mol_type = genomic DNA
agggcagcctgctcgacaaggccccttggcagacagtcagctccctccaaggccaaaccccaagttcaacatacatctttctctcccatttctgcaagcataactgtgaacagcataattcttttccgttactatggcaatgacggcagggactacaacaacctttcctatgagcaaccatacccgggaaagagtgactgtagccaagctcacattggagaatttttatagcaacctaattttacagcatgaagagagagaaaccaggcagaagaaattagaagtggccatggaagaagaaggattagcagatgaagagaaaaagttacgtcgatcacaacacgctcgcaaagaaacagagttcttacggctcaaaaggaccagacttggcttggatgactttgagtctctgaaagttataggaagaggagcttttggagaggtgcggttggtccagaagaaagatacaggccatatctatgcaatgaagatattgagaaagtctgatatgcttgaaaaagagcag

SEQ ID NO: 4441 - DNA, 847 bp, Homo sapiens
  source 1..847: mol_type = genomic DNA
agactgccataagatggcgtccgtggcggctgcacgagcagttcccgtgggcagtgggctcaggggcctgcaacggaccctacctcttgtagtgattctcggggccacgggcaccggcaaatccacgctggcgttgcagctaggccagcggctcggcggtgagatcgtcagcgctgactccatgcaggtctatgaaggcctagacatcatcaccaacaaggtttctgcccaagagcagagaatctgccggcaccacatgatcagctttgtggatcctcttgtgaccaattacacagtggtggacttcagaaatagagcaactgctctgattgaagatatatttgcccgagacaaaattcctattgttgtgggaggaaccaattattacattgaatctctgctctggaaagttcttgtcaataccaaggtaagtttagttcactcgtaactcactgaggaaatggattgctctttcttgctgtctaatttcagtgggagaaaggttgactcttgcctatttcttatacccagcaactataattttcctacttaatattctcaagcaaatgccacctccatgtgtgaagtgtgttcctccaggctggttccaaactcctaggctcaagcgatcctcctgcctcagcctaccgaagtgctgggattatagtcatgagccacagtactcagccaagaaaaggatttcttcaggtagggttgtcctttgcacggcaggggggtggggcacaaattgtaatatctaagttttttcacccccttaaaggcaatgtataacctcattaagaatgcatgttttagattaatgaagtttatacttttcagtatccaa

SEQ ID NO: 4442 - DNA, 3497 bp, Homo sapiens
  source 1..3497: mol_type = genomic DNA
gcggtgtttgtctgccggactgacgggcggccgggcggtgcgcggcggcggtggcggcggggaagatggcggcgtcctccctggaacagaagctgtcccgcctggaagcaaagctgaagcaggagaaccgggaggcccggcggaggatcgacctcaacctggatatcagcccccagcggcccaggcccaccctgcagctcccgctggccaacgatgggggcagccgctcgccatcctcagagagctccccgcagcaccccacgccccccgcccggccccgccacatgctggggctcccgtcaaccctgttcacaccccgcagcatggagagcattgagattgaccagaagctgcaggagatcatgaagcagacgggctacctgaccatcgggggccaggtaccaccttcactgtggcggggagagggaggaggcccagccaggctggacccatcctgggagcgccagtggggggcagggggcggtggcagaccagggaccctccaaccctccctctcctcccagcgctaccaggcagaaatcaacgacctggagaacttgggcgagatgggcagcggcacctgcggccaggtgtggaagatgcgcttccggaagaccggccacgtcattgccgttaagcaaatgcggcgctccgggaacaaggaggagaacaagcgcatcctcatggacctggatgtggtgctgaagagccacgactgcccctacatcgtgcagtgctttgggacgttcatcaccaacacggacgtcttcatcgccatggagctcatgggcacctgcgctgagaagctcaagaagcggatgcagggccccatccccgagcgcattctgggcaagatgacagtggcgattgtgaaggcgctgtactacctgaaggagaagcacggtgtcatccaccgcgacgtcaagccctccaacatcctgctggacgagcggggccagatcaagctctgcgacttcggcatcagcggccgcctggtggactccaaagccaagacgcggagcgccggctgtgccgcctacatggcacccgagcgcattgaccccccagaccccaccaagccggactatgacatccgggccgacgtatggagcctgggcatctcgttggtggagctggcaacaggacagtttccctacaagaactgcaagacggactttgaggtcctcaccaaagtcctacaggaagagcccccgcttctgcccggacacatgggcttctcgggggacttccagtccttcgtcaaagactgccttactaaagatcacaggaagagaccaaagtataataagctacttgaacacagcttcatcaagcgctacgagacgctggaggtggacgtggcgtcctggttcaaggatgtcatggcgaagactgagtcaccgcggactagcggcgtcctgagccagccccacctgcccttcttcaggtagctgcttggcggcggccagccccacagggggccaggggcatggccacaggcccccctccccacttggccacccagctgcctgccaggggagacctgggacctggacggccacctaggactgaggacagagagtggggggtgcccacccaccccccccgccccgggcctaccaagcccccgcccttcccaccccggggtcagccggccgtgtgcgtcccccgacagacactgtgaacggaagacagcaggccgcgatcagagtcgctgttcattcagccgcagcctctgggccggggcggcccccaggggccaggagagagccctggagtcccgcagccaccatgcacgctcccagcgtgctgtgtccttcgccactcccacgcgcccgttcctcttccgtcgccctctgtcccctgctctacctctctgtccttgtctggctctcccgtcaccctccctgcctctgtctctcttctggcctgagcctgggcccagccacctcctgacgggtcccctgggtctgcataggtctcccatggcgcaatgagtcagtggcccccagccaggcagtgtgggcattgccactgcggctggacggggctgcgcgctcgcgctctctctctctctctctctctctctttgatctcagggggtcctttttggagtttattgtattttattgtacttggtggggtgtttggggtgggggcggaggagagcttgttctcgtggggttgtcggtaccttcagaaacttttaccaaagtcacgattagctgcttgtggtggggccccaaccgccctcgggcactggggagctgggctggggctgctgctctggggtctccgggggccacagcttggggtgagttgaagacctcaggggatgtggaggggtctgcggggccctggccgcacaggatggccttcagggaaggtggtcttggggcatggtgcagagcaggtgaccggagggaatcggtgacggagcggggccaagggaggggtccggagggagtcagggatggagggcagagggagtggatgtgggggtttgaggacgtgtgacaagctccagcaggggtgggggccgggctgagggtgggggtgcgaggtggtcactcccatcgtgcccctggccgtccctccactcacccacacctggcccagtccacgttgaggtccaggactgggaaggaccgggtgagtgcaccggggacccaggccaggtgccccccggagcctgctggggtggccagagcaggagggggtgtgtttcctttttgtgggtgttgcatgcaaatcaagtggacaagaaaaaataacaaaacaaaaaacaagaaaaaaaaaacacaaaaccccgtaaaatcacaaagaaaatccaacaccaaaggcgcagaagccggctggccgtggtgggggcagcgtaggcgtagcatccctctcctctcacttagcctgttgactcttgttattatcatgatattcacaaaacgccgcatgtttaaaaagtcatagatgtcatcttctctctgcccccagggaggaaagccaccttctcttgccccttggcccctttgtcaggggccaggggtctgccgggtgggggtgccaacaggcctggccctttcctcccctgcatccagccatgggggcctctgcgattgccggaaggttgcatggctggtcccagggccagcacaggcccgaggccgggctgcctggttttatttttatttaactttattttctgttttatgagtgtgtgtccgcccacccccacccccttcagtgttaagtggggagccctgggggagtctctcctgcctcccagcctctcccaagacctcccccctcgtcaccagccatccctctggaccaggcagagggcggaccgggtgggcaggggcctgagggtggctcgggccagcccaccagccaatggacccctcctcaggccgccagtgtcgccctgcccctttttaaaacaaaatgccctcgtttgtaaacccttagacgcttgagaataaaccccttccttttcttcc

SEQ ID NO: 4443 - DNA, 2122 bp, Homo sapiens
  source 1..2122: mol_type = genomic DNA
aacgtagctagctgcaagcagaggccggcatgaccaccgagcagcgacgcagcctgcaagccttccaggattatatccggaagaccctggaccctacctacatcctgagctacatggccccctggtttagggaggaagaggtgcagtatattcaggctgagaaaaacaacaagggcccaatggaggctgccacactttttctcaagttcctgttggagctccaggaggaaggctggttccgtggctttttggatgccctagaccatgcaggttattctggactttatgaagccattgaaagttgggatttcaaaaaaattgaaaagttggaggagtatagattacttttaaaacgtttacaaccagaatttaaaaccagaattatcccaaccgatatcatttctgatctgtctgaatgtttaattaatcaggaatgtgaagaaattctacaggtataaaagatgttgaaacagaagatcttgaggataagatggaaacttctgacatacagattttctaccaagaagatccagaatgccagaatcttagtgagaattcatgtccaccttcagaagtgtctgatacaaacttgtacagcccatttaaaccaagaaattaccaattagagcttgctttgcctgctatgaaaggaaaaaacacaataatatgtgctcctacaggttgtggaaaaacctttgtttcactgcttatatgtgaacatcatcttaaaaaattcccacaaggacaaaaggggaaagttgtcttttttgcgaatcagatcccagtgtatgaacagcagaaatctgtattctcaaaatactttgaaagacatgggtatagagttacaggcatttctggagcaacagctgagaatgtcccagtggaacagattgttgagaacaatgacatcatcattttaactccacagattcttgtgaacaaccttaaaaagggaacgattccatcactatccatctttactttgatgatatttgatgaatgccacaacactagtaaacaacacccgtacaatatgatcatgtttaattatctagatcagaaacttggaggatcttcaggcccactgccccaggtcattgggctgactgcctcggttggtgttggggatgccaaaaacacagatgaagccttggattatatctgcaagctgtgtgcttctcttgatgcgtcagtgatagcaacagtcaaacacaatctggaggaactggagcaagttgtttataagccccagaagtttttcaggaaagtggaatcacggattagcgacaaatttaaatacatcatagctcagctgatgagggacacagagagtctggcaaagagaatctgcaaagacctcgaaaacttatctcaaattcaaaatagggaatttggaacacagaaatatgaacaatggattgttacagttcagaaagcatgcatggtgttccagatgccagacaaagatgaagagagcaggatttgtaaagccctgtttttatacacttcacatttgcggaaatataatgatgccctcattatcagtgagcatgcacgaatgaaagatgctctggattacttgaaagacttcttcagcaatgtccgagcagcaggattcgatgagattgagcaagatcttactcagagatttgaagaaaagctgcaggaactagaaagtgtttccagggatcccagcaatgagaatcctaaacttgaagacctctgcttcatcttacaagaagagtaccacttaaacccagagacaataacaattctctttgtgaaaaccagagcacttgtggacgctttaaaaaattggattgaaggaaatcctaaactcagttttctaaaacctggcatattgactggacgtggcaaaacaaatcagaacacaggaatgaccctcccggcacagaagtgtatattggatgcattcaaagccagtggagatcacaatattctgattgccacctcagttgctgatgaaggcattgacattgcacagtgcaatcttgtcatcctttatgagtatgtgggcaatgtcatcaaaatgatccaaaccagagaggaagagcaagaggtagcaagtgcttccttctgactagtaatgctggtgtaattg

SEQ ID NO: 4444 - DNA, 4422 bp, Homo sapiens
  source 1..4422: mol_type = genomic DNA
cgcccagggcggtagcgtgaaacttggtggaagacgctgaccagtcgtgttggaatcaaaacagcggggaccctgcgccatgtcgcgactgatcgtgaagaatctcccgaatgggatgaaggaggagcgtttcaggcagctgtttgccgccttcggcacgctgacagactgcagcctgaagttcaccaaagatggcaagttccgcaagtttggttttattggcttcaagtccgaggaagaggcccagaaggcacagaagcatttcaacaagagcttcatcgacacatcccggatcacagtggagttctgcaagtcattcggggacccggccaaacccagagcctggagcaaacatgcccagaaaccaagccagcccaagcagcctccaaaagactctactactccagaaattaagaaagatgagaagaagaaaaaggtggcaggtcaactggagaagctgaaggaggatacagagttccaggagtttctgtcagttcatcagaggcgggcgcaggcagccacttgggcgaatgatggcctggatgctgagccctcgaaagggaagagcaagccggccagtgactacctgaacttcgactccgattctgggcaggagagtgaggaggagggagccggggaggacctggaagaagaggcaagcctcgaaccaaaggcagctgtgcagaaggagctgtcggacatggattacctgaaatccaagatggtgaaggctgggtcgtcctcttcctcggaggaagaggaaagtgaagatgaagccgtgcactgtgatgaagggagtgaggccgaggaagaggattcctccgccaccccagtcctgcaggaaagagacagcaagggtgcaggccaagagcaagggatgccagctgggaaaaagagaccaccggaggccagagccgagacagagaaaccagcaaaccagaaggaacccaccacctgccacaccgtgaagctgcggggagccccgttcaatgtcacagagaaaaatgttatggaattcctggcacccctgaaaccagtggccattcgaattgtgagaaacgctcatgggaataaaacaggatacatctttgtggatttcagcaatgaagaggaagtgaagcaagctctgaaatgcaaccgggagtacatgggtgggcgctacatcgaggtgttcagggaaaagaacgtccccaccaccaagggtgcaccaaagaataccaccaaatcctggcaaggccggatactcggggagaacgaagaggaggaggacctggccgaatccggaaggctctttgtacggaacctgccctacaccagcaccgaggaggatctggagaagctcttctccaaatatggtcccctgtctgagctccactaccccatcgacagcctgaccaagaaacccaagggttttgcattcatcaccttcatgttccctgagcacgctgtgaaggcctactcggaggtggacgggcaggtattccagggcaggatgctccacgtgttaccatctaccatcaagaaggaagccagcgaggatgccagtgccctgggatcgtcgtcctacaagaagaagaaggaggcccaggacaaagccaacagtgccagctctcacaactggaacacactattcatggggccgaatgccgtggccgatgccatcgcacagaagtacaacgccaccaagagtcaagtgtttgaccacgagaccaagggcagcgtggccgtgcgcgtggctctgggggaaacccagctcgtccaggaagtgcggcgttttctcatagacaacggggtcagcctggattccttcagccaggctgcagcagagcgaagcaagactgtgattctggtcaagaacctcccggcaggcaccctggcggcccagctgcaggagaccttcggccattttggcagcctgggccgcgtgctgctgccagagggcggaatcactgccatcgtggagttcctggagcccctggaggcccgcaaggccttcaggcatctggcctattccaagttccatcatgtccccctctatctggagtgggctccagttggcgtcttctccagcacagccccacagaagaaaaagctccaagacacaccttcagaacccatggaaaaggacccagcagagccagaaacagtgcctgatggcgaaaccccagaagatgaaaatccaacagaggaaggagcagacaactcttcagcaaagatggaagaggaggaggaggaagaggaagaagaagaagagagcctcccaggatgtactctgtttattaagaatctcaattttgacacaacagaagagaagctgaaggaagtgttttcaaaagtggggacagtgaagagctgctccatctccaagaagaagaacaaagcaggagtgctcctttccatggggtttggatttgtggaatacaggaagccggagcaagcccagaaagctctcaagcagctccagggtcacgtcgtggacggccacaagctggaagtgaggatctcggaacgagccactaagccagccgtgacattggctcggaagaaacaagttcccagaaagcagaccacctccaagatcctggtgcggaacatccccttccaggcccacagccgggagatccgagagctcttcagcacctttggggagttgaagacggtccgcctgccaaagaagatgactgggacaggcacacacagaggcttcggctttgtggacttcctcaccaagcaggatgcgaagagagccttcaacgccctgtgtcacagcacccacttgtacgggcggaggctggtgctggagtgggccgactccgaggtgaccctgcaggccctgcggcggaagacggccgctcactttcacgagcccccgaagaaaaagcggtctgtggtgttggacgagatcctggagcagctggaaggcagtgacagcgacagcgaggagcagacccttcagctgtgagctggcaccgagagggctggagtgcagtggcgtgatctgggctcacctccctggttcaagcgattgtcccgcctcagcctcccaaggctgggattacaggtatgcaccaccacgcccggctaattttgtatttttcatagagactgggtttcaccatgtagaccaggctggtctcgaattcctgacctcaagtgatccacctacctcggcctcccaaagtgtggggattacgggtgtgagccaccacgcccggctaattttttgtatttttagtagacagggtttcaccatgtgggccaggctggtcttgaactcccaacctcaagtgatccacccaccttgttctcccaaagtgctgagattacaggtgtgagccaccatgcccagcctgttcctaaccctttcaactggggggtctcaagtgggtgaggactccatggccacggcagcagaactgtctcttctgaaaaccagactccggggcccctgggtcagcacctctaggtcattccacagacttacacagtttaaagaaagagccagcgaacatggggtgatcctggggtgccactgggatcccaagccaggcccggaggtctgcctgtttcgtccccagaaacttgagctggcatcctccgctggtttgcactgggcacggggactggagagccaccaggccactgagcgcagcatgctatcacttctcaggaagttgtgagggtgaggagaatagccgggcccactctgcagaggggaggaacaggcacaggctagaggcacgggctgatagagtgagtcctctccctcattcattcattcattcattcattcatccatcagacacctgctgggcatctgctgtgtgcgagacactgtgctgggtgccccagacacaagacagaaactcgggtcgctctgtgtgcctccacactggccttccctgctgcgtggacgcaggctctgtctcctaggctttaagccccatgcatcaggtggaagacaatttccagcagcctctgcccgcttgtttttcctcctctccttttcctgccgccttggtcttttttgtcttttgtgcagggccgtctctcgcagcgcccgtctgtgctccgcagcgtctaggaaaggattagtgtgagcagagcacgcaggctttggtgaacagagccgagcttggtttcaacatctaattcaatttgttctgccgagattgaaatatgaaatggttgccagtcaaacgttcaaaggacggggaagggagagtgagcgcatgctgaaatttaaattttaatgaaaatgactttaaccctttggtacaccttgcaaaatgtaacccatcctcccatcctgtgaaagcggcctctcgggttagagcttttccacccacttctcttccactgagcttcactaataatatgtaatcatttttttcagccgtcttaataataaaagattaatag

SEQ ID NO: 4445 - DNA, 987 bp, Homo sapiens
  source 1..987: mol_type = genomic DNA
caacggaccctacctcttgtagtgattctcggggccacgggcaccggcaaatccacgctggcgttgcagctaggccagcggctcggcggtgagatcgtcagcgctgactccatgcaggagcttgcaagtttttgaagaaacaggaatctctcatagtgaatttctccatcgtcaacatacggaagaaggtggtggtccccttggaggtcctctgaagttctctaacccttgcatcctttggcttcatgctgaccagttctagatgagcgcttggataagagggtggatgacatgcttgctgctgggctcttggaggaactaagagattttcacagacgctataatcagaagaatgtttcggaaaatagccaggactatcaacatggtatcttccaatcaattggcttcaaggaatttcacgagtacctgatcactgagggaaaatgcacactggagactagtaaccagcttctaaagaaaggtattgaggctctgaaacaagtaactaagagatatgcccggaaacaaaaccgatgggttaaaaaccgttttttgagcagacctggtcccattgtcccccctgtctatggcttagaggtatctgatgtctcgaagtgggaagagtctgttcttgaacctgctcttgaaatcgtgcaaagtttcatccagggccacaagcctacagccactccaataaagatgccatacaatgaagctgagaacaagagaagttatcacctgtgtgacctctgtgatcgaatcatcattggggatcgcgaatgggcagcgcacataaaatccaaatcccacttgaaccaactgaagaaaagaagaagattggactcagatgctgtcaacaccatagaaagtcagagtgtttccccagaccataacaaagaacctaaagagaagggatccccagggcagaatgatcaagagctgaaatgcagcgtttaagagacatgtccagtggcctttggaaaggtg

SEQ ID NO: 4446 - DNA, 4233 bp, Homo sapiens
  source 1..4233: mol_type = genomic DNA
ttgtatagtaagtttattgtatagtaacttgtaagtatattcgtaaaaggtaaaaccaaaattttactcctatggtaaaatttttatatacctagacattgtagtcactggaaaatgtgttattttccctccaacttagaaaggcaaaatagctgtcataatcaaaaatacaggtgcttcttcaactatggggagagggatcatcttggaataaggagagttttaggatcctgccttattaagagcctggacatatttatagaggaagtgttccaggtaggaaatgtggttttaaaatatgtgcacattcaaaataatgacttacaatatacttgctttgctaggaaactgaataaaattacaaaatttattgaggagaataaagaaaaatttacacagctagatttggaagatgttcaagttagagaaaagttaaaacatgccacgagtaaagccaaaactggagaaacaacttcaaaaagataaagaaaaggttgaagaatttaaaagtatacctgccaagagtaacaatatcattaatgaaacaacaaccagaaacaatgccctcgagaaggaaaaagagaaagaagaaaaaaaattaaaggaagttatggatagccttaaacaggaaacacaagggcttcagaaagaaaaagaaagtcgagagaaagaacttatgggtttcagcaaatcggtaaatgaagcacgttcaaagatggatgtagcccagtcagaacttgatatctatctcagtcgtcataatactgcagtgtctcaattaactaaggctaaggaagctctaattgcagcttctgagactctcaaagaaaggaaagctgcaatcagagatatagaaggaaaactccctcaaactgaacaagaattaaaggagaaagaaaaagaacttcaaaaacttacacaagaagaaacaaactttaaaagtttggttcatgatctctttcaaaaagttgaagaagcaaagagctcattagcaatgaatcgaagtagggggaaagtccttgatgcaataattcaagaaaaaaaatctggcaggattccaggaatatatggaagattgggggacttaggagccattgatgaaaaatacgacgtggctatatcatcctgttgtcatgcactggactacattgttgttgattctattgatatagcccaagaatgtgtaaacttccttaaaagacaaaatattggagttgcaacctttataggtttagataagatggctgtatgggcgaaaaagatgaccgaaattcaaactcctgaaaatactcctcgtttatttgatttagtaaaagtaaaagatgagaaaattcgccaagctttttattttgctttacgagataccttagtagctgacaacttggatcaagccacaagagtagcatatcaaaaagatagaagatggagagtggtaactttacagggacaaatcatagaacagtcaggtacaatgactggtggtggaagcaaagtaatgaaaggaagaatgggttcctcacttgttattgaaatctctgaagaagaggtaaacaaaatggaatcacagttgcaaaacgactctaaaaaagcaatgcaaatccaagaacagaaagtacaacttgaagaaagagtagttaagttacggcatagtgaacgagaaatgaggaacacactagaaaaatttactgcaagcatccagcgtttaatagagcaagaagaatatttgaatgtccaagttaaggaacttgaagctaatgtacttgctacagcccctgacaaaaaaaagcagaaattgctagaagaaaacgttagtgctttcaaaacagaatatgatgctgtggctgagaaagctggtaaagtagaagctgaggttaaacgcttacacaataccatcgtagaaatcaataatcataaactcaaggcccaacaagacaaacttgataaaataaataagcaattagatgaatgtgcttctgctattactaaagcccaagtagcaatcaagactgctgacagaaaccttcaaaaggcacaagactctgtcttgcgtacagagaaagaaataaaagatactgagaaagaggtggatgacctaacagcagagctgaaaagtcttgaggacaaagcagcagaggtcgtaaagaatacaaatgctgcagaggaatccttaccagagatccagaaagaacatcgcaatctgcttcaagaattaaaagttattcaagaaaatgaacatgctcttcaaaaagatgcacttagtattaagttgaaacttgaacaaatagatggtcacattgctgaacataattctaaaataaaatattggcacaaagagatttcaaaaatatcactgcatcctatagaagataatcctattgaagagatttcggttctaagcccagaggatcttgaagcgatcaagaatccagattctataacaaatcaaattgcacttttggaagcccggtgtcatgaaatgaaaccaaacctcggtgccatcgcagagtataaaaagaaggaagaattgtatttgcaacgggtagcagaattggacaaaattacttatgaaagagacagttttagacaggcatatgaagatcttcggaaacaaaggcttaatgaatttatggcaggtttttatataataacaaataaattaaaggaaaattaccaaatgcttactttgggaggggacgccgaactcgagcttgtagacagcttggatcctttctctgaaggaatcatgttcagtgttcgaccacctaagaaaagttggaaaaagatcttcaacctttcgggaggagagaaaacacttagttcattggctttagtatttgctcttcaccactacaagcccactcccctttacttcatggatgagattgatgcagcccttgattttaaaaatgtgtccattgttgcattttatatatatgaacaaacaaaaaatgcacagttcataataatttctcttcgaaataatatgtttgagatttcggatagacttattggaatttacaagacatacaacataacaaaaagtgttgctgtaaatccaaaagaaattgcatctaagggactttgttgaactttatgctgaagattcttcaagttgattcagtgtattactgatttttttctatttgtaaaggattatgagttgtataaaatacatactccctaaactagatcatgaaactggtttctgttttatgcagttgtcatttgtaaagtctaataaaatattctctataattgcttctagattacaaaaatatgacaatcttgtaagtagcagactatggagaaaaatgagttacctggagggtcaggtaacttgccaaactaaaaagtatgttagttgaggcaaagtcctaagcaaggttgtgctatcaaggctcagcataccttcgtgggcctttgatttaccaacactggaaatgcctgccaactaatcttggatagattctttaaggcattccacttagcttgccagttgagacaatcaccacagttattacccaaatactatgaacatatttttgtaaaccagtcattctgaattatagtgatgagaatttaaatatatgcttttctagaatttgatgtttgaccatttatgacttaattaccagagagccagtaaattaggacagtgtttcaacaagcctaggctatctcgtaagttgaaaaatatcccactatagttgcttcatgagtatgaagtaagatggcctctgatttacactggttcaatttacaaattttcaactttatgataggtttatccgggtactaaatgcatttcaacttgatagtttcaacttatgataggtttaccaggatgtagtcccactgttgaggagcatctatttaggggttaattactttagtaataagtggaaagtaagataccttgagtaatgtttgcctataaaattgtcagcgtatttttacactattggctcaagaatgttataatgctaagggacataagttggcaaccacttggtttttggaaggactttcggtattgtattagaagtctgccctagctgttaaatttctgggtatttatcctaaggaattaattaaagagttaattgttcctttcttcagtgggccattgttttagatatttaaaaaatccaacagtttctatcataatgtaactgtaaaaatgtaaacacattattagcatggacttttaaataaagatttaaagaaagcaag

SEQ ID NO: 4447 - DNA, 2542 bp, Homo sapiens
  source 1..2542: mol_type = genomic DNA
atgtttcttaccagaccgaaggtctgtgttgaccttaaccggagagtgactttgtatggagtgtttacaatccacttttctccaaatgtgccatcacgctgtctgttgcttgaactcctggatgtcagtgtttcggaattgctcttatattccagtcaccagggttgttccatgtggatgatacagcattgtgcccgagatgttttggaggcccttgcttttcttcatcatgagggctatgtccatgcggacctcaaaccacgtaacatattgtggagtgcagagaatgaatgttttaaactcattgactttggacttagcttcaaagaaggcaatcaggatgtaaagtatattcagacagacgggtatcgggctccagaagcagaattgcaaaattgcttggcccaggctggcctgcagagtgatacagaatgtacctcagctgttgatctgtggagcctaggaatcattttactggaaatgttctcaggaatgaaactgaaacatacagtcagatctcaggaatggaaggcaaacagttctgctattattgatcacatatttgccagtaaagcagtggtgaatgccgcaattccagcctatcacctaagagaccttatcaaaagcatgcttcatgatgatccaagcagaagaattcctgctgaaatggcattgtgcagcccattctttagcattccttttgcccctcatattgaagatctggtcatgcttcccactccagtgctaagactgctgaatgtgctggatgatgattatcttgagaatgaagaggaatatgaagatgttgtagaagatgtaaaagaggagtgtcaaaaatatggaccagtggtatctctacttgttccaaaggaaaatcctggcagaggacaagtctttgttgagtatgcaaatgctggtgattccaaagctgcgcagaaattactgactggaaggatgtttgatgggaagtttgttgtggctacattctacccgctgagtgcctacaagaggggatatctgtatcaaaccttgctttaatcagtaacctaaggactgtttcctttttctcctcttccatttcttgggttattccacatatgaatgcaggactacccccttaccattttaagaaggtactttatacatttatttaatcctactaatgtgcagccattgcccaagcagtgactgcgttgcatacatttggcactgagtaggacaagacctctcagctatacattgaggggttttagagcatccatgtgggcaacccttttttgtgcgggagagcaggtgttgctcttcagtatgtagcctaaaaaaatcttaattatttcatggatcatgaagcaaggatgaataatatcatgtcttggtaaatactaacaaatttgttaggtttggtgacatcatttacagattatttctttatgttgtccagtggttcttccttattgttgatatccataagctggcactggatgctctcagtaatgttaagtaattgtcaagcagcagttacctactgtgttcttaacactgagttgtgaattttttcttaaagcagtactgtagtactgaatattcctttaaaggaactgcagtgagcctatctaagtttttttaaattaaggcttttaaaatagaaagctgatgcttgatcttgcacaatttttatgtctagtatgtatgcttgagtgaatgtgcgagtatgaatgattagagaaaatttgagtcagtgtactttatagtgtgaatcctgtgagctaatacagtctatacttatttcttccctacctgtttcacatccgtaagatttaagatatacattttttgagaggtagtctgtctgatacaatgtaaatgacaaaacataattcctgagaggcccagaacaaactggagtctagcctggagttaaattgagacttctaaaatgattggaacaaagactaagttgtgccagatgtaaatcaacccctcttttagtttactttagactttgtattagctcatcttttttgtagtaaatctatagttttaaggtttctcaagatgtggctctacctactatgatgaaaattgaagtgggtcaaaagaattagatgtacagtgaagggaaaagaaaaaaaatgggcgaagagagggtggaaaataaaaggattcttttttcttcctttctgtttctcgtatccctgctccctttttcctccccttccctcattctttgcctctatccttagctgaagacaaactagaggagcagcatcccaggtagtttggcttttgactgcaaggtagttaagaaaggtgtagatataatgaggtagaagtagaaaggaagaaaaactcaaagaattcttaaaaggattcatagcaacataatgtgtccctgagtagaggatgctgctatgcgtgagttcatggacacaagttgattacatggtttttagaattataattatggattcttcttatttcatggtaggttgtctttaaagatataaaaattaggatgcctttatgaagcactgattatacc

SEQ ID NO: 4448 - DNA, 1217 bp, Homo sapiens
  source 1..1217: mol_type = genomic DNA
gatgcgctcgagtgtgggcggggactgagggaagaagtgaaaatcggactgccaggcgacagttcctccgtttgaaatctcgccggctcctgagcgggccaccgggcccgggctgggggtctggcgggagaaataactttatttggactgagagctggagaatgagaataggacctgagagtatattgggctaaggaggagagaaattcttgaatttgcccgggagattggtattgatcccatcaaggaaccagaactgatgtggctggcgcgagagggcatcgtggccccactgcctggagagtggaaaccatgccaggacatcacaggtgacatttactatttcaacttcgccaacgggcagtctatgtgggaccatccatgtgacgaacactatcggagcttggtgatccaagagcgggcaaagctgtcaacttctggggccattaagaagaagaaaaaaaaaaaggaaaagaaagacaagaaggacagagacccccccaaaagttcgctggaaacgcagcctgaggagggacttctgcctccttcatcctttctctgcagcttgtctcctccgtcagcacctgggcttgctgatctggacctagatcaagagatgcaggctataagtgagggatcctataacaaaggaaagagcccaggcatgctgggtgacactccctggcgtttcatgggtgcccttcccagaaagctgcagccactctccaaaggccaaccttcccaaatccaccaggtctttgctgacatggagaaaatcttaggcagggccccagcccaatgcaggagagaattaggtgatcagcagggtctggagaaactccagaaggcgacagagaaaatctacctggggttttcagatcctgaaacagaagagctggaaatgagaagcaggcagcagaaactgggcactccagcccctcagaacactgggcttctccaaaatatgcaggatgtggtagaaagcaggaaccaggcctctgtccactcaaagctttctgaagccatcaaaggcctgccactgaaaggggagcagcacagccacagcttagccaaactgagccccactggccctggaggggacaagggccaaagccccattcccatgtggatctgctgcaggctcagagccagcaactgcagaaacacttcagcagcctggaggctgaagctcaaaagaagcagcacctgttgagaga

SEQ ID NO: 4449 - DNA, 506 bp, Homo sapiens
  source 1..506: mol_type = genomic DNA
acagcgcgcgtccaagtggagaacaaagtgacccccagaacttctccaactcctcccggcgttcccgcgagggccacgcgccgagggtagcggagggcggcgcgcgaccggccccaccgagcccggcgcgcgacccgagggctctgtgtatgaatgacaaggataccttcagccagctcattctggatgaatgaatgattacactaagtgtcctccacattcctctgtgggctcacttcatggactcactttgcgtgcttgttaaatgtgctgtgttgctcccaagaccatgtaaagcctactgaccactaacctccctcacagcagaaactagacgtcaggttaaaatgggcaactccgacagtcagtacacccttcaaggatctaaaaatcatagcaatactattactggtgctaagcaaattccttgctccctgaaaatacgtggcattcatgcaaaagaggaaaagtcattgcatggatggggtcacggaagcaacggagca

SEQ ID NO: 4450 - DNA, 1542 bp, Homo sapiens
  source 1..1542: mol_type = genomic DNA
ggtgcgagtggggaagctgctaacccgacccggattggcgctgaggtggcccgtggggcagggcagatgattctggaccagatgaagcctgaggagccttccagctctaagatagcaggataggagacttctaagattggagctgcagaagacttgccagcccaccagcacaatgtcaggaagccatacacctgcctgtggccctttctcagccctgactccgagcatatggccccaggagatcttggccaagtacacgcagaaggaagagtcagcagagcaaccagagttctactacgatgagtttggtttccgtgtgtacaaggaagaaggtgatgagcctggctccagtctgctggcgaactcccctctgatggaggatgctccaggctgcggtggcaggcccacctggagttcacccataaccacgatgtgggggatctcacctgggacaagattgccgtctccctaccccgctctgagaagctccgctccctggtgctggccggcatcccacatggcatgaggccacagctgtggatgcggctctctggggccctgcagaagaagaggaactctgagctgtcctaccgcgagattgtgaagaacagctccaacgatgagaccatcgctgccaagcagatcgagaaggacctgctccgcaccatgcccagcaacgcctgcttcgccagcatgggtagcatcggggtgccccgcctgcgcagggtgctccgggccctggcctggctctacccagagatcggctactgccagggcaccggcatggtggccgcctgcctcctgctgttcctggaggaggaggacgccttctggatgatgtctgccatcatcgaggacctgctccccgcctcctacttcagcaccaccctgctgggtgtccagactgaccagcgggtcctgcgccacctcattgtccagtacctgcctcgcctggacaagctgctccaggagcatgacattgagctgtccctgatcacactgcactggttcctcacggccttcgccagcgtggtggacatcaagctgctcctgcgcatctgggacctgtttttctacgagggctcccgggtgctgttccagctcacgctgggcatgctgcacctcaaggaggaagagctgatccagtcagagaactcggcctccatcttcaacacgctatcggatatcccgtcgcagatggaggacgcggagctgcttctgggggtggccatgcggctggccggctccctcaccgatgtggccgtggagactcagcgccgcaagcacctggcctatctcattgcagaccagggccagctcctgggggccggcaccctcaccaacctctctcaggtggcccaggatggggggccgcaccttgacccacagcacacggggaggaggggtcaccttgaagttcagagcgcgggggctgcggaaaacaaaccagcccttcctgctctgccccccagcctggcccagtcagaccacagctgtggggtgatccaggcctcctcaggctttgtgcacctcaggttctga

SEQ ID NO: 4451 - DNA, 367 bp, Homo sapiens
  source 1..367: mol_type = genomic DNA
caaccctgcgctgaatgctgcgaggaacaaaggagatggacaacatgtctcccaggctgagagccttcctctccgaacccattggagaaaaggatgtctgctgggtggatggcatcagccatgagctcgcgatcaatttggtcaccaaaggtatcaataaggcctacatcctgctgggacaattccttctgatgcacaagaatgaagccgagtttcagaggtggctcatttgctgttttggtgccactgagtgtgaggcccagcagacttctcactgcctcaaggagtggtgtgcctgcttcctgtagacacaaacctcattgctgccccccaccaccctctggggaaaatgacgccttctccacct

SEQ ID NO: 4452 - DNA, 2178 bp, Homo sapiens
  source 1..2178: mol_type = genomic DNA
cgggctttctccggtcgctgccgccaccaccgttgcttcgcgggctgggaggcccggggtccccgggcgaacagaggctgcgggtgggagccttcgcgggcgctgcagagcgggccgggggaggccgggatggagccccgcggagtggactgacgccgcaggggcgagctagccggctccgcgcctctccgcgggatccagacgcctcctggggctgctggcggagggtctgaggcggcgcggccatggctcacctccggggatttgccaaccagcactctcgagtggaccctgaggagctcttcaccaagctcgaccgcattggcaagggctcgtttggggaggtctacaagggcatcgataaccacacaaaggaggtggtggccatcaagatcatcgacctggaggaggccgaggatgagatcgaggacatccagcaggagatcactgtcctcagtcagtgcgacagcccctacatcacccgctactttggctcctacctaaagagcaccaagctatggatcatcatggagtacctgggcggcggctcagcactggacttgcttaaaccaggtcccctggaggagacatacattgccacgatcctgcgggagattctgaagggcctggattatctgcactccgaacgcaagatccaccgagacatcaaagctgccaacgtgctactctcggagcagggtgacgtgaagctggcggactttggggtagcagggcagctcacagacacgcagattaagaggaacacattcgtgggcacccccttctggatggcacctgaggtcatcaagcagtcggcctacgacttcaaggctgacatctggtccctggggatcacagccatcgagctggccaagggggagcctccaaactctgacctccaccccatgcgcgtcctgttcctgattcccaagaacagcccacccacactggagggccagcacagcaagcccttcaaggagttcgtggaggcctgcctcaacaaagacccccgattccggcccacggccaaggagctcctgaagcacaagttcatcacacgctacaccaagaagacctccttcctcacggagctcatcgaccgctataagcgctggaagtcagaggggcatggcgaggagtccagctctgaggactctgacattgatggcgaggcggaggacggggagcagggccccatctggacgttcccccctaccatccggccgagtccacacagcaagcttcacaaggggacggccctgcacagttcacagaagcctgcggagcccgtcaagaggcagccgaggtcccagtgcctgtccacgctggtccggcccgtcttcggagaggtcttttcacagctcaaagagaagcacaagcagagcggcgggagcgtgggtgcgctggaggagctggagaacgccttcagcctggccgaggagtcctgccccggcatctcagacaagctgatggtgcacctggtggagcgagtgcagaggttttcacacaacagaaaccacctgacatccacccgctgaagcgcactgctgttcagataggggacggaaggtcgtttgtttttgttctgagctccataagaactgtgctgacttggaaggtgccctgtgctatgtcgtgcctgcagggacacgtcggatcccgtgggcctcacatgccaggtcaccaggtcaccgtctccttccacccctgcagtgtgctgttgtgcacgtcagggacgctgttctctatgcccactgccctcctccctctcctggcccagcagtattgctcacgggggctccagccgccggcgtggccctcatgagctacgcctgggtcttctgcagactcatgcagccctatggccgctcagaccaaggcgcagagcaactatcagggcagctctgcctcctcctcccatgaggtggggagaggcaacagggcagcccccagaggagtgtcctggccgctgtcctcccggggcccatgatggccatagatttgccttgtggtgttggatcaggtactgtgtctgctcataagtacttgtgtcatccagaatgttttgttttttaagaaaattgaattacttgtttcctgaaatattctgaggttaatatgttagttttcatagaacattgagaggcccctgccactttcaataaagacctgacttgg

SEQ ID NO: 4453 - DNA, 1802 bp, Homo sapiens
  source 1..1802: mol_type = genomic DNA
caagaagaaagaggaggccggcttttcagctagcatcatggcgtggccgtgcatcacgagggcctggggcacgagcagacgccgctgcccgcggcccaggcccaggtccaggccaccggccccgaggctggcagggggcgcgccgcggcggacgccctcaaccggcaaatccgcgaggaggtggcgagtgcagtgagcagctcctacaggaatgaattcagggcatggacggacatcaagcctgtgaaaccaataaaggccaagccccagtacaagcccccagatgataagatggttcatgagaccagctacagtgctcagttcaaaggagaggccagcaagccaacaacagctgacaataaggtcattgatcgcagaagaatacgcagcctctacagcgaacccttcaaggaacccccaaaggtggaaaaacctagtgttcagagttccaaaccaaaaaagacctcagcgagccataagcccacgaggaaggccaaagacaagcaggcggtgtcaggccaggctgccaagaaaaagagcgcggagggcccgagtaccaccaagccagacgacaaggagcaaagcaaagagatgaacaataaactggctgaggcgaaagagagcctggctcaacccgtcagtgattcaagtaagactcaaggtcctgtagccacagagccagacaaggatcaaggttctgtggtcccaggccttctgaaaggtcaaggtcctatggtgcaagagcctctgaagaagcaaggttctgtggtcccagggcctccaaaggatctaggtcccatgatcccattaccagtcaaggatcaagatcacacggtccctgagcctttaaagaatgaaagccctgttatctcagcaccagtcaaggaccaaggtccctcggtcccagttcctccaaagaatcaaagtcctatggttccagcaaaagttaaggatcaaggctctgtggtaccagagtctctaaaggatcaaggtcctaggattcctgagcctgtgaagaatcaagctcctatggtcccagcacctgtcaaggatgaaggtcccatggtctcagcatctgtcaaggatcaaggtcccatggtctcagcacctgtcaaggatcaaggtcccatagtcccagcacctgtcaagggtgaaggtcccatagtcccagcacctgtcaaggatgaaggtcccatggtctcagcacctatcaaggatcaagatcccatggtcccagagcatccgaaggatgaaagtgccatggccacagcacccataaagaatcaaggttccatggtctctgagcctgtaaagaatcaaggtttagtggtctcagggccagtcaaggatcaagatgttgtagtcccagagcatgcaaaggttcacgattctgcagttgtggcacctgtaaagaatcaaggtcctgtggtccccgagtccgtgaagaatcaagaccccattctcccagtactagttaaggatcaaggccccacagtcctacagcctccaaagaatcaaggtcgtatagtccctgaacctctgaagaatcaagttcctatagtcccagtgcctctgaaggatcaagatcctctggtgccagtaccagcaaaggaccaaggtcctgcagtccctgaacctctgaagactcaaggtcccagggaccctcagctacctactgtctcacctctaccccgagtcatgatcccaactgccccccatacggaatacattgagagctccccttgacactcaccccttgacacaccaatgaaggagctgacagtgagagtgctcccctccca

SEQ ID NO: 4454 - DNA, 2818 bp, Homo sapiens
  source 1..2818: mol_type = genomic DNA
atggccctgggtgaagaaaaggcagaagcggaagcatctgaagacacaaaggcccagtcctatgggagagggagctgcagggagcagcccccacgcctggaagctgagggagggctcatctcccctgtatggggggcagaagggatacctgcccctacttgctggattgggactgaccctggcggcccctctagagcccaccagccacaggccagtgatgccaacagagagcccgtagctgagaggtctgagcctgcactcagtggcctgcctcctgccaccatggggtctggagaccttctgctctccggggaaagccaggtggagaagaccaagctttcttcctccgaggagttccctcagactctgagccttcccagaacaacaactatttgctcaggacatgatgctgataccgaagatgatccatccctagcagatttgccccaggcactggacctcagccagcagcctcacagctcaggtctctcttgcctgtcacagtggaagtccgtgctgagcccaggttccgcagctcagccttccagctgcagcatctctgcttcctccacaggcagcagtctccagggtcaccaggagagggcggagcctcgtggtggttctctggccaaggtctcctcctccctggagccggtcgtcccccaggaaccttcctctgtggtggggctaggacctcggccccagtggtcaccacagcctgtgttctctgggggtgatgcttctgggctaggcaggagacgcctctccttccaggctgagtactgggcctgtgtgctgccagattccctgcctccatcacccgaccgccactcccctctctggaacccaaataaagagtatgaagatctgcttgactatacttacccactgaggcccgggcctcagctcccaaagcaccttgatagccgtgtgccagctgaccctgtcctgcaggactccggggtagacctggatagcttctctgtctctccagcaagcaccctcaaatcacctactaatgtctcccccaactgcccaccagcagaggccactgccctgccattttctgggcccagagagccaagccttaagcagtggccctccagagtaccccagaaacagggtggcatgggcttggcatcttggagccaacttgcatctacccccagagccccaggcagtagggatgctcgttgggagcgcagagagccagccctgaggggtgcgaaggaccggctgactataggcaagcaccttgatatgggctctccccagctaaggacacgggacagagggtggccctcgcccaggccagagagggagaagaggaccagccagagtgcccggcgccctacctgcacagagtctaggtggaaatcagaagaggaagtggaaagtgatgacgagtatcttgccctccccgctcggctgacacaggtttctagcctggtttcgtatctaggatccatttctaccttggttaccctgcccactggggatatcaaagggcagagccccttggaagtgtcagacagtgatgggccagcttccttcccttcaagctccagccaaagccagcttccccctggagctgccctccaaggatctggggatcctgagggccagaatccctgtttcctgcgctccttcgtccgtgcccacgactccgcaggggaaggcagtctggggagcagccaggccctcggggtctcctctggactgctgaaaacacgcccctccttgccagctaggttggaccggtggccattctcagacccagatgttgaagggcagcttcccaggaaaggaggagaacagggaaaagaatcactggtgcaatgtgtgaagacattttgctgtcagctggaagagctgatctgctggctgtataatgttgcagatgttactgaccacgggactgcagccaggtccaatcttacaagtctcaagtcttctctgcagctttaccgggtaatatgcggtcctggctctggcttgttccctcacaagagtgtggctaaattactcgattacaaagtaaaatctcaaataaccaatgtctggtatgttatagctcagttgactattatacctgaaatctaattagagcttcacattcttaaagcggaacgctttgtaaaatgcatgaattatttcccaggccaaatggagcttgaagatacaatatatttatctcaaatcaaaaatactttaggttttgggctggcaggtgcagtgggacaagtcttttatcccagctactctggaagctgagacaggaagattgcttgagcccaggagttcgagtacagcctgagcaacatagcaagacccccccccctcaaaaaaaagttttttcttaattaaaaacaaaaatactttagggtgatttgcaatataattttccaaatgtctcagggattataaatacagacttgcactattatgacgcctctagttatgtatggctattgaagtaaaattaaagactcagatttttttatttgcactagccacattctgcatgttcaaccatcacatttgtctagtggctaccacgtagaacagtgcagatgtagaacacttccatcaccacataaagtcctattggactgcaccactatttaaagatctgagctgaaattgtactgactccagaatctacaatagggcattttgatggtatttaaatagaaatctaggccaggcaccttggctcacactattaatcccagcactttgggatgctgaggctggaggatcgcttgagcccgggagttccagaccagcctgggcaatatagtgagacctcgtctct

SEQ ID NO: 4455 - DNA, 1942 bp, Homo sapiens
  source 1..1942: mol_type = genomic DNA
agcgtccaggacagcccaggctcagtcatgaaaagctatgtgtcagagaccatggcgagcccagggaaagacaattatcgaatgaagagctataagaacaatgctctaaaccctgaagaaatgagacgaagaagagaggaagagggcattcagctccggaagcagaagcgagagcaacaactttttaaacggagaaatgtggagctgattaatgaagaagctgccatgttcgatagtcttctcatggactcttatgtgagctctaccactggggagagtgtgatcacaagagagatggtggagatgctcttttctgatgattctgacctgcagttagcaaccacacagaaattccggaaactgctctccaaagagcctagtcctccaatagatgaagttatcaacactccaagagtggtggatcggttcgtggagtttctgaagaggaatgagaattgtacattacagtttgaagctgcctgggctctaacgaatattgcctctggaacctctcagcagaccaaaattgtcattgaagcaggggctgtccccatttttatagagctgcttaattcagactttgaggatgttcaggaacaggcagtctgggcactgggaaacatagctggagatagctctgtttgccgagattacgtcttgaactgttccatccttaatcctttgttaacactccttaccaagtccacacgactgacgatgacacggaatgcagtctgggccctgtcaaatctctgccgagggaaaaacccacccccagagtttgcaaaggtctctccttgtttgcctgtactgtctcgcctactcttcagcagcgactcggacttgctggcagatgcttgctgggccctttcttatctgtctgatggccccaatgagaagatccaggcagtcatagactccggagtctgccggagattggtagagctgctgatgcacaatgattacaaagtggcttctcctgccctgagagccgtgggtaacatcgtcactggggatgacatccagacccaggtcattcttaactgttcagccctaccttgccttctccacttgttgagcagtcccaaggagtcaatccggaaggaagcttgctggactatttcaaatattactgctggcaacagggctcaaatacaggctgttatagatgcaaatatcttccctgtgttgatcgaaatccttcagaaagcagagtttcgtacaaggaaagaggcagcctgggccatcaccaatgccacatcaggaggaacccctgagcagatcaggtacctggtctcactgggctgcatcaaacccctatgtgacttgctgactgtaatggattcgaagattgtgcaagtggccctcaatggactggagaacatcctgcggcttggagagcaagagggcaagcgcagtggctcaggggtcaatccttattgtggcctcatagaggaagcctatggcttggataaaattgagtttctccagagccacgagaaccaggagatctaccagaaggccttcgacctcattgagcactactttggtgtagaagacgatgatagcagcctggctccccaagtcgatgaaacgcaacagcagttcatcttccagcagcctgaggcccccatggagggcttccagctataatatctgcctccagggaggggaggggatgggaagcaccaccagccagcggaagagcagccctctggtgggcgggaaaccagtgtccccaccatcagccaccacacacctctgctgccctggagactgtgctcttgacctgctccgcccccttccctggagggagcaccctctggacagacagaaccatctgaggctcacctttgggttttgtgacaagaaggggacgtgttgggtttttcttccttacactatattttggctgcacacatgtctttaacccaggagccca

SEQ ID NO: 4456 - DNA, 1975 bp, Homo sapiens
  source 1..1975: mol_type = genomic DNA
ctcgcgggtccgggagcgcggcggagacgatgcctgagatcagagtcacgcccttgggtgcctgccctgtgctgtcctggaacctggtccttccaccgggcagggggtcgagggcaccttccagcacagacaccaggacgggattccatgtcctcccccatggcgggccggccaggacgtgggccgaagctgcatcctggtctccattgcgggcaagaatgtcatgctggactgtggaatgcacatgggcttcaatgacgaccgacgcttccctgacttctcctacatcacccagaacggccgcctaacagacttcctggactgtgtgatcattagccacttccacctggaccactgcggggcactcccctacttcagcgagatggtgggctacgacgggcccatctacatgactcaccccacccaggccatctgccccatcttgctggaggactaccgcaagatcgccgtagacaagaagggcgaggccaacttcttcacctcccagatgatcaaagactgcatgaagaaggtggtggctgtccacctccaccagacggtccaggtagatgatgagctggagatcaaggcctactatgcaggccacgtgctgggggcagccatgttccagattaaagtgggctcagagtctgtggtctacacgggtgattataacatgaccccagaccgacacttaggagctgcctggattgacaagtgccgccccaacctgctcatcacagagtccacgtacgccacgaccatccgtgactccaagcgctgccgggagcgagacttcctgaagaaagtccacgagaccgtggagcgtggtgggaaggtgctgatacctgtgttcgcgctgggccgcgcccaggagctctgcatcctcctggagaccttctgggagcgcatgaacctgaaggtgcccatctacttctccacggggctgaccgagaaggccaaccactactacaagctgttcatcccctggaccaaccagaagatccgcaagactttcgtgcagaggaacatgtttgagttcaagcacatcaaggccttcgaccgggcttttgctgacaacccaggaccgatggttgtgtttgccacgccaggaatgctgcacgctgggcagtccctgcagatcttccggaaatgggccggaaacgaaaagaacatggtcatcatgcccggctactgcgtgcagggcaccgtcggccacaagatcctcagcgggcagcggaagctcgagatggaggggcggcaggtgctggaggtcaagatgcaggtggagtacatgtcattcagcgcacacgcggacgccaagggcatcatgcagctggtgggccaggcagagccggagagcgtgctgctggtgcatggcgaggccaagaagatggagttcctgaagcagaagatcgagcaggagctccgggtcaactgctacatgccggccaatggcgagacggtgacgctgcccacaagccccagcatccccgtaggcatctcgctggggctgctgaagcgggagatggcgcaggggctgctccctgaggccaagaagcctcggctcctgcacggcaccctgatcatgaaggacagcaacttccggctggtgtcctcagagcaagccctcaaagagctgggtctggctgagcaccagctgcgcttcacctgccgcgtgcacctgcatgacacacgcaaggagcaggagacggcattgcgcgtctacagccacctcaagagcgtcctgaaggaccactgtgtgcagcacctcccagacggctctgtgactgtggagtccgtcctcctccaggccgccgccccttctgaggacccaggcaccaaggtgctgctggtctcctggacctaccaggacgaggagctggggagcttcctcacatctctgctgaagaagggcctcccccaggcccccagctgaggccggcaactcacccagccgccacctctgccctct

SEQ ID NO: 4457 - DNA, 2579 bp, Homo sapiens
  source 1..2579: mol_type = genomic DNA
atggaggccgcggcggtgacggtcacccggtcggctacacggcggcggcggcggcagctgcaggggctggcggccccggaggcggggacgcaggaggagcaggaggatcaggagccgcggccgcggcggcggcggccgggaaggagcatcaaagatgaagaagaagagacagtctttcgagaggtggtcagtttttccccggaccccctgccagttagatattatgacaaggacaccaccaaaccaatcagcttttacttgtcttcgctggaggagctcttggcgtggaagccccgcttggaggatggctttaatgtggccctggagcccctggcgtgtcgccagccccctctgagcagccagaggccccggactttgttgtgtcatgacatgatgggcgggtacctggatgacaggttcattcagggctcggtggtgcagactccctatgctttctaccactggcagtgcatcgacgtctttgtgtacttcagccaccacaccgtcaccattcccccagtgggctggaccaacactgcccacaggcatggggtctgcgtgctggggactttcatcacggagtggaatgaagggggaaggctctgtgaagccttcctggccggggatgagcgctcgtaccaggcagtggctgaccggctggtccagatcactcagttttttcgttttgatggctggctgatcaacatcgagaactcgctgagtctggccgctgtggggaacatgcctcctttcctgcggtacctcaccacacagctgcaccggcaggtcccagggggcctggtgctctggtatgacagcgtggtgcaaagtgggcagctcaaatggcaagacgaactcaaccagcacaacagggtcttctttgattcctgcgacggcttcttcactaactataactggcgggaggagcacttggagcggatgctggggcaggctggggagcgccgggctgatgtgtacgtgggcgtggatgtgtttgctcgagggaacgtggtcggaggccgattcgacacagacaagtcgttggagctgatccgaaagcatggcttctccgtggctttgtttgcccccggctgggtgtatgagtgtctggagaagaaggatttcttccagaaccaggacaagttctggggccgactggagcgttatctgcccacacatagcatctgctccttgcctttcgtcacgtccttctgcctgggcatgggtgcacggagggtctgctatggccaggaagaggcggtagggccctggtaccacctgagcgcccaggagatccagcccttgtttggagaacacaggctgggaggggatggccggggctgggtgaggacgcactgctgcctggaggatgcctggcacggaggcagctccctgctcgtccggggtgtgatcccaccggaggttggaaatgtggctgtgaggttattttccctgcaggccccagtgccacccaagatttacctgtccatggtgtataagcttgaggggcccacggacgtcacagttgctttggagctgaccacaggggatgccggcagctgccacatcggtggcatctcagtgttgaacgcagaaacaagctcaagacacagcctccgacccctccgggtgccccccaccaagctggccagatgggtgggccgctgcggccggcagctgagtgggggctgggtccagcactgctacgaggtgagcctgcgtgggtgcctgctgctagacctcctcgtttgcttctcacggccgccgggtagtcgggaggaggagagcttcacctgtcggcttggagagatccaggtggtggacgctgccagcctgctggcccctctgccccaggtgcaggccgtcaccatctctcacatccgctggcagccatccgcctctgagcgggaggggccccctgctctgctccagctcagctgcaccctgcactggtccttcctcctctcacaagtccgttgcttccgaatccactgctggggagggatgagtgatgactctccgggcagggagctgccgaggccagagatgcccatgttcctggggttggcttttgccacccagtaccggatagtggacctgctggtggaagccgccgggcccggccaggatcgtcgcatggaatttctggtggagcctgtccccaaggaagggttccgggtacctcaggccgagtggggcagggcagttctgctttattcagcccctgcatgagcggatgctaaggccgggtggtctcctggcctcgggctgaggcctcttcccggctgtctgcccctggcctgcgctggacctgctaagtgcccacagtggcagcgaggtcccggtcccggggctggggtgggagaccccgggctgagtgctgtggctttctggtggggggcgatggaaacaggaaaccaagcagtgggatcgcagcgttggtcactgcgaggcgagtggcgggctttctgtttctgccttgtccctccccacggtacctggttcccaggtgaaaatgaaaggaggggagaagttgagaacagaacattccataaaggatatttcctaataggctgcaa

SEQ ID NO: 4458 - DNA, 2449 bp, Homo sapiens
  source 1..2449: mol_type = genomic DNA
tgagggcggaagggacaggcataggagggactctgtgggaggcatttggggttggctttcctaggcccctggcccacctccaccttggctttggagaaggggagccgctacaggggatggcagctgggaaaggccccctggccacccccagcaaccccactgctggcttctgtgtcagggcccgccgaaacccaggcccactcttcctagaggcctgtcagcagccactagggccagggactgtgggtgaggccactcggaccctgcccccagtctgtctgggcctgagaagggcctggtgtgcggtgggcttgcagcactcagtgatggtcaggccaggcaggttatgtgttgccctctcccaccctagcgtccccaccctccccaggcagactcttcccagcagcaagcggaagcccgggcagaggctgctgtcataggcagaggcccccgctgatgccggccctgcttgcccctcacactgccaggtcttcacgtgctctgtgtgccaggagacattccgccgaaggatggagctgcgggtgcacatggtgtctcacacaggggagatgccctacaaggtcaggcttggcctgtctccagggccagggttgggtggccccaggatccttcctgctgagccctttacgtggggtgctgtcaggcacctccctcacagtagctgtcagggagcctgccttccctgccttccctgcctttccagtgcccccttatctaggcagggcctgtctgcagcctcacctccaaggtccttattaggcccttgtttctttccatggaggacaggcttggcatcctctgggcagctgagccctgaggccctcctttgcaccatccttcacaccagatcaggggtcctcccagaatcatctcaccggggcctccctctagttcctgccctatagcccaagggtgggtggcagggtttcatgggtgcaggccgccctggaggtgactgtgggcctctttttcagtgttcctcctgctcccagcagttcatgcagaagaaggacttgcagagccacatgatcaaacttcatggagcccccaagccccatgcatgccccacctgtgccaagtgcttcctgtctcggacagagctgcagctgcatgaagctttcaagcaccgtggtgagaagctgtttgtgtgtgaggagtgtgggcaccgggcctcgagccggaatggcctgcagatgcacatcaaggccaagcacaggaatgagaggccacacgtatgtgagttctgcagccacgccttcacccaaaaggccaatctcaacatgcacctgcgcacacacacgggtgagaagcccttccagtgccacctctgtggcaagaccttccgaacccaaggtgaggtacgccctgcccctcccctcgcctccccatcctgaggccaaggccacaggctgagctcttgccttgtgcctgcagccagcctggacaagcacaaccgcacccacaccggggaaaggcccttcagttgcgagttctgtgaacagcgcttcactgagaaggggcccctcctgaggcacgtggccagccgccatcaggagggccggccccacttctgccagatatgcggcaagaccttcaaaggtacctgggcggccctgggagagccatttcctgctcatccgagttggagggtctctgaggaggaaacgctcctttcttgcctgtgaacctcttttgtgccccacatggttagagttgagagtggacctgctttgaaggcaggggtgtcctgtgcagtagtgaccctgggtggcactggagagcctggcagggcctgtgcagcacttgtaaaccactggtcccctcccttgctgcctgtcccaacctcctgctgggtttcctcgagggtcccggggctcctgcatgatcccccacggtgttctccctcttgcagccgtggagcaactgcgtgtgcacgtcagacggcacaagggggtgaggaagtttgagtgcaccgagtgtggctacaagtttacccgacaggtaggccagggcctgggccccttcccctaccctaggatcccccaaagttctgagctcaccctccccgccaggcccacctgcggaggcacatggagatccacgaccgggtagagaactacaacccgcggcagcgcaagctccgcaacctgatcatcgaggacgagaagatggtggtggtggcgctgcagccgcctgcagagctggaggtgggctcggcggaggtcattgtggagtccctggcccagggcggcctggcctcccagctccccggccagagactgtgtgcagaggagagcttcaccggcccaggtgtcctggagccctccctcatcatcacagctgctgtccccgaggactgtgacacatagcccattctggccaccagagcccacttggccccacccctcaataaaccgtgtggctttgg

SEQ ID NO: 4459 - DNA, 1422 bp, Homo sapiens
  source 1..1422: mol_type = genomic DNA
actgcgcatgcgtgtcagtggcgctagcggcggacccggctgggcagttccttccccagaaggagagattcctctgccatggagtcctacgatgtgatcgccaaccagcctgtcgtgatcgacaacggatccggtgtgattaaagctggttttgctggtgatcagatccccaaatactgctttccaaactagagcaccgagggctgctttcaatccgctatcccatggagcatggcatcgtcaaggattggaacgacatggaacgcatttggcaatatgtctattctaaggaccagctgcagactttctcagaggagcatcctgtgctcctgactgaggcgcctttaaacccacgaaaaaaccgggaacgagctgccgaagttttcttcgagaccttcaatgtgcccgctcttttcatctccatgcaagctgtactcagcctttacgctacaggcaggaccacaggggtggtgctggattctggggatggagtcacccatgctgtgcccatctatgagggctttgccatgccccactccatcatgcgcatcgacatcgcgggccgggacgtctctcgcttcctgcgcctctacctgcgtaaggagggctacgacttccactcatcctctgagtttgagattgtcaaggccataaaagaaagagcctgttacctatccataaacccccaaaaggatgagacgctagagacagagaaagctcagtactacctgcctgatggcagcaccattgagattggtccttcccgattccgggcccctgagttgctcttcaggccagatttgattggagaggagagtgaaggcatccacgaggtcctggtgttcgccattcagaagtcagacatggacctgcggcgcacgcttttctctaacattgtcctctcaggaggctctaccctgttcaaaggttttggtgacaggctcctgagtgaagtgaagaaactagctccaaaagatgtgaagatcaggatatctgcacctcaggagagactgtattccacgtggattgggggctccatccttgcctccctggacacctttaagaagatgtgggtctccaaaaaggaatatgaggaagacggtgcccgatccatccacagaaaaaccttctaatgtcgggacatcatcttcacctctctctgaagttaactccactttaaaactcgctttcttgagtcggagtgtttgcgaggaactgcctgtgtgtgagtgcgtgtgtggatatgagtgtgtgtgcacatgcgagtgccgtgtggccctgggaccctgggcccagaaaggacgatgaactacctgcagtggtgatggcctgaggcctggggttgaccactaactggctcctgacagggaagagcgctggcagaggctgtgctccctcctcaggtggcctctggctggctgt

SEQ ID NO: 4460 - DNA, 1653 bp, Homo sapiens
  source 1..1653: mol_type = genomic DNA
aagttgccggtggaattggcccaggatgacagctggagaatggagtcagttttatccaagtatgaagatcagattactattttcactgactacctagaagaatatccagatacagatgagctggtatggatcttagggaagcagcatctccttaaaacagattgggaaagaaagaccttttaacctgaaactgctaacagcccagcacccagataaagccagagcttggaaagaggcagctctgagatttgtgtctttctgaggagacatcctcttcagaggccctcacttagcgtggaggaaggaacaggaagaggctgatgaaaaggcaggagaggaagttaggcattgtggagctcctcctgagcctggcttcattattttgattggagaattctgaacagtggaaagcctggagctagcaattaggagaccttttgtattcagactcttctaactcagaaaaatctaagctgttgtctgatataagtgctcgtctatggtttacatacagaaggaaattttcaccaattggtggaacgggcccttcatcagatgctggttggggatgtatgctacgctgtggacagatgatgctggctcaagcccttatctgtagacacttgggaagggactggagctgggagaaacaaaaagaacaacccaaagaataccaacgcatcctacagtgcttcttagatagaaaagattgttgctactctatccatcaaatggcacaaatgggtgtaggagaagggaaatcaattggagaatggtttggaccaaatacagttgcacaggtgttaaaaaaacttgctttatttgacgaatggaattccttggctgtttatgtttcaatggataacacagtggtcattgaagatatcaaaaaaatgtgccgtgtccttcccttgagtgctgacacagctggtgacaggcctcccgattctttaactgcttcaaaccagagtgacgagctcatcttcttggaccctcatacaacccagacctttgttgacactgaagagaatggaacggttaatgaccagactttccattgcctgcagtccccacagcgaatgaacatcctaaacctggatccttcagttgcattgggatttttctgcaaagaagaaaaagactttgataactggtgtagccttgttcagaaggaaattctaaaggagaatttaaggatgtttgaattagttcagaaacatccatcacactggcctccctttgtacctccagccaagccagaagtgacaaccactggggcagaattcattgactctactgagcaactggaggagtttgatctggaggaagattttgagattctgagtgtgtagaatcctgggaactcaacttgaaggtctgtcttccatctggcaccataaaaacatgaacttattgcataaaacttttctagtcagcaagtgcctgatatgccaatagcatacaaactcaatagcaatcatgactgagccaatcactgtttctcagaaaaacaaaacaaaacaaaacaaatgacagtaacccttccccggaaagaaatagaacaatcatggagcctaggagcagagagatgaggaggagttcattgcttcccagcttgtgttatatggctacagcaagtcttcagctgctgca

SEQ ID NO: 4461 - DNA, 1632 bp, Homo sapiens
  source 1..1632: mol_type = genomic DNA
acagaatgctgggctgagagcaggactgagatcctagaggcagaatcccagtctacccgtactctctgggaggaagtgatgagaacttgcagcagggtggtggtagtgaaagagaagaatgaaagacaaggaagcatcagtggaacttgatgtgtggctggataccagaaatgcagaggaagttagtcaaaggttcccgtcctgatgactggagatcatggtatcactgactgagctctaggggttgtgaaatagagctcattaggcagaggatgagagcacagtcagacgaactcgaaaaaatagaaaagcatggccgatcttccaaagacaaggaaaatgccaagtctctggacaaacctgaacagttcctttatgaactgtcactaatccccaacttttcagagcgagtcttttgcatcctgttccagtccacattttcagaaagcatttgctcaattcgtcgcaaactggaattactacagaaattgtgtgagacattaaaaaatggcccaggggttatgcaggttctaggtttggttcttgcctttggcaactacatgaatggaggaaataagactcgaggacaggcagatggctttggattagacattcttccaaaactgaaagatgtcaagagcagtgacaatagcagaagccttttgtcatatattgtttcgtattatctccgaaattttgatgaggatgctggaaaagaacagtgcctctttccactgccagaaccccaggacctttttcaggcctcacagatgaagtttgaagattttcaaaaagatctcagaaaactgaagaaagacttgaaagcctgtgaagttgaagcagggaaagtataccaggtctcctcaaaagagcatatgcagcctttcaaggaaaacatggaacaatttattattcaagccaaaattgaccaagaggcagaggaaaattcactgacagagactcataaatgctttttggagaccacggcatatttcttcatgaaaccaaaacttggagagaaggaggtgtccccaaatgctttcttcagtatctggcatgaattcagctctgactttaaagacttctggaagaaagagaacaaacttcttctacaagagagagtaaaagaagccgaagaggtgtgtagacagaagaaaggaaaatcactttataaaataaaaccaagacatgactctggaattaaagcaaagataagcatgaaaacttgaacaatgaaaagcagaatgaaaatgagtcattgcaacgactttcacaaaattcagctgacctgagagtgggagggaaactaccgtcattctgctcatgtttcttcttgacctcttgcataatctttttgttttctagacagttcactaattgttgaattttactgtatattcatataaaaatgcaaacgtactagaccagtggagaatttgacaccttttctttttgtaaaagtttatggtattataccgatagaccaaaacagcatgtgtaagaggcagtatctgcactaattctcaacatgctaaacattaactacaattcactgttgtgagaatattcctcgtcacagcaaaaacactttcctttctactgacaaccagtcctccacatcacagcatttag

SEQ ID NO: 4462 - DNA, 570 bp, Homo sapiens
  source 1..570: mol_type = genomic DNA
ctgcttccgggtcacgccttgacagcggctttcaacccccacctcagcccagcaattcgtaccggacctaccgggattgctgcgatctgtttagagcccgtgcagaaagtgacaccgcacgtccttgcgtttcgtgcccttgccccccgccccctagcctcagcgagacagctgccgcgggccctcccgcagcaggcagtttggagcatgtgaacaccttgagccttgatgagttccagtatgtggtatattatgcagagcattcagagcaaatactctctctccgagcgcttaatccgaacaattgctgccatccgttccttcccacatgataatgtagaggacctcatcagagggggagcagatgtgaactgcactcatggcacactgaagcccttgcactgtgcctgtatggtgtcagatgctgactgtgtggagttacttctggaaaaaggagccgaggtgaatgccctggatgggtataaccgaacagccctccactatgcagcagagaaagatgaggcttgtgtggaggtcctattggagtatggtgcaaaccccaatgctttg

SEQ ID NO: 4463 - DNA, 2224 bp, Homo sapiens
  source 1..2224: mol_type = genomic DNA
attctccgggctgcggagggtaaagagcgggctcgggccgaggctggagggctgggtggggccagagcggcgcttcgggggcccgcggaggacgagggagggagagaatctgaggagctgggttgccattaggggactcctgaggtcctatctccaggctgcggtgactgcactttccctggagtggaagctgctggaaggcggaccggccgccatgtccacgttcaggcaggaggacgtggaggaccattatgagatgggggaggagctgggcagcggccagtttgcgatcgtgcggaagtgccggcagaagggcacgggcaaggagtacgcagccaagttcatcaagaagcgccgcctgtcatccagccggcgtggggtgagccgggaggagatcgagcgggaggtgaacatcctgcgggagatccggcaccccaacatcatcaccctgcacgacatcttcgagaacaagacggacgtggtcctcatcctggagctggtctctggcggggagctctttgacttcctggcggagaaggagtcgctgacggaggacgaggccacccagttcctcaagcagatcctggacggcgttcactacctgcactctaagcgcatcgcacactttgacctgaagccggaaaacatcatgctgctggacaagaacgtgcccaacccacgaatcaagctcatcgacttcggcatcgcgcacaagatcgaggcggggaacgagttcaagaacatcttcggcaccccggagtttgtggccccagagattgtgaactatgagccgctgggcctggaggcggacatgtggagcatcggtgtcatcacctatatcctcctgagcggtgcatccccgttcctgggcgagaccaagcaggagacgctcaccaacatctcagccgtgaactacgacttcgacgaggagtacttcagcaacaccagcgagctggccaaggacttcattcgccggctgctcgtcaaagatcccaagcggagaatgaccattgcccagagcctggaacattcctggattaaggcgatccggcggcggaacgtgcgtggtgaggacagcggccgcaagcccgagcggcggcgcctgaagaccacgcgtctgaaggagtacaccatcaagtcgcactccagcttgccgcccaacaacagctacgccgacttcgagcgcttctccaaggtgctggaggaggcggcggccgccgaggagggcctgcgcgagctgcagcgcagccggcggctctgccacgaggacgtggaggcgctggccgccatctacgaggagaaggaggcctggtaccgcgaggagagcgacagcctgggccaggacctgcggaggctacggcaggagctgctcaagaccgaggcgctcaagcggcaggcgcaggaggaggccaagggcgcgctgctggggaccagcggcctcaagcgccgcttcagccgcctggagaaccgctacgaggcgctggccaagcaagtagcctccgagatgcgcttcgtgcaggacctcgtgcgcgccctggagcaggagaagctgcagggcgtggagtgcgggctgcgctaggcgcagtggggtgggccaggccccaggacagccggagctcggcctgcggtgggggcgcttcctgtggacgctgcgcctcccatcgcccgggtgcctgtccttgcccagcgccaccaggctggaggcggagtgggaggagctggagccaggcccgtaagttcgcaggcaggggtgggtgtgggacggggctgcttctctacacagcctccacgctggccttcaccttcacccctgcatcgtcggtgaccctgggaccctccaggcagcgtggcctgtggcaccgtgagggttgggacccaccgaggcgcagaggcggcccgaatgcagccctggttcaggcccggaggagggtttgcgggtagttgcacggacaattcggcggggtgctgcctgttgctgccattagcccaggaggaggtcgtgggacggggagggtgggatggacggcggacaggcagtccccacgctgctgggtggcgccgggcttggtggggtcttccactgtgtgcccttctcgccgaggccggtcccccgggtgtggggtgccctgctgcggactcctccgcgagccccatcgtcgcgcctgtggacgcctaggcaagagcggccctctgcagccaagagaaataaaatactggcttccag

SEQ ID NO: 4464 - DNA, 3068 bp, Homo sapiens
  source 1..3068: mol_type = genomic DNA
ggggattggggtcgggtcctccccagtgagaggcgacaggagctcactgcctctcgggccctcacaatcacacctgtcacaggtatacacgctgccactcacaaacacacgcttgcactcccagcctcactgacacgctgccatacagccgctcacagccagccagacactgctgcacctgagagcaggtggccgcgggtcttctcccttcactctccacatttggggatcaggtccggcacctgctgcgccagacaggccttgctgggcacgcgcctctgagagtccaaggaggtggcttccagagctgcagcacttcaggccggctccggtggagcgatcagagaaacaaggagaccagtgctggtccagtggctgtgatgggaaaagattattacaagattcttgggatcccatcgggggccaacgaggatgagatcaagaaagcctaccggaagatggccttgaagtaccacccagacaagaataaagaacccaacgctgaggagaagtttaaggagattgcagaggcctatgatgtgctaagtgaccccaagaaacggggcctgtatgaccagtatggggaggaaggcctgaagaccggcggtggcacatcaggtggctccagtggctcctttcactacacctttcatggggacccccatgccacctttgcctccttctttggtggctccaaccccttcgatatcttctttgccagcagccgctccactcggcccttcagtggctttgacccagatgacatggatgtggatgaagatgaggacccatttggcgctttcggccgttttggcttcaatgggctgagtaggggtccaaggcgagccccagaaccactgtaccctcggcgcaaggtgcaggaccccccagtggtgcacgagctgcgggtgtccctggaggagatctaccatggctccaccaagcgcatgaagatcacaaggcgtcgcctcaaccctgatgggcgaactgtgcgcaccgaggacaagatcctgcacatagtcatcaagcgtggctggaaggaaggcaccaagatcaccttccccaaagaaggcgacgccacacctgacaacatccctgctgacatcgtctttgtgctcaaagacaagccccatgcacacttccgccgagatggcaccaacgtgctctacagtgccctgatcagcctcaaggaggcgctgtgtggctgcactgtgaacattcccactatcgacggccgagtgatccctttgccctgcaatgatgtcatcaagccaggcaccgtgaagagactccgtggggagggccttcccttccccaaagtgccaactcagcgaggagacctcattgttgagttcaaagttcgcttcccagacagattaacaccacagacaagacagatccttaagcagcacctaccctgttcctaggctctgccccagccagtccagagcctaccacagcaatacccccaacactcactccactcaatgtgcacccagcttgatgtccactggacactggcaactttttctaaaatgcaaaaaaaagccactggttttcaggaaaatgttcctgtccctgaccccttttagagctgggctgcctggggggagtgggagggaggtggggagagctagcccaggccaggggtcaatgttcatgtcactagctttcaatccagtttccactgcagtggctggagagtgacctgagtgctacttgaagatatgtagagattccttatccatgcctgtacatagcatgtcctcctcccctcagctttgctaataccagtcccctcccttccctttggcttcctgctgttgggggtggaaaagactagaaaggacattgctttctcagccccacccccaggtccacagtgtccaaggtaatggcacacatattcatgcacaagaagcactcacctagagctgtctgtgcctctctgggagaaaggagagaggataagaagggaaagttcacaacctgtgaacagggacttgagcacgagacacttttcatctggagcaggggggtgagctcctcagcagcctccgtaacagctgccctgcctacacctgcagagctggaggttctgtcctccctgctgctctcaggagtgttcaagggtggagggcagggaatggggcctgaggtattaaggctaagaggtgggggacagggcccatctaccagccttcatcaggaagggaaagggctttggggtcaggtggcagctattccccaccaagagattcagggtcacaggtttttccccacacctctgaactcagggcctagccacccccaaacttccaaatcccacttttgtgatatgtgaagctactcatttcttacccttggaggctgtgtggggaatttccagcccttttatgcctgtgtgatcccaccccacccccatagttgtataaaggtcatagtgaagaagctgggggaagactgcttcagccagatcctggggtggggtctttaggttttctcactttgacaacccccgaatgtttttatagtagtttttttgtatttttttgtaatgacagtattatgtaaaaaataaagtattttaaaaatatggcatctgagcaggagcaacaaacctgggatgggggtggctgaggagggccactgtcatcctccctcccgggctctggtcacctttgagaagcccaagcaggccctcagtataagctgaagctgacctctgccttcctcgaagcctcctgggatttctaaaacttatacttcaaacacagcacagacagaaagtaccactcagctattagaagaaacatctatttgggaaggaaaaatatccctgctcatgagagacagagaccattgtcttcagatgtgctagcatgaaaacagattttctcttcttgtctaaattttctctgagtcagacaaattttccttctaggagaaaatttttttctaggagggggtggagaactttttttttttttttttttttttgacacggagtcttgctctgtcgcccaggctggagtgcagtgatgcgatcttggttcactgcagcctct

SEQ ID NO: 4465 - DNA, 2881 bp, Homo sapiens
  source 1..2881: mol_type = genomic DNA
gcggcggtgcctgggcggcagcagcagcagtagcggcagccctgaggacgatatggtgtaagatacttcttcaagattggacagctggggaccttcttctgattaaccttaaaccaacttgtagccatagagacacctcacaaggttcccatttttgttgttgttgttgttgattttctgctcacacctttcctgaccttgcaaccatgtatggaagtgcccgctctgttgggaaggtggagccgagcagccagagccctgggcgttcacccaggcttccacgttcccctcgcttgggtcaccgtcgaaccaacagtacgggagggagttcgggaagcagtgttggaggtggcagtgggaaaaccctttcaatggaaaatatacaatctttaaatgctgcctatgccacctctggccctatgtatctaagtgaccatgaaaatgtgggttcagaaacacctaaaagcaccatgacacttggccgttctgggggacgtctgccttacggtgttcggatgactgctatgggtagtagccccaatatagctagcagtggggttgctagtgacaccatagcatttggagagcatcacctccctcctgtgagtatggcatccactgtacctcactcccttcgtcaggcgagagataacacaatcatggatctgcagacacagctgaaggaagtattaagagaaaatgatctcttgcggaaggatgtggaagtaaaggagagcaaattgagttcttcaatgaatagcatcaagaccttctggagcccagagctgaagaaggaacgagccctgagaaaagatgaagcttccaaaatcaccatttggaaggaacagtacagagttgtacaggaggaaaaccaggtggatgctctccgattgcgtttggaagagaaggaaaccatgttgaataaaaagacaaaacaaattcaggatatggctgaagagaaggggacacaagctggagagatacatgacctcaaggacatgttggatgtgaaggagcggaaggttaatgttcttcagaagaagattgaaaatcttcaagagcagcttagagacaaggaaaagcagatgagcagcttgaaagaacgggtcaaatccttgcaggctgacaccaccaacactgacactgccttgacaactttggaggaggcccttgcagagaaagagcggacaattgaacgcttaaaggagcagagggacagagatgagcgagagaagcaagaggaaattgataactacaaaaaagatcttaaagacttgaaggaaaaagtcagcctgttgcaaggcgacctttcagagaaagaggcttcacttttggatctgaaagagcatgcttcttctctggcatcctcaggactgaaaaaggactcacggcttaagacactagagattgctttggagcagaagaaggaggagtgtctgaaaatggaatcacaattgaaaaaggcacatgaggcagcattggaagccagagccagtccagagatgagtgaccgaatacagcacttggagagagagatcaccaggtacaaagatgaatctagcaaggcccaggcagaagttgatcgactcttagaaatcttgaaggaggtggaaaatgagaagaatgacaaagataagaagatagctgagttggaaagtctcacctcaaggcaagtgaaagaccagaataagaaggtagcaaatctgaagcacaaggaacaggtggaaaaaaagaagagtgcacaaatgttagaggaggcgcgacgacgggaggacaatctcaacgacagctctcagcagctacaggacagtctccgtaagaaggatgacaggattgaagagctggaagaagcactaagagaaagtgtacagataactgcagagcgggaaatggtgctagcacaagaggaatcagccaggaccaatgctgaaaaacaggtggaggagttactgatggccatggagaaggtaaagcaggaactagaatccatgaaagcaaagctgtcctccacccagcagtctctggcagaaaaggaaactcacttgactaatcttcgggcagagagaaggaaacacttagaggaagttctggagatgaagcaagaagctcttctggctgccattagtgaaaaagacgccaatatagctctcttggagctttcgtcctctaagaagaagacccaagaggaagtggctgccctgaagcgggagaaggatcgtctggtacagcagcttaagcagcagacgcaaaatcgaatgaagctaatggccgacaactacgaggatgaccacttcaaatcctcccattccaatcaaacaaatcacaagccctccccagaccaggatgaggaggagggtatatgggcatagccaatcagaggcttagttcagccattttgttcagaacgatcatccagcccctcttagaacttgaccaaaatagaagtaaattaaagttgtacattggacacctgacaaccctctgccatgaccgagaccccctgatcctccgtggactcactccaccagcttcctataacttggacgatgaccaggcggcttgggagaatgagctgcagaagatgacccgggggcagcttcaggatgagttagagaaaggtgaacgggacaatgcagaactgcaggagtttgccaacgccattcttcagcagatagcagaccattgtcccgacatcctagagcaagtggtcaacgccctggaagagtcctcttgaccctgctttatggggaagcctgaggtagtcaacccaggagccaagaaaagagaactacgaggaacaggtgcccggaaccttcttggcaccaaacactacaaacttcatcccaacttgctcacttgaagaagtgtgattccagcaccg

SEQ ID NO: 4466 - DNA, 768 bp, Homo sapiens
  source 1..768: mol_type = genomic DNA
atggccgcgtccaccatgtccgtctgctccagcgcttgctccgactcctggcaggtggatgcctgcccagagagctgctgtgagccccactgctgcgccctcagctgctgcgccccggccccctgcctgaccctggtctgcaccccagtgagccgtgtgtccagcccctgctgccaggcagcctgtgagcccagcccctgccaatcaggctgcaccagctcctgcacgccctcgtgctgccagcagtctagctgccagccggcttgctgcacctcctccccctgccagcaggcctgctgcgtgcccgtctgctgcaagcctgtgtgctgcctgcccacctgctctaaggattcctcttcatgctgccagcagtctagctgccagccaacttgctgtgcctcttcctccagccagcagtcctgctgtgtgcctgtttgctgcaagcctgtgtgctatgtgcccacctgctctgaggattcctcttcatgctgccagcagtctagctgccatccagcttgctgcacctcctccccctgccagcaggcctgctgcgtgcccgtccgttgcaagcctgtctgctgcaagcccatctgctgtgtgcccgtctgctctggggcttccacttcatgctgccagcagtctagctgccagccggcttgctgcaccacctcctgctgcagaccctcctcctccgtgtccctcctctgccgccctgtatgccggcccgcctgctgtagcctctgctcaggccaggagtccagctgctga

SEQ ID NO: 4467 - DNA, 3257 bp, Homo sapiens
  source 1..3257: mol_type = genomic DNA
gtctgcgcaagcgctaaccaagaaacgacggtttcgggtagattgttggttaagaagaaagctgggaaagtgaaggagagggggaagaaaggaagtgaaaagactttggctgttggaatctcagatctggaataggctgtataggctatttataatctctaattgccgaggaacctgaagttcagagttaaccagtgactgactcaggacatgcaaaatggcaagacccgaggtagaagagctcacctttcctgactctcagtttcctgttccctgaaaattcccagcaagggggaggtacatggaaggccacaggaagaaacaagatcttgagctgagcaagaacatcccagcatcttcattgactttaaaagtatattctggagtcttccgtggttcactattccagtactacagagattccttatattacatggcaggaggggggtaaactgagggatagtgaagacaacaataaattaatcaagagctttcctcatatctcagaacctatcctctgtaagaatgtcagaaaaggttgactggttacaaagccaaaatggagtatgcaaagttgatgtctattctcctggagacaaccaagcccaggactggaaaatggacacctccacggatcctgtcagagtgctcagctggctccgcagagacctggagaagagtacagcagagttccaagatgttcggttcaaacccggagaatcatttggtggggaaacgtccaactcaggagacccacacaaaggtttctctgtagactattacaacaccaccaccaagggcactccagaaagattgcattttgagatgactcacaaagagattccttgccagggccccagggcccaacttggcaacgggagttcagtagatgaagtttccttctatgctaaccgcctcacgaatctagtcatagccatggcccgcaaagagatcaatgagaagatcgatggctctgaaaacaaatgtgtctatcagtcattgtacatggggaatgaacccacacccaccaaaagcctcagtaagatagcatcagagcttgtgaatgagaccgtctctgcatgttccaggaatgctgccccagacaaggctcctggctctggagacagagtctcgggatcatcacaaagtcccccaaatttgaaatacaagtccactttgaagatcaaggagagcaccaaagaaagacagggtccagatgacaagcctccttctaagaagtctttcttctataaggaagtgtttgaatctcgtaatggagattatgccagagagggtggaaggttctttcctcgggagagaaagaggtttcgagggcaggaaaggcctgatgactttacggcttctgttagtgaagggatcatgacctatgctaacagtgtggtatctgatatgatggtctccatcatgaagacactgaagatccaagtgaaagacacaaccattgccaccatcctactgaagaaggttctgctcaagcatgcaaaagaggtggtctcggatctcatcgactccttcttgaggaatctccacagcgtcacagggaccctcatgactgacacacagtttgtctcggctgtgaaaagaactgtcttctctcatggaagccaaaaggccacagatatcatggatgccatgctaaggaagctgtacaatgtaatgtttgccaagaaagtccctgagcatgtcaggaaagcccaagacaaggctgagagttattccctcatctccatgaaaggaatgggtgatcctaaaaaccgaaatgtgaactttgccatgaaatctgaaactaaattgagagaaaaaatgtattctgaacccaaatcagaggaggagacttgtgcgaaaactctgggtgagcacattatcaaagaggggcttaccttgtggcataaaactcagcagaaagaatgtaaatctctaggtttccagcatgcagcatttgaagctcccaacacacagcgtaagcctgcatcagacatttcctttgagtaccctgaagatattggcaacctcagccttcctccatatcctccagagaaacctgagaattttatgtatgattcagactcctgggccgaggacctgatcgtgtctgccctgcttctgattcaatatcacctggcccagggaggaagaagggatgcacggagcttcgttgaagctgctggcaccaccaactttcctgccaatgaacctcctgtagctcccgatgaatcttgccttaagtctgctcccattgtaggtgaccaagaacaagcagaaaagaaggacctaaggagtgttttctttaatttcatccggaacttacttagtgagaccattttcaagcgtgaccagagccctgaacccaaggtgccggaacagccagttaaggaagataggaagttgtgtgaaagaccgttggcgtcttctccccccaggctatatgaggatgatgagacccctggtgccctttctgggctgaccaagatggctgtcagccagatagatggccacatgagtgggcagatggtagaacatctgatgaactcagtgatgaagctgtgtgtcatcattgctaagtcctgtgatgcttcgttggcagagctgggagatgacaagtctggagatgccagtaggctaacttcggccttcccagatagtttatatgagtgcttaccagccaagggcacagggtcagcagaagctgtcctgcagaatgcctatcaagctatccataatgaaatgagaggcacatcaggacagccccctgaagggtgtgcagcacccacggtgattgtcagcaatcacaacctaacggacacagttcagaacaagcaactccaagccgtccttcaatgggtagctgcctctgagctcaatgtccctattttgtattttgctggtgatgatgaagggatccaggagaagctacttcagctctcagctgctgctgtggacaaaggatgcagtgtgggcgaggttctgcagtcggtgctgcgctatgagaaggagcgccagctgaatgaggcggtggggaatgtcacaccgctgcagctgctggactggctgatggtgaacctgtaatcggcaaccccactgctttcccctcttctggcagtggggccggcccttatccccgcccttctttctcacttccacatctccccctctatatcctcacagagccctaacattatcttcacaccactctcatcaaagacatgtcatcttgtgctagccactggattttgcag

SEQ ID NO: 4468 - DNA, 1906 bp, Homo sapiens
  source 1..1906: mol_type = genomic DNA
ctacgagcggcatcctgcctgcgttagcggcggtggaggaggaggcagagaggagtggagggcggagtagacggaggaggctgctgcagagaagaaagtgtcagagccggttcggctttagagtgtggtgaagggtacttttcatggtgcatggaaggaaagccaatgcgcaggtaatggagagtgaagagttcatgttgcttccagccaatcaactcattgatataatatccagtgatgagctaaacgttcgcagtgaagaacaagtgttcaatgcagtgatggcctgggtcaaatacagtattcaggaaagacgtcctcaattaccccaggtgctgcagcatgttcgtttgcctttgcttagtcccaagttcctggtcggcacagtaggctctgatcccctcatcaaaagtgatgaagaatgcagagacttggtagatgaggctaaaaactacctcctattgccgcaagaacgaccactaatgcaaggaccaaggacgagaccacggaaacctatccgatgtggggaagtactctttgcagttggtggttggtgcagtggagatgccatttccagtgttgaacgatatgatccacagaccaatgaatggagaatggtggcttcaatgagcaaaaggagatgcggagttggggtcagtgttcttgatgatctgttatatgcagtaggaggccatgatggatcctcttatctcaatagtgttgaaaggtatgaccccaaaacaaaccagtggagcagtgatgtggcccctacaagcacctgcaggacaagtgttggtgtagcagtacttggaggctttctttatgctgtgggtggccaggatggtgtgtcttgcctcaacattgttgagaggtatgatccgaaggagaacaagtggactcgggtagcttctatgagtaccagaagactaggtgtggctgtggctgtgttaggagggttcttatatgctgtaggtggctctgacgggacatctcctctcaacacagtggaacgttacaatcctcaggaaaacagatggcacactatagcccctatggggacccggaggaaacacctaggctgtgcagtatatcaggacatgatctatgctgtaggaggtagagatgacactacagagctgagcagtgctgagagatacaaccccagaaccaaccagtggtctccagtggtggccatgacatcacgccgtagtggagttggcctggcagtggtcaatggacagctcatggcagtaggaggttttgatggcacaacatacttgaagaccatagaagtttttgatcctgatgccaatacatggaggttatatggcgggatgaattaccgtcggctagggggtggcgtaggagttattaaaatgacacattgtgaatcccatatttggtgaacacagagaagacagtcttgtatatattcctctgtattctggggagctttgaccttggagctttgtacagcttgagaaaacattagaacaaattttattatttgccggtgcctcaacaaatggaaatacaatccaatgaaagtacttcacctgcaagatgcacaataattttcaactctgtgcagaagaatatttatttttggttttaatttatcatggttttttgttgttttcgttttgaacttatccttcctcccacaaaaaaagaaaagaagaaaaaattccaagcagcaaaacttactttgtttgtaaggtattcatttaggtttgaaaatactatttaataagggcagaagggctatatatgatttggctattatttctagacactccatccacatgattccactaacaaggattaccaggaataaaggtaggtatgcaaaatgtattagctacccattattctcgcactaaccaccagaagacttgaaaatctt

SEQ ID NO: 4469 - DNA, 956 bp, Homo sapiens
  source 1..956: mol_type = genomic DNA
ggtcggcggaggtgtctaccccgccggtgatggcgttgaacgccactggcttcccggccttccgtccgctgcctccgtccgattctgcgtctgcttgctgaggaggcggattaggggggcgcggagtctcttcccttgagtgcataggtcccggttggtagagggtttgagtccgcatcgccacagctgaaggctgcgagggactaagagcagaatatatctttagaaatgagttgcacaattgagaaggcacttgccgacgctaaagctcttgttgaaagattaagagatcatgacgatgcagcagaatctctgattgagcaaaccacagctctcaacaagcgagtagaagccatgaaacagtatcaggaagaaattcaagaacttaatgaagtcgcgagacatcggccacggtccacgttagttatgggaatccagcaagaaaacagacaaatcagagagttgcaacaagaaaacaaagaattacgtacatctctggaagaacatcagtcggccttggaacttataatgagcaagtaccgagaacaaatgtttagattgctaatggctagcaaaaaagatgatccgggtataataatgaagttaaaagagcagcactccaagattgacatggtacatcgtaacaagtccgaaggattcttccttgatgcatctcgacacatccttgaagcacctcaacatggactggagagaaggcacttggaagcaaatcagaatgtacactaaataaacagtcaacttttggggtgtggatggaaggggggtccattttaaaagtgcttttacattgaatttccctcccagattagatcagcaaataaatgaaatttattaaaagaatgttgtgtctttaatagccatgctgttcagtgtagaaactttaaatctctcattaattttctgtgtattgtatcatgtacagcctgttagatatt

SEQ ID NO: 4470 - DNA, 2671 bp, Homo sapiens
  source 1..2671: mol_type = genomic DNA
atgttatttatttttcctctttccctcccgtggagaccctcctgttggaaagagagctgcagcacgggacagagacaggcaggaagaagcagagaggactcggtgacgcccccaccgagcagcccctggcccactcctccagcaggggccatgagcaccaagcaggaggccaggagagatgagggagaagccaggacgagggggcaggaggcacagcttcgagaccgagcccacctgagcctgcacaaggactcggccgacctgctcccgctggacagcctcaagaggctcggcacctccaaggacttgcagccgcgcagtgtgatccaaagacgcctggtggagggaaacccgaattggcttcagggggagcctccccggatgcaggacctgattcatggccaggagagcaggaggaagaccagcaggacagagattccagctcttctggtcaactgcaagtgccaggaccagctgcttagagtggccgttgacacaggcacccaatacaatcggatctctgctggatgtctcagccgcctggggttagagaaaagggtcctaaaagcctcagctggggacctggcccctgggcccccaacccaggtggagcagttggagctacagctggggcaggagactgtggtgtgctcggcacaggtggtggatgctgagagtcctgaattctgcctgggcctgcagactctgctttctctcaagtgctgcatcgacctggagcacggagtgctgcggctgaaagccccgttctcagagctacccttcctgcctttgtaccaagagcctggccagtgactgctgtctcagtcagtccccagagggaaagaccttgccttagaagaagaggcgtgtggggaacgggggctcttgaagccaggtagctggggactatggtgtctgcccttccaatcacctccctgacccctgctgtcccattttccccagctggccgcattcctctctgcttctcagcagctgtcctactccccaggacgagttttcactagagggcccacgatgccaggattctgattcatcttcctcccaagaaaagcaaagccaaatcaagaccacagataggaacctaagcacaatggggtgcctgcttgggctgggtcgaaggctctgctgactgctgtccttgtccatcacccaataccaccccaaacacaactcaacttcccacaccaccatgtctctcaccacaccttctgggcctcattatctcccacaactagaccgccatgcctcaccaacctatgtccctggacctcctggtgtctgcctctcggagtctgtgcacatctgctcacagttgagtgggggaagaaacagccagaattcaatacaacaaagagcgggagttagtataggaatgtccatctcataaggctgagagctattttttcctgtggctgcaaatgtctgaagccagttagtttgattaccctgtgcaaaaccttggacatacttctgctattaacgctataggtatttatccgtttccactggctttttgtacccaccgagcccctgagccttgcgtgtgtgtgtgtggaagagccttgtagagaactgctcctgtgaggcagacaggacagtgaggttgtcaccactcagacttcacctattcagcattctttctgatttctagaactatccacctcattaggccttcttcctatccccatctctggcctcttgagcttaagcttgtattgtcctggaatcagtggctttctaaccccctgccaggctttgccaaagcaaaaagacagaggctttttttttttttttaaagtttggggtctgtcaggagacagaggcttttttgaattcactgtgaagagaagaacccgaaccttaagacgccagatccctgagagtctttctggctggtttgagtctctcaaatcatggattaggagtaaagaaagaggccaggcgcaatggctcatgcctgtaatcccagcactttgggaggctgaggtgggtggatcacttgaggtcaggagtttgagaccagcctgggtaatatggcaaaaccccatctctactaaaaaatacaaaaattagccaggtatggtggtgaacacctgtaatcccagctacttggaaggctgaggcataggagttgcttgaacctgggagatgggggttgtagtgagccaagttcgtgccatcggactccagcctgggtgaaggagtgagaccctgtctccaaaaacaaacaaaaaaggagcagagaaagacagtggtacagctaacctgaacaagggaactgggaccgttgggctgaaacagtcttgagcctggggttgactgggttagagaagaaccgggatgcaaggagctgcctgtgacacctggcctgccctttctcagctgcctcccctgccctttctcagctgcctcccctgccctcagaaggaaaggagagggctcacttatcacttgtgccatagcacctggtctcaaaatcctaaaagctttcctcgccctcactgccttgctccacaaggtccactttcctgggtcttgtgctgtgcctttccttgtctgcctcctgctgcttctgtaactgcagaccccaggcccaatggcaagccctcggctcagctgcttctccattggaataaactcttgtttctct

SEQ ID NO: 4471 - DNA, 243 bp, Homo sapiens
  source 1..243: mol_type = genomic DNA
acctcctgctgcagaccctcctcctctgtgtccctcctctgccaccccgtgtgcagctgctccccagcctgccagccaacctgctgcatacacagcccctgccaggcatcctgctatgtgcccgtgagctgccagcccatcatatatgtgactccctcttgccaatcttcggggtgctgccagcccccctgcaccactgccctctgcagacccatctcctgcagcaccccttcctgctgctga

SEQ ID NO: 4472 - DNA, 2308 bp, Homo sapiens
  source 1..2308: mol_type = genomic DNA
gttttgggctgcggttggagggccgcagttgcagtcagggtccgccagctcggggccagcgcatggggctgctgagaccgctccggacgtgcgaagcgttcgcggtgcggtaggaagctgaagtcttcagcagaaccctgacctaggtagggagtctcaatggccctgggtgaagaaaaggcagaagcggaagcatctgaagacacaaaggcccagtcctatgggagagggagctgcagggagcgggagctggacatcccagggcccatgagtggggagcagcccccacgcctggaagctgagggagggctcatctcccctgtatggggggcagaagggatacctgcccctacttgctggattgggactgaccctggcggcccctctagagcccaccagccacaggccagtgatgccaacagagagcccgtagctgagaggtctgagcctgcactcagtggcctgcctcctgccaccatggggtctggagaccttctgctctccggggaaagccaggtggagaagaccaagctttcttcctccgaggagttccctcagactctgagccttcccagaacaacaactatttgctcaggacatgatgctgataccgaagatgatccatccctagcagatttgccccaggcactggacctcagccagcagcctcacagctcaggtctctcttgcctgtcacagtggaagtccgtgctgagcccaggttccgcagctcagccttccagctgcagcatctctgcttcctccacaggcagcagtctccagggtcaccaggagagggcggagcctcgtggtggttctctggccaaggtctcctcctccctggagccggtcgtcccccaggaaccttcctctgtggtggggctaggacctcggccccagtggtcaccacagcctgtgttctctgggggtgatgcttctgggctaggcaggagacgcctctccttccaggctgagtactgggcctgtgtgctgccagattccctgcctccatcacccgaccgccactcccctctctggaacccaaataaagagtatgaagatctgcttgactatacttacccactgaggcccgggcctcagctcccaaagcaccttgatagccgtgtgccagctgaccctgtcctgcaggactccggggtagacctggatagcttctctgtctctccagcaagcaccctcaaatcacctactaatgtctcccccaactgcccaccagcagaggccactgccctgccattttctgggcccagagagccaagccttaagcagtggccctccagagtaccccagaaacagggtggcatgggcttggcatcttggagccaacttgcatctacccccagagccccaggcagtagggatgctcgttgggagcgcagagagccagccctgaggggtgcgaaggaccggctgactataggcaagcaccttgatatgggctctccccagctaaggacacgggacagagggtggccctcgcccaggccagagagggagaagaggaccagccagagtgcccggcgccctacctgcacagagtctaggtggaaatcagaagaggaagtggaaagtgatgacgagtatcttgccctccccgctcggctgacacaggtttctagcctggtttcgtatctaggatccatttctaccttggttaccctgcccactggggatatcaaagggcagagccccttggaagtgtcagacagtgatgggccagcttccttcccttcaagctccagccaaagccagcttccccctggagctgccctccaaggatctggggatcctgagggccagaatccctgtttcctgcgctccttcgtccgtgcccacgactccgcaggggaaggcagtctggggagcagccaggccctcggggtctcctctggactgctgaaaacacgcccctccttgccagctaggttggaccggtggccattctcagacccagatgttgaagggcagcttcccaggaaaggaggagaacagggaaaagaatcactggtgcaatgtgtgaagacattttgctgtcagctggaagagctgatctgctggctgtataatgttgcagatgttactgaccacgggactgcagccaggtccaatcttacaagtctcaagtcttctctgcagctttaccggttttagaggatgtccttgggaggatcgcaaagcagtctggtgagctggagagccacgcagatcgcctgtatgactctatcttggcctctctggacatgctggctggctgcacccttatccctgacaaaaagcccatggcggc

SEQ ID NO: 4473 - DNA, 960 bp, Homo sapiens
  source 1..960: mol_type = genomic DNA
gtttagttcagcgcagcgactcggggacctggagctgacgcctagacacttgtattagctttaatagaagagaaatggaggagccatagaatattaaggatgaattcaggaaggcctgagaccatggaaaacttgcctgctctctacactattttccaaggagagttatggtgaagctgaaacagtgctcaagatgaagcagctaattgaagacactgaaaagaataaagtttatgttgctatggtgacagactatggggcctttatcaaaatcccaggctgtcggaagcaaggtctggtccatcgaactcatatgtcatcctgtcgggtggataagccctctgagatagtagatgttggagataaagtgtgggtgaagcttattggccgagagatgaaaaatgatagaataaaagtatccctctccatgaaggttgtcaatcaagggactgggaaagaccttgatcccaacaatgttatcattgagcaagaagagaggcggaggcgatccttccaggattacactgggcagaagatcacccttgaggctgtcttgaacactacctgcaagaagtgtggctgtaaaggccactttgcaaaagattgtttcatgcaaccaggtgggactaaatactctctgatacctgatgaggaagaggaaaaggaagaggcaaagtcagcagagtttgagaagcctgaccctacaaggaatccttctagaaaaagaaagaaggagaagaagaaaaagaaacatagagataggaagtcatctgactctgacagctcagactctgagagtgatacaggcaagagggcaaggcacacatcaaaagacagcaaggcagcaaagaagaagaaaaagaagaagaagcacaagaagaagcacaaggagtgagagtataaagagtgtagggggtggttgagagtaagaaaccaggagccttgtgccttgagactcct

SEQ ID NO: 4474 - DNA, 853 bp, Homo sapiens
  source 1..853: mol_type = genomic DNA
agccccttgtggctgagggcagagctctttgcgttggtccacggtgtgctcctctgcccgggctccaggaacactcggaggtgtctggcttccttctggagtgtgacagctcggtgcagggcgcgctgcagaagcacctcgcgctatacaggatccggcggaaggtcacggtggagccgcacccggagctgcgagtgtgggcggtgttgcccagttcccctgaggcctgcggggctgcatcgctgcaggagagggcaggggctgccgccatcctcatccgcgacccgcgaacagcacgcatggggtggcggctcctcacccaggatgaaggcccagccctggtgcccgggggccggctcggggacttgtgggattatcaccagcaccgatacctgcaaggcgttcctgagggggtccgagacttgcctcctggggtggccctgcccctggagtccaacctggccttcatgaacggcgtgagcttcaccaaaggctgctacattggccaggagctgacggcccgcacccaccacatgggcgtcatccgcaagcgcctcttccctgtccggttcttggacccccttcccaccagtggcatcacccctggtgccacggtgctgactgcctcaggacagactgtgggcaagttcagggctggccagggcaacgtggggctggccctgctgtggtcagagaagatcaagggtcctctgcacatcagagcctctgagggtgcccaggtggccttagccgcatctgtgccagactggtggcctacagtctccaagtagtccgaagccttggctggcgcaggctgatggggaggctggggcctggggcctttggcctctgt

SEQ ID NO: 4475 - DNA, 1110 bp, Homo sapiens
  source 1..1110: mol_type = genomic DNA
gcgcaactcattggcgccaagatggcgatggagatgaggcttccagtggctcgcaagcctcttagcgagagactgggccgcgacactaagaaacatctagtggtgccgggggatacaatcactacggacacaggattcatgcggggccatggaacgtatatgggagaagagaagctcattgcatctgttgctggctctgtggagagagtaaacaagttgatctgtgtgaaagctttgaaaaccagatacattggtgaagtaggagacatcgtagtgggacgaatcacagaggttcaacagaagaggtggaaggtggagaccaactccaggctggattcggtcttgctgctctcgtccatgaaccttcctggaggagagctgaggagaagatctgcagaagatgagcttgcaatgagaggtttcttacaggaaggggaccttatcagtggggttttggtccaggtttccccctccctggtgaaacggcagaagacccactttcatgatttgccatgtggtgcctcagtgattctcggtaacaacggcttcatctggatttacccaacacctgagcacaaagaagaggaagcagggggcttcattgcaaacctggagcctgtctctcttgctgatcgagaggtgatatcccggcttcggaactgcatcatctcgctggtaactcagaggatgatgctgtatgataccagcatcctgtactgctatgaagcatcccttccacatcagatcaaagacatcttaaagccagaaataatggaggagattgtgatggaaacacgccagaggcttttggaacaggagggataaggaggtgctccagaagcacgggactgtggaccttgcaggagtgaagactgtgatgtgtggtccccatatgtggctcagcaaagactcgagagatcatccctttgtctgcattgacggccctgtgacggcctccagcccacaggcctgctttctcctgtcctaacaccaagcctgggtggcagatgaacagtgcttccttgggttgccagctgagtcccggtattagggaatagtttcagctctttcaaagtgcacagtgttacagtcgaatgggctcccatcctg

SEQ ID NO: 4476 - DNA, 3476 bp, Homo sapiens
  source 1..3476: mol_type = genomic DNA
aaaaatgttattcttagtagaaatggggaaatatcaaagaggagtaagtttaagagttctgtgatgcccttaaaagtcgacggggaagtccagcagctggagatgagctcaaagcatgcctgtttttaaggaagtaaaggtacatctgttagaagatgcaggcatagagaaggatgctgttactcaggagactagaatttcacccagtggaattgattcagctacaaccgtggctgcagcaactgctgctgccattgcaaccgcagctccgttgataaaggtgcagagtgatttggaagcaaaagtcaattctgttacagaattacttagtaaattacaggagactgataaacacctgcaacgtgttacagagcagcaaacaagcattcagaggaaacaagagaaattacattgtcatgatcacgaaaagcaaatgaatgtgtttatggagcagcacataaggcatcttgaaaagttacaacaacaacaaatagatattcagactcattttattagtgctgcactcaagactagtagttttcagcctgttagtatgccctcctccagagcagtggaaaagtattccgtaaaaccagaacaccctaatcttggtagctgtaatccatctttatataacacatttgcttccaaacaagcacctttaaaagaagttgaagatacgagttttgataaacagaaatctcctttggagacaccagcacctcgcagatttgctcctgtacctgtttcaagggatgatgaactatcaaagagggaaaatcttttggaagaaaaagaaaatatggaagtgtcgtgtcacagaggaaatgtaagactattggaacaaattttgaataataatgattctttgacaagaaaaagtgaatcatcaaacaccacctcactaactaggtcaaaaataggatggactcctgagaaaacaaacagatttccttcctgtgaagagctagaaacaactaaagtgactatgcagaagtctgatgatgttcttcatgaccttggccaaaaagagaaagaaacaaatagcatggtccagccaaaagaatctctgagtatgttgaagcttccagatcttccacagaattctgttaagcttcaaacaaccaatacaacaagatctgtattgaaagatgctgagaagattttgagaggagtacaaaacaataaaaaagtacttgaagaaaacctggaagctattattcgtgcaaaagatggagctgccatgtattcgcttatcaatgctttatctaccaacagagagatgtcagagaaaattaggatcagaaagacagtggatgaatggattaaaactatttctgcagaaattcaggatgaactgtcaagaacagattatgaacaaaaaagatttgatcagaagaatcagagaaccaagaaaggtcagaatatgactaaagatattagaaccaacacacaagataaaactgtcaacaaatctgtaattccaagaaaacattctcaaaagcaaatagaagagcattttagaaatctacctatgaggggcatgcctgcttcaagtttacagaaagagagaaaggaagggcttttgaaagcaaccacagtaatacaagatgaagattatatgttacaagtctatggaaagccagtttatcagggccatcgaagcactcttaaaaaaggaccatatctcagatttaattctccatctcctaagtccagaccacagagaccaaaagtaatagaacgagttaaaggcactaaggtaaagtcaataagaacacagactgacttctatgcaacaaaacctaagaagatggattctaaaatgaaacattctgttcctgtgttacctcatggcgatcagcaatatttgttcagcccaagtagagaaatgcctactttttcaggtacattggaaggtcatctgattcctatggcaattcttttaggacaaacccaaagtaatagtgataccatgccacctgctggagtgattgtcagcaagccacaccctgtaactgtgactacttctattcctccatcatctcgaaaagtagaaactggagtaaagaaacctaacatagccattgtagaaatgaagtcagaaaaaaaggatcctcctcagcttactgtgcaggtattacccagtgtagatattgacagcatttcaaatagtagtgctgatgtcctttcacctctgtctagccccaaagaagcatctcttcctcctgtgcaaacttggataaagactccagaaattatgaaggtagatgaagaagaggtgaagtttccaggaactaactttgatgaaataatcgatgtcatacaggaagaagaaaaatgtgatgaaattccagactctgaaccaattctggagtttaacagaagtgttaaagctgattctacaaaatataatggtcctccatttccgccagttgcttctacttttcagcccactgctgatattctggataaagtaattgagagaaaagaaacactggaaaatagcttaattcaatgggtagagcaagaaataatgtcaagaattatctctgggctctttccagtccagcaacagattgcacctagtatcagtgtttcagtcagtgagacaagtgaaccactgacttctgacattgtggaaggaacaagcagtggcgccctccagctttttgttgatgctggtgttcctgtgaactcaaatgtgattaaacattttgttaacgaagctcttgctgagaccattgctgtcatgctgggtgacagagaagcaaagaagcaaggtcctgttgctacaggtgtttctggggatgcttcaacaaatgaaacatatttgccggcaagagtgtgcaccccactgcctaccccacagcctacgcctccttgctcaccttcatcacctgctaaggagtgtgttttggtaaagactccagattcttctccctgtgattcggatcatgatatggcttttcctgtgaaagaaatatgtgctgaaaaaggagatgatatgcctgccatcatgcttgttaatactccaacagttacccctactactacacctcctccagcggcggcagtttttaccccaactttgtcagatatttccattgataaattgaaggtatcaagcccagagcttcccaagccatggggtgatggagacctgccactggaagaagagaaccctaactcacctcaagaagaacttcatccaagagctatgtaaatgagaacatactcactagtaactgtacatttcaacttatgtttgacttatgtgatccattgaaaacatagaaatattatacaaagctttataaaccacagactaccttatactttgaaagaaagaactttcataagtgttgagttttgaaaaattatcaaattataccttcaccttttttcttaaaaggtttgaaatagctagaaataaaggtatctattatattgttaataaaatagaaaacaatttc

SEQ ID NO: 4477 - DNA, 3923 bp, Homo sapiens
  source 1..3923: mol_type = genomic DNA
agcagtagcggcagccctgaggacgatatggtgtaagatacttcttcaagattggacagctggggaccttcttctgattaaccttaaaccaacttgtagccatagagacacctcacaaggttcccatttttgttgttgttgttgttgattttctgctcacacctttcctgaccttgcaaccatgtatggaagtgcccgctctgttgggaaggtggagccgagcagccagagccctgggcgttcacccaggcttccacgttcccctcgcttgggtcaccgtcgaaccaacagtacgggagggagttcgggaagcagtgttggaggtggcagtgggaaaaccctttcaatggaaaatatacaatctttaaatgctgcctatgccacctctggccctatgtatctaagtgaccatgaaaatgtgggttcagaaacacctaaaagcaccatgacacttggccgttctgggggacgtctgccttacggtgttcggatgactgctatgggtagtagccccaatatagctagcagtggggttgctagtgacaccatagcatttggagagcatcacctccctcctgtgagtatggcatccactgtacctcactcccttcgtcaggcgagagataacacaatcatggatctgcagacacagctgaaggaagtattaagagaaaatgatctcttgcggaaggatgtggaagtaaaggagagcaaattgagttcttcaatgaatagcatcaagaccttctggagcccagagctgaagaaggaacgagccctgagaaaagatgaagcttccaaaatcaccatttggaaggaacagtacagagttgtacaggaggaaaaccagcacatgcagatgacaatccaggctctccaggatgaattgcggatccagagggacctgaatcagctgtttcagcaggatagtagcagcaggactggcgaaccttgtgtagcagagctgacagaggagaactttcagaggcttcatgctgagcatgagcggcaggccaaagagctgtttcttcttcgaaagacattggaggaaatggagctgcgtattgagactcaaaagcagaccctaaatgctcgggatgaatccattaagaagcttctggaaatgttgcagagcaaaggactttctgccaaggctaccgaggaagaccatgagagaacaagacgactggcagaggcagagatgcacgttcatcacctagaaagccttttggagcagaaggaaaaagagaacagtatgttgagagaggagatgcatcgaaggtttgagaatgctcctgattctgccaaaacaaaagctctgcaaactgttattgagatgaaggattcaaaaatttcctctatggagcgtgggcttcgagacctggaagaggaaattcagatgctgaaatcgaatggtgctttgagtactgaggaaagggaagaagaaatgaagcaaatggaagtgtatcggagccattctaaatttatgaaaaataaggtagaacaactgaaggaggaactaagttcgaaagaggctcaatgggaggagctgaaaaagaaagcggctggtcttcaggctgagattggccaggtgaaacaggagctgtccagaaaggacacagaactactcgccctgcagacaaagctagaaacactcacaaaccagttctcagatagtaaacagcacattgaagtgttgaaggagtccttgactgctaaggagcagagggctgccatcctgcagactgaggtggatgctctccgattgcgtttggaagagaaggaaaccatgttgaataaaaagacaaaacaaattcaggatatggctgaagagaaggggacacaagctggagagatacatgacctcaaggacatgttggatgtgaaggagcggaaggttaatgttcttcagaagaagattgaaaatcttcaagagcagcttagagacaaggaaaagcagatgagcagcttgaaagaacgggtcaaatccttgcaggctgacaccaccaacactgacactgccttgacaactttggaggaggcccttgcagagaaagagcggacaattgaacgcttaaaggagcagagggacagagatgagcgagagaagcaagaggaaattgataactacaaaaaagatcttaaagacttgaaggaaaaagtcagcctgttgcaaggcgacctttcagagaaagaggcttcacttttggatctgaaagagcatgcttcttctctggcatcctcaggactgaaaaaggactcacggcttaagacactagagattgctttggagcagaagaaggaggagtgtctgaaaatggaatcacaattgaaaaaggcacatgaggcagcattggaagccagagccagtccagagatgagtgaccgaatacagcacttggagagagagatcaccaggtacaaagatgaatctagcaaggcccaggcagaagttgatcgactcttagaaatcttgaaggaggtggaaaatgagaagaatgacaaagataagaagatagctgagttggaaaggcaagtgaaagaccagaataagaaggtagcaaatctgaagcacaaggaacaggtggaaaaaaagaagagtgcacaaatgttagaggaggcgcgacgacgggaggacaatctcaacgacagctctcagcagctacaggacagtctccgtaagaaggatgacaggattgaagagctggaagaagcactaagagaaagtgtacagataactgcagagcgggaaatggtgctagcacaagaggaatcagccaggaccaatgctgaaaaacaggtggaggagttactgatggccatggagaaggtaaagcaggaactagaatccatgaaagcaaagctgtcctccacccagcagtctctggcagaaaaggaaactcacttgactaatcttcgggcagagagaaggaaacacttagaggaagttctggagatgaagcaagaagctcttctggctgccattagtgaaaaagacgccaatatagctctcttggagctttcgtcctctaagaagaagacccaagaggaagtggctgccctgaagcgggagaaggatcgtctggtacagcagcttaagcagcagacgcaaaatcgaatgaagctaatggccgacaactacgaggatgaccacttcaaatcctcccattccaatcaaacaaatcacaagccctccccagaccagatcatccagcccctcttagaacttgaccaaaatagaagtaaattaaagttgtacattggacacctgacaaccctctgccatgaccgagaccccctgatcctccgtggactcactccaccagcttcctataacttggacgatgaccaggcggcttgggagaatgagctgcagaagatgacccgggggcagcttcaggatgagttagagaaaggtgaacgggacaatgcagaactgcaggagtttgccaacgccattcttcagcagatagcagaccattgtcccgacatcctagagcaagtggtcaacgccctggaagagtcctcttgaccctgctttatggggaagcctgaggtagtcaacccaggagccaagaaaagagaactacgaggaacaggtgcccggaaccttcttggcaccaaacactacaaacttcatcccaacttgctcacttgaagaagtgtgattccagcaccgtttctacatctgccatcttactctgcctttctgctttggatgtggtctctacactaaccttcttgatgtccagggtagataaagggtcgaatctctctgaagaactgccacctggtcatcagcagtggagaactgtgggagctggtggctctgccctgacagagagccatggagcagaggagcctctcacctcctgtcctctgacatgagaatgaaaccaggaatggacttggagttcaacagg

SEQ ID NO: 4478 - DNA, 1662 bp, Homo sapiens
  source 1..1662: mol_type = genomic DNA
gacgtacctcacggaagccggctttggccctgcggctgctaccgtcgccgcggagaaattgttggatctggcagtctaggaatggttcatcaagaggaagaagttcgatgatgagctggtggagagcagcctggcaaaatcttctacccgggcaaagggggccagtggggtggaaccagggcgctgttcggggagtgaaccctcctccagtgagaagaagaaggtatccaaagcccccagcactcctgtgccacccagcccagccccagcccctggactcaccaagcgtgtgaagaagagtaaacagccacttcaggtgaccaaggatctgggccgctggaagcctgcagatgacctcctgctcataaatgctgtgttgcagaccaacgacctgacctccgtccacctgggcgtgaaattcagctgccgcttcacccttcgggaggtccaggagcgttggtacgccctgctctacgatcctgtcatctccaagttggcctgtcaggccatgaggcagctgcacccagaggctattgcagccatccagagcaaggccctgtttagcaaggctgaggagcagctgctgagcaaagtgggatcgaccagccagcccaccttggagaccttccaggacctgctgcacagacaccctgatgccttctacctggcccgtaccgcgaaggccctgcaggcccactggcagctcatgaagcagtattacctgctggaggaccagacagtgcagccgctgcccaaaggggaccaagtgctgaacttctctgatgcagaggacctgattgatgacagtaagctcaaggacatgcgagatgaggtcctggaacatgagctgatggtggctgaccggcgccagaagcgagagattcggcagctggaacaggaactgcataagtggcaggtgctagtggacagcatcacaggcatgagctctccggacttcgacaaccagacactggcagtgctgcggggccgcatggtgcggtacctgatgcgctcgcgtgagatcaccctgggcagagcaaccaaggataaccagattgatgtggacctgtctctggagggtccggcctggaagatatcccggaaacaaggtgtcatcaagctgaagaacaacggtgatttcttcattgccaatgagggtcgacggcccatctacatcgatggacggccggtgctctgtggctccaaatggcgcctcagcaacaactctgtggtggagatcgccagcctgcgattcgtcttccttatcaaccaggacctcattgccctcatcagggctgaggctgccaagatcacaccacagtgaggagtggtggcaggactcgtgggccctctccggcctgtttcccctgccactccagcccccttgagctgggaactcaggctcctggaaaaacctgggcagtgggaggctcagctgcgggccattgatttgagcctttgagggaggatagggctggcctttgtgaagccagcagaggctgagaacctcaggcttccctagatccagagcccctccccatcttcctctctctaaaaacaaccctaccccccattgccaccttcactcctgtgtctccagctgattagcctcagactcttcttttattgtttttcttttgtaaataaaaagcaccaggttcc

SEQ ID NO: 4479 - DNA, 4173 bp, Homo sapiens
  source 1..4173: mol_type = genomic DNA
ggagtttcccagcgacggccgtaagtggcgggcggaagcggccctagaagcccgccgtaaacggctccctcgcgccacttccggccggcttccgcagacggcgctggtggtcgatcgtgtggcgccggaggacgttccccgcggccggagccatggagatgccgctgccccccgatgaccaggagcttcgaaatgtcatcgacaagctcgcccagttcgtggctcgcaatgggcccgagtttgagaagatgactatggagaagcagaaggacaaccccaaattctcgtttcttttcggaggcgaattctacagttactacaagtgcaagctggcgctggagcagcagcagctcatctgcaagcagcagaccccggagctggagccagccgccaccatgccacccctgccacagcccccgctggcccccgccgcgcccatcccgccggcccagggcgcgccatccatggacgagctcatccagcagagccagtggaacctccagcagcaggagcagcacttgctggcgctcagacaggagcaagtgacagcggccgtggcccacgcggtggagcagcagatgcagaagcttctggaggagacccagctagacatgaacgagtttgacaacctcctgcagcccatcatcgacacgtgcaccaaggacgccatctcggccgggaagaactggatgttcagcaatgccaagtccccgccgcactgtgagctgatggccggccacctccggaaccgcatcacggctgatggggcacacttcgagctgcggctgcacctcatctacctgatcaatgacgtgctgcaccactgccagcgcaagcaggcccgggagctgctggccgccctgcagaaggtcgtggtgcccatctactgcaccagcttcttggccgtggaggaagacaagcagcagaagatcgcccggctcctgcagctctgggagaaaaacggctacttcgatgactccatcattcagcagctacagagcccagccctggggcttggtcagtaccaggccaccctcatcaacgagtactcctcagtggtccagccggtgcagctggccttccagcagcagatccagaccctcaagacgcagcacgaggagtttgtcaccagcctggcccagcagcagcagcagcagcaacagcagcagcagcagctccagatgccgcagatggaggctgaagtcaaggccacgcctccaccgcctgctccacccccggccccagcacctgcccctgccatcccgcccaccacccagcctgatgacagcaagcctcccatccagatgcctggctcttcagagtacgaagctccaggaggggtccaggatcctgcagctgccggcccccggggccccgggccacacgaccagatcccaccaaacaagcccccttggtttgaccagcctcaccccgtggctccttggggccagcagcagccgccagagcagccaccctacccgcaccaccagggcggcccaccccactgccccccctggaacaacagccatgagggcatgtggggcgagcagcgcggtgaccccggctggaacggccagcgcgacgcgccctggaacaaccagcccgacgccgcctggaacagccagttcgagggcccctggaacagccagcacgagcagccgccctggggcgggggccagcgcgagccacccttccgcatgcagcggcccccacacttccgggggcccttcccgccccaccagcagcacccgcagttcaaccagcctccgcacccccacaacttcaaccgcttcccgccccgcttcatgcaggacgacttcccgccacggcaccccttcgagcggccgccctatccccaccgcttcgactacccccagggggacttccctgccgaaatggggccccctcaccaccaccctggccaccgcatgcctcatcctggcatcaacgagcacccgccttgggctggaccccagcaccctgacttcggccctcccccccatggcttcaacgggcagcccccacacatgcggcgacagggcccaccccacatcaaccacgatgaccccagcctggtccccaatgtgccctacttcgatctccctgctgggctgatggcccccctcgtgaagctggaagatcacgagtacaagcctttggaccctaaagacatccgcctcccaccccccatgccgcccagcgagaggctgctggctgcagtggaggccttctacagccccccgtcccacgacaggcccaggaacagtgaaggctgggagcagaacggcctctatgagttcttccgagcaaaaatgcgggcccggcggaggaaaggccaggagaagaggaacagcggaccctcgaggtctcggagcagatccaagagtcgagggcgttcttcctcccgctccaactcaagatcctccaagtcttcaggctcgtactcaaggtcaaggtcgcgctcctgctcccgttcctactcccgctccagatctagaagtcggagcaggtcgcgctcctccagaagccgctcccggtcccagtcgcggtcccggtccaagtcgtactccccaggaagaagacgccggtcacggtccaggagccccaccccgccttcctctgctggtctgggttctaattcggcgcctcccatccctgactcaaggctcggagaagagaacaaaggccatcagatgctggtgaagatgggctggagcggctcaggcggcctcggtgcgaaggagcaagggatccaggaccccatcaagggcggggacgtccgggataagtgggaccagtataaaggcgtgggcgtggctctggatgacccctatgagaactaccgcaggaacaagagctactccttcatcgcccgcatgaaggccagggacgagtgtaagtaggcgcccatgccgggagccgcgccggtggccagcggtgccggctgtgggaccttcctggctgactggcagaggaagattgcagtgacagctcagttcttacaccgtctccacttgtggagagccacaggaagagaaggaagaccagcgcatgcccagtgggaacgccgtgctccatggcgtggagggcacgggtgccacccacaaaccacaccaggaggcgctgcagccaccagggccccaggctcgttttcctttatagcgaagcaaaaaacacaagaccctccgcccgagtaaattcttcagccacgaagggatggatgtgcatctgccctaagtcagattgaagcctcctcctaggctccaggaggagcatgtgcaggaagggttggcctgagccagagccggcaccccagctccttcctccagctccccgcacccaccggccctgacctggcttcccctcggctgtgtagggacaaagccgaagcccagtgccatgactgcccgcggattgaaaaacagaaacacaaaactttgacttgacttgcgaagtgaagcagggttttcatttttactctccttggtttaggtctagaaagaagaatactgacctgagaggaggcccagtgagattctgaaacctaattcttcgaaggcgtactggcccttagttcagttattttagttgtataagttgatattttttttctggaatgtagccatttgctgttatctgggaaacaagattctaacaggaaaccagcctaagacacttcaggttgagcgctgcctcggagtctgtgcccgtcgcgtcccctgcttgagttttgcacttggaagaaccctgcaccggctggcgtgtgcgacggcccagtcccatccagagcatggagcccgaccccagccagcgccttccactccatcatttcatttcacacccccgaagggaggggaggccaggaggggagctgctcctgccagaagctggtgggtgaccgttgggaatcggccacacctggtgtccatgggcagcctggtgcaattccattcatttgtacagaaacatttttgaaaaattcttttcaataagatgcaaaatcttccaacttttcaacccaacgtgatgaatatttgattttgttctagatttcctgtagctgtgaattgttaaaatgtatgattcaggataaaacgtaaacacgtgctgttagtaatttcttgtggatttcattgttttgccttcaaataaagcctttttttaaagaccttt

SEQ ID NO: 4480 - DNA, 4121 bp, Homo sapiens
  source 1..4121: mol_type = genomic DNA
aaagctaggacaaactcccgccaacacgcaggcgccgtaggttcactgcctactcctgcccgccatttcacgtgttctcagaggcaggtggaacttcttaatgcgcctgcgcaaaactcgccattttactacacgtgcggtcaacaagagttcattgcaaaaaaattgttacctcctggctgcttgtctaatacatagtgttaatcatgctttgccaagcgacttgactgtaatatttgcgcgtggaagattaaaaagatgttaaacacccaaggtagattcaaatgtgaatgattggtcggttggccaatcagactggttaacaataacattactcgggaaccaatggactccaaggggtggagacggcgtagaacgaccgaaggaatgacgttacacagcaatgtggcaccacaggccaatagcagggggaagcgatttcaagtatccaatcagagctgttccagggcggagtctaccaatgccgaaagcgaggaggcggggtaaaaaagagagggcgaaggtaggctggcagatacgttcgtcagcttgctcctttctgcccgtggacgccgccgaagaagcatcgttaaagtctctcttcaccctgccgtcatgtctaagtcagagtctcctaaagagcccgaacagctgaggaagctcttcattggagggttgagctttgaaacaactgatgagagcctgaggagccattttgagcaatggggaacgctcacggactgtgtggtaatgagagatccaaacaccaagcgctccaggggctttgggtttgtcacatatgccactgtggaggaggtggatgcagctatgaatgcaaggccacacaaggtggatggaagagttgtggaaccaaagagagctgtctccagagaagattctcaaagaccaggtgcccacttaactgtgaaaaagatatttgttggtggcattaaagaagacactgaagaacatcacctaagagattattttgaacagtatggaaaaattgaagtgattgaaatcatgactgaccgaggcagtggcaagaaaaggggctttgcctttgtaacctttgacgaccatgactccgtggataagattgtcattcagaaataccatactgtgaatggccacaactgtgaagttagaaaagccctgtcaaagcaagagatggctagtgcttcatccagccaaagaggtcgaagtggttctggaaactttggtggtggtcgtggaggtggtttcggtgggaatgacaacttcggtcgtggaggaaacttcagtggtcgtggtggctttggtggcagccgtggtggtggtggatatggtggcagtggggatggctataatggatttggtaatgatggaagcaattttggaggtggtggaagctacaatgattttgggaattacaacaatcagtcttcaaattttggacccatgaagggaggaaattttggaggcagaagctctggcccctatggcggtggaggccaatactttgcaaaaccacgaaaccaaggtggctatggcggttccagcagcagcagtagctatggcagtggcagaagattttaattaggaaacaaagcttagcaggagaggagagccagagaagtgacagggaagctacaggttacaacagatttgtgaactcagccaagcacagtggtggcagggcctagctgctacaaagaagacatgttttagacaaatactcatgtgtatgggcaaaaaactcgaggactgtatttgtgactaattgtataacaggttattttagtttctgttctgtggaaagtgtaaagcattccaacaaagggttttaatgtagatttttttttttgcaccccatgctgttgattgctaaatgtaacagtctgatcgtgacgctgaataaatgtcttttttttaatgtgctgtgtaaagttagtctactcttaagccatcttggtaaatttccccaacagtgtgaagttagaattccttcagggtgatgccaggttctatttggaatttatatacaacctgcttgggtggagaagccattgtcttcggaaaccttggtgtagttgaactgatagttactgttgtgacctgaagttcaccattaaaagggattacccaagcaaaatcatggaatggttataaaagtgattgttggcacatcctatgcaatatatctaaattgaataatggtaccagataaaattatagatgggaatgaagcttgtgtatccattatcatgtgtaatcaataaacgatttaattctcttgaatgaaatgacaactgtatggatttgggactggcagagatttggactttccctacccactccccctgataataatgttgaatgcttctatcacaattcaagttcaaagctctgccagggaatagaaactagctgctggctaatgccgctccataaatccgcagatttgaagtgtctgggaggccttttaaaaataactaatatcagaaagcattttaatgaacgtaaagataggcttacattaaaggaaaactgcagtttgactgggttctggttgggtgggccttcagaggttctatcagttaactatactaattaatttggagattcaaaccataccaatagaaactaaatttttctacataatttcatgttaactgcagtttccctttatggcacaaggggtcacacaacctacctaaaatgttaattgtatagaaaatgatttctaaacctttaacagttaatatccaataatgtgttatttgtacatagattcttttgagccttacctttggtgctctctcaatttcagtgctattgtacctagtagcatagagatttgtctatcaataggactgtatattccatcccatgggtgtgttggaagtttggggaggaggagggtggtgggaggtgggtgggaggtggtggtgggtgggaaagcatgggtgatagttccatgatactggctgagtttgcaatagcaggtggaaccctaactattgagggagtttgcagatacctcaggattcgtgacaatgcctttaaagatccaggagagatgttcagctactaggaactgctagcaagtatagcgcgaatggctccgagctcagacactctacagctgagagtagacacttgtggtatgtggagtacagataagccaggggcaggccacggcacgctccatgaaagctaggagggagtgaaatatcagtgatcatcgcaaggaaggaggcagacaagagtaaggcacacctgactcttaggactagcagtcagaaccaggaggaaaggttttattgctatgcgggtaggtaagaacagattttacttacatccatatagttacttaaagtccagttttctgttaaacatttttcttaatatattgagccaaaactagtccagttaagctgaacttggtttttctggagatgaattgttttaaattgacaccctattgatggctcccagttgaaggaagtgagcacattatttgtactgtgaatataaatttttgcccttttatttatcttcctttgacccatttccttaaaataatggctcaaagtaatagacttccccaaatggtggggggatgggtgggttattaatgggaggtatggggggtttagcttgagatgggacttggtcttagagctagttctaaaggttgtttacttttctagggaggagtctgctactagtcttatcagctcttaaaaacagaaactcatctgtccaagttcgtggcagaaaggtaagtttttacaaattagtgctcagcaaaagaatgccctgcgttcccaaagtaaaagaatgacaagctgtaccttaaaccaaaacacttcgtaatctcatccaattgcaaaaagagttattagccaaccaggtattcccagtagtgacagtggatataactgtgtagtcattcacctctgcttatatgaatactttacaacctcttttgccttttgcaggaacgtccttgtgaagacctttatctgagccactgtacttcgttatcactgccatgcagtttacatgagctgttctgcagctcaaattccattttgtgaatgggtttttttttttaataaactgtatttaactta

SEQ ID NO: 4481 - DNA, 2423 bp, Homo sapiens
  source 1..2423: mol_type = genomic DNA
aattaaaggagtcgggtctctaactgttgatctgtttttttcccttctgagcaatggagcttaccatctttatcctgagactggccatttacatcctgacatttcccttgtacctgctgaactttctgggcttgtggagctggatatgcaaaaaatggttcccctacttcttggtgaggttcactgtgatatacaacgaacagatggcaagcaagaagcgggagctcttcagtaacctgcaggagtttgcgggcccctccgggaaactctccctgctggaagtgggctgtggcacgggggccaacttcaagttctacccacctgggtgcagggtgacctgtattgaccccaaccccaactttgagaagtttttgatcaagagcattgcagagaaccgacacctgcagtttgagcgctttgtggtagctgccggggagaacatgcaccaggtggctgatggctctgtggatgtggtggtctgcaccctggtgctgtgctctgtgaagaaccaggagcggattctccgcgaggtgtgcagagtgctgagaccgggaggggctttctatttcatggagcatgtggcagctgagtgttcgacttggaattacttctggcaacaagtcctggatcctgcctggcaccttctgtttgatgggtgcaacctgaccagagagagctggaaggccctggagcgggccagcttctctaagctgaagctgcagcacatccaggccccactgtcctgggagttggtgcgccctcatatctatggatatgctgtgaaatagtgtgagctggcagttaagagctgaatggctcaaagaatttaaagcttcagttttacatttaaaatgctaagtgggagaagagaaaccttttttttggggggcggtttttttggtttgttgttggttttttttttttttttggcgggaagaaagagttttgctcttgttgcccaggctggagtgcaatgacgtgatctccgctcactgcaacctccacctcgcgggtttaagcgattcttctgcctcagcctccctagtagctgggattacaggtgcccaccaccatgcccagctaatttgtatttttagttgagacagggtttcactacgttggccaggctggtcttgaactcctgatctcaggcaatccacccacctcagcctcccaaagtgctgggatgacaggcgtgagcaaccgcacccagcttaaggtttttttgttttgttttgagacggagttttcgctcttgttgcccaggctggagtgcaatgctgtgatctcagcttaccacaacctccacctcccgggttcaagtgattcacctgcctcagcctcctgagtagctggtattacaggcatgcgtcaccacgccggctaattttgtacttttagtagagatggtgtttccccacgttggtcagcctggccaacatggcaaaaccctactaaagatacaaaaaaaaaaaaaaattagccaggcgtggtggtgggtgcctgtaatcccaggtacttggaaggctgaggcaggagaatctcttgaacccagaaggcgaaggttgcagtgaaccgagatcatgccattgtactctagcctgggtgacaagagcaagactccgtctcaaaaaaaaaaaaaaaaaaaaaaagaagtagagacagggagacagggtctcactgtgttgcctaggccggtcttgaactcctgggctcaagtgattctcccaccttgacctcctaaattgttgggattacaggtgtgagacagtgcacctggccgaaatagctcaagtttctgaaaaacaaatctgaatctatttgttattcttagcgtcactggtctggctttcagaattaacatacaaggttgccacacctagttctgcccagctttatgtcttttattccagtattccaccaaagtttgttttcctgcattccagttctcaagtcttaagataaagattgtacttgacagtttagtatatccataaaactatttgaggtggttaaggttcttgggttcattttccttaatactttgctgaatattgtagattgtaggcaatgaaaaagtctactaaattaggaaaaccttgaataattaggtatcctaggtaagagcccctaaacatcaagcaatctgtgagtctgtaaagaaataaatattttttggattattcttatctaattccacccctgttggaagatgatttctttgttctttgcaactatggaagctgtgaaaatcatcacaagtgcctctgaaagcgagtgttaggttggttagagggtttaatattttctgcaatggtttgtaggaattttaataaatgtagtatattttctgagatgattttgtaaaagtactattttaaatatcaaatcaaccaataaattcacatttgtgttaggaacag

SEQ ID NO: 4482 - DNA, 4568 bp, Homo sapiens
  source 1..4568: mol_type = genomic DNA
agtgctcgcccgcccgaccccggcggctcgcgcccgggagcgccgcagggtcgctagagtcggccgcgtcctttgtgtggcgctcaggctgcgccgcggggcggcgggacggaatgtgggcgctgcgggggcttttctctcctacccgaactgtgggaacaatggactgaaaggggaagatggattgaggggccgagcggggaagcgagctgcaccggggaatcatgacttctgcagccgagataaagaagccaccagtggcccccaagcccaagtttgttgtggcaaataataagccagccccacctcctattgcacctaaacccgacattgtgatttctagtgttccacagtcgacaaagaaaatgaaaccagcaatagccccaaaaccaaaagtcctgaagacctcacctgttcgagagattgggcagtcgccatcaaggaaaatcatgttgaacctggaagggcataaacaggaattagctgaaagcactgacaactttaattgtaaatatgaaggcaatcagagcaatgattatatttcaccaatgtgttcctgcagttctgagtgtatccataagctgggccatagagagaatttgtgtgtaaagcagcttgttttagagcccctggaaatgaatgaaaatttagaaaacagtaaaattgatgagactttgactataaaaactaggagtaaatgtgatttgtatggtgaaaaagccaagaaccagggtggggttgttttaaaggcaagcgttttagaagaggagctcaaagatgccttaatacaccaaatgccaccttttatttctgcacagaagcacaggcccacagacagcccagaaatgaatggtggctgtaattcaaatggacaattcagaattgaatttgcggatttgtcaccttccccatccagctttgaaaaagttcctgatcatcacagttgccacttacagcttcctagtgatgaatgtgaacattttgaaacttgccaggatgacagtgaaaaaagcaataattgctttcagtcatctgaactagaggctctggaaaatgggaaaaggagtactttaatatcttcagatggagttagtaagaaatcagaagtcaaagaccttggtcccttagaaattcatttagtaccatataccccaaaatttccaactcccaagcccagaaagacacgaactgctcgtctgttacgccaaaagtgtgtagatactcctagtgaaagcactgaagaaccggggaattcagacagtagctcttcctgtcttactgaaaatagtttgaaaatcaataaaatcagtgttctgcatcagaatgttttgtgtaagcaggaacaggtggataaaatgaagctaggaaataaaagtgaattgaatatggaatccaacagtgatgcacaggacttagtcaattcacagaaagccatgtgtaatgaaacaacttcctttgaaaaaatggcaccttcttttgataaagactctaatttgagttctgacagcacaactgtagatggttctagtatgtcgcttgctgtggacgaagggaccggttttataagatgtactgtatctatgagcctgcctaagcagctcaaattaacttgcaatgaacatttgcaatctgggagaaacctgggagtttctgcccctcaaatgcaaaaggaatctgttataaaagaggaaaattctctacgaattgtccccaaaaaacctcaaagacatagcttgcctgctacaggagtgcttaaaaaggctgcctccgaggagcttttggaaaaaagttcttatccttcaagtgaagaaaaaagttcagagaagagtctagaaagaaatcaccttcagcatttgtgtgcccaaaaccgtggtgtgtcatcctcctttgatatgcctaaacgggcttcagaaaagccagtgtggaagttacctcatcctattttacccttttcagggaacccagaattcttaaagtctgtcaccgtatcgtcaaacagtgagccttcaacagccctaaccaagcccagagcaaaatcgttatctgctatggatgtggaaaagtgcactaagccttgcaaagactctacaaagaaaaactcttttaaaaagttgctcagcatgaaactgtccatctgtttcatgaagagtgactttcaaaaattttggtccaagagtagccaactcggagacaccaccacaggccacctctccagtggggagcagaaggggattgaaagtgattggcaaggcttgttggtaggagaggagaagagaagtaaacccatcaaggcatattccacagaaaactatagcctggaatctcaaaagaagaggaagaagtctcggggccagaccagtgcagctaatggtctgagagctgagtctttggatgaccaaatgctctcccgggagtcatcatctcaggcaccttacaagtctgttacaagcctctgtgcaccggagtatgaaaatatacgccattatgaggaaataccagagtacgagaacttgccatttattatggctatacggaaaactcaagagttggaatggcagaattccagcagcatggaggacgctgatgcaaatgtgtatgaggtagaagagccgtatgaagctccagatggccagctgcagcttggacccagacatcagcattccagttcaggagcatcccaggaggaacagaatgatcttggtcttggtgaccttccctctgatgaggaggaaatcatcaacagttctgatgaagatgatgtcagctctgagtcaagtaaaggagagcctgacccactggaagataaacaggatgaagataatggaatgaaaagtaaagttcatcatattgccaaggagatcatgagctcagagaaagtgtttgtggatgtgttaaaacttttgcatattgatttccgggatgcagtagctcatgcttccaggcaacttgggaaaccagtgattgaggaccggattctaaatcagatcctatactacttgcctcagctgtatgagctcaaccgggatctcttgaaggaactggaggaaagaatgttgcactggactgaacaacaaagaattgctgatatctttgtaaagaagggaccatatctaaaaatgtattccacatacatcaaagaatttgataagaatatagccttgctggatgaacagtgcaagaaaaatccaggttttgctgctgttgttagagaatttgagatgagccctcgctgtgctaatctggccctcaagcactacctgctcaagccggttcagaggatcccccagtacaggctgttgctgacagattatttgaagaatctcatagaagatgctggagattacagagacactcaagatgcccttgctgttgttatagaggtagccaaccacgccaatgacaccatgaagcaaggagacaactttcagaaacttatgcaaattcagtacagcttaaatggacaccatgaaattgtgcagcctggtcgggtttttctcaaagaaggaattctgatgaagctgtctcggaaagtgatgcaacctcgaatgtttttcctgtttaatgatgccctgctgtatacaacaccagtgcagtctgggatgtataaactgaacaacatgctctcactggctggaatgaaggtcagaaaacctacccaagaagcctatcagaatgaattaaagattgaaagtgtagaacgttccttcattctctcagccagttctgccacagaaagggatgaatggctagaagcgatttccagggcaatagaagagtatgccaagaaaagaatcaccttctgtcctagtaggagtcttgatgaggcagactcagaaaataaagaagaagttagtcctcttggatcgaaggctcccatctggattcctgataccagagccacaatgtgtatgatctgcacaagcgaattcactctcacctggagacgacaccactgccgggcctgtggaaagattgtatgccaagcttgttcgtctaataagtatggcttagattacctgaaaaatcaaccagcaagagtatgtgaacattgtttccaagaactgcagaaattagatcaccagcactcccctaggattggatctcctggaaatcacaaatctccttcaagtgccttatcatcagtcttacatagcattccatcagggaggaaacagaaaaaaatcccagctgctctcaaagaagtatcagcaaacacagaggattcttctatgagtggctacttgtacagatcaaagggcaataaaaaaccctggaaacacttttggtttgtcataaaaaataaagtactatatacatatgctgcaagtgaggtaagatctgaaatctaaagatgagtaatttggggttttgtaatgccaactgcaagtaattacaatattttaaaaatccatttattttacataagattttttgctttgcttttggatgggggaggtgttgttgctgttatttttaatgtgaacagtgttcttgctttgtacctggagagctctttctcaaatgtgttaggaattttccatattattaaaatgcaatttttgtgtgtg

SEQ ID NO: 4483 - DNA, 1522 bp, Homo sapiens
  source 1..1522: mol_type = genomic DNA
gagtgtgtgacccagcccttcccccgtggccaagcagagagagtggccttgaggaagccatagcagcaggaccagcatggcctctgctgcctctgtgaccagcctggcagatgaagtcaactgccccatctgtcagggtaccctgagggagccggtcactatcgactgcggccacaacttctgccgggcctgccttacccgctactgtgagataccaggcccagacctggaggagtcccctacttgcccactctgcaaagaacccttccgtcctgggagcttccggcccaactggcagctggctaacgtggtggagaacattgagcgcctccagctggtgtccacactgggtttgggagaggaggatgtctgccaagagcacggagagaagatctacttcttctgtgaggatgatgagatgcagttgtgcgtggtgtgccgggaggctggggagcacgctacccacaccatgcgcttcctggaggatgcagcggctccctatagggaacaaatccataagtgtcttaaatgtctaagaaaagagagagaggagattcaagaaatccagtcaagagaaaataaaaggatgcaagtcctcctgactcaggtgtccaccaagagacaacaggtgatttctgagttcgcacacctgaggaagtttctagaggaacagcagagcatcctcttagcacaattggagagccaggatggggacatcttgaggcaacgggatgaatttgatttgctggttgctggggagatctgccggtttagtgctcttattgaagaactggaggagaagaatgagaggccagcaagggagctcctgacggacatcagaagcactctaataagatgtgaaaccagaaagtgccggaaaccggtggctgtgtcgccagagctgggccagaggattcgggactttccccagcaggccctcccgctgcagagggagatgaagatgtttctggaaaatctgcctaatcacctggttatccccacagctcacatttctctagaccctcagacttcccaccccaagctcctcttgtccgaggaccaccagcgagctcagttctcctacaaatggcagaactcaccagacaacccccagcgttttgaccgggccacctgtgttctggcccacactggcatcacaggggggagacacacgtgggtggtgagtatagacctggcccatgggggcagctgcaccgtgggcgtggtgagcgaggatgtgcagcggaagggggagcttcggctgcggccagaggagggggtgtgggctgtgaggctggcttggggcttcgtctcggctctgggctccttccccacacggctgaccctgaaggagcagccccggcaggtgagggtgtctcttgactatgaggtgggctgggtgaccttcaccaacgctgtcacccgagagcccatctacaccttcactgcctccttcactaggaaggtcattcccttctttgggctctggggccgagggtccagtttctccctgagctcctga

SEQ ID NO: 4484 - DNA, 574 bp, Homo sapiens
  source 1..574: mol_type = genomic DNA
gaagtgaagggtggcccaggtggggccaggctgactgaagtgagtagtgggggtgccagaccaggtgcgtctgccgctggattgtgataggaagcagagtgttcgtgtgatggatactatgatgctgaatgtgcggaatctgtttgagcagcttgtgcgccgggtggagattctcagtgaaggaaatgaagtccaatttatccagttggcgaaggactttgaggatttccgtaaaaagtggcagaggactgaccatgagctggggaaatacaaggatcttttgatgaaagcagagactgagcgaagtgctctggatgttaagctgaagcatgcacgtaatcaggtggatgtagagatcaaacggagacagagagctgaggctgactgcgaaaagctggaacgacagattcagctgattcgagagatgctcatgtgtgacacatctggcagcattcaactaagcgaggagcaaaaatcagctctggcttttctcaacagaggccaaccatccagcagcaatgctgggaacaaaagactatcaaccattgatgaatctggttccattttatcagat

SEQ ID NO: 4485 - DNA, 581 bp, Homo sapiens
  source 1..581: mol_type = genomic DNA
ggagctgtgggcgcggcgctgctctgccgttgggtgaggcgcggagcgaagtgaagggtggcccaggtggggccaggctgactgaagagagccaaaggaaatcaacatttgaattgactacccaatgtcctgcccctgtttctgtcctgtagcacttaggaaagatggatactatgatgctgaatgtgcggaatctgtttgagcagcttgtgcgccgggtggagattctcagtgaaggaaatgaagtccaatttatccagttggcgaaggactttgaggatttccgtaaaaagtggcagaggactgaccatgagctggggaaatacaaggatcttttgatgaaagcagagactgagcgaagtgctctggatgttaagctgaagcatgcacgtaatcaggtggatgtagagatcaaacggagacagagagctgaggctgactgcgaaaagctggaacgacagattcagctgattcgagagatgctcatgtgtgacacatctggcagcattcaactaagcgaggagcaaaaatcagctctggcttttctcaacagaggccaaccatccagcagcaatgctggg

SEQ ID NO: 4486 - DNA, 3609 bp, Homo sapiens
  source 1..3609: mol_type = genomic DNA
ggcggggcctcctggtgagcgcgcgccggggcggcctccgggaagtgggagacgctgcgggtcctgggcccaggccttgggatgggcgggaaggcttggccgcgccgggctgtgggcactgcaggaggcccctgtgcagaacagatctcggcccctttccaaacactcctgatgcctcatttgcctctcgcctcttttcgaccaccattttgggggctgaggcactcacggggcctccccaggtttcactccgtttctacacagtcggagccccatggatctcccatctcccggaggaaccgtgaagccaaacagaagcgcctgcgagagaagcaggcgactctggaggctgagatagcaggggagagcaagtcacctgcagaatccattaaggcctggaggcctaaggagttagtattgtatgaaatccctacgaaacccggtgaaaagaaagatgtctctgggcccctgcctcctgcatacagcccccgatatgttgaggctgcctggtacccgtggtgggtacgagagggcttcttcaaaccagaatatcaggcccggctgccccaagctacaggggagaccttttccatgtgtatcccacctcccaatgtcactggctccctgcacattggccacgcactcacggtggccatacaggatgccctcgtgcgctggcaccggatgcgtggggatcaagtgctgtgggtccctggttcagatcatgcaggaattgctacacaagctgtggtggagaaacaactgtggaaggaacggggagtgaggagacatgagctgagccgggaggccttccttagggaggtgtggcagtggaaggaggcgaaaggtggagagatctgtgagcagctgcgagctctgggtgcctccctggactgggatcgagagtgttttaccatggatgttggctcctcagtggctgtgactgaagcttttgtgcggctctacaaggcggggttgctgtaccggaaccatcagcttgtcaactggtcatgtgctttaagatcagccatctcggacattgaggtggagaaccggcccctgcctggccacacacagcttcgactgcctggctgccccacccccgtgtcttttggcctcctattttctgttgccttccccgtggatggagagcctgatgcagaggttgtggtaggaaccacaaggccagagacgctgcctggagatgtggctgtggccgttcatccagacgactcgcgatacacacatctacacgggcgacagcttcgtcaccccttgatggggcagcctcttcccctcatcacagactatgctgttcagccacatgtgggcacgggggcagtgaaggtgactccagctcacagtcctgccgatgctgagatgggggcccgacatggcttgagccccttgaatgtcattgcggaggatgggaccatgacctccctctgcggggactggctgcagggtcttcaccggtttgtggcccgggaaaagataatgtctgtgctgagtgaatggggcctgttccggggcctccagaaccaccccatggtactgcccatctgcagccgttctggggatgtgatagaatacctgctgaagaaccagtggtttgtccgctgccaggaaatgggggcccgagctgccaaggctgtggagtcgggggccctggagctcagtccctccttccaccagaagaactggcagcactggttttcccatattggggactggtgtgtctcccggcagctgtggtggggccatcagattccagcctacctggttgtagaggaccatgcgcagggagaagaggactgttgggtggttgggcggtcagaggctgaggccagagaggtagcagcggaactgacagggaggccaggggcagagctgaccctggagagggatcctgatgtcctagacacatggttttcttctgccctgttccccttttctgccctgggctggccccaagagaccccagaccttgctcgtttctaccccctgtcacttttggaaacgggcagcgaccttctgctgttctgggtgggccgcatggtcatgttggggacccagctcacagggcagctgcccttcagcaaggtgcttcttcatcccatggttcgggacaggcagggccggaagatgagcaagtccctggggaatgtgctggacccaagagacatcatcagtggggtggagatgcaggtgctgcaggaaaagctgagaagcggaaatttggaccctgcagagctggccattgtggctgcagcacagaaaaaggactttcctcacgggatccctgagtgtgggacagatgccctgagattcacactctgctcccatggagttcaggcgggcgacttgcacctgtcagtctctgaggtccagagctgccgacatttctgcaacaagatctggaatgctcttcgctttatcctcaatgctttaggggagaaatttgtgccacagcctgctgaggagctgtctccctcctccccgatggatgcctggatcctgagccgccttgccctggctgcccaggagtgtgagcggggcttcctcacccgagagctctcgctcgtcactcatgccctgcaccacttctggcttcacaacctctgtgacgtctacctggaggctgtgaagcccgtgctgtggcactcgccccgccccctggggccccctcaggtcctgttctcctgcgctgacctcggcctccgcctcctggccccactgatgcccttcctggctgaagagctctggcagaggctgccccccaggcctggttgcccccctgcccccagcatctcggttgccccctaccccagcgcctgcagcttggagcactggcgccagccagagctggagcggcgcttctcccgggtccaagaggtcgtgcaggtgctaagggctctccgagccacgtaccagctcaccaaagcccggccccgagtgctgctgcagagctcagagcctggggaccagggcctcttcgaggccttcttggagcccctgggcaccctgggctactgtggggctgtgggcctgttacccccaggcgcagcagctccctccggctgggcccaggctccactcagtgacacggctcaagtctacatggagctgcagggcctggtggacccgcagatccagctacctctgttagccgcccgaaggtacaagttgcagaagcagcttgacagcctcacagccaggaccccatcagaaggggaggcagggactcagaggcaacaaaagctttcttccctccagctggaattgtcaaaactggacaaggcagcctctcacctccggcagctgatggatgagcctccagccccagggagcccggagctctaactcatcatccccatcagttttcctccctctcagacctgtctttgaggacaaacagatttgtcagctgtcagggtgcagtgggacgtcagagactatgtggtccatcgccttcattgtgtaaatgaggacacagactggcttggtcgcagtgactgtggtgtccttgagatgctcacattactgcccggcctgcctcccacctggaagtctgggaatgaggagattgagataaacttttgaaatccc

SEQ ID NO: 4487 - DNA, 1182 bp, Homo sapiens
  source 1..1182: mol_type = genomic DNA
atcagagtgcgccgtcgtcgccgccgccaccactgtcgccatgaacagtgtgggggaggcatgcacggacatgaagcgcgagtacgaccagtgcttcaatcgctggttcgccgagaaatttctcaagggggacagctccggggacccgtgcaccgacctcttcaagcgctaccagcagtgtgttcagaaagcaataaaggagaaagagattcctattgaaggactggagttcatgggccatggcaaagaaaagcctgaaaattcttcttgaccttgacagtcaccttgaaggatttcgcaagtccagaaattgaggactctggatttttgtcaactaactctgtgaacatagccatcagatttgatgaggaacttaggagagaggagttttatttcctccttcgatgttttcctctcagttgtaaaagatgaactctttgagatgatttctcacctgctgtggtatcttgcaggaactgtgtgctaaaattgaacaatttttttgagattatggttgcaatacttggcgtggaatcagctttacataaatataccttgtatgcaaacgatgataaactagtcaggatgagcagagctgcctgacctcttgatttctgctgcaaaagacatatacactgtactggggtcactatttatgaaagcaattggttaggacctctttttttcctctcagggaactaatgctctgaaaagggatctgggcacaacagtttcagtgagtgcttttgagcacacttttatttttatatagtaactaatggttaagattgatggtggcctggattagcaaagaggaagacagcttttaacacagttccctgccttcacaagaggtgtcagattaagatgtgaaagctgcaagaatgttgcagtgaacaccatttcagagctctcagtgtgcagttcaggaattaagatacttggaatagctgtggaggaagaacctaaattgcaaagatctgctattgccagctctcaacccaagtcagtgaattgtcaacctgcatatcctaaaaatgtcaaaatgctgcatctggttaaatgtcggggtaggggggaagctgaaggtgctcgcttcatttgccttgtttactcatcctgccctgtaatgtctgtaatcctgaagatggaataaattgtaacatttagtttctatcatta

SEQ ID NO: 4488 - DNA, 1825 bp, Homo sapiens
  source 1..1825: mol_type = genomic DNA
tgcaattaaaggagtcgggtctctaactgttgatctgtttttttcccttctgagcaatggagcttaccatctttatcctgagactggccatttacatcctgacatttcccttgtacctgctgaactttctgggcttgtggagctggatatgcaaaaaatggttcccctacttcttggtgaggttcactgtgatatacaacgaacagatggcaagcaagaagcgggagctcttcagtaacctgcaggagtttgcgggcccctccgggaaactctccctgctggaagtgggctgtggcacgggggccaacttcaagttctacccacctgggtgcagggtgacctgtattgaccccaaccccaactttgagaagtttttgatcaagagcattgcagagaaccgacacctgcagtttgagcgctttgtggtagctgccggggagaacatgcaccaggtggctgatggctctgtggatgtggtggtctgcaccctggtgctgtgctctgtgaagaaccaggagcggattctccgcgaggtgtgcagagtgctgagaccgggaggggctttctatttcatggagcatgtggcagctgagtgttcgacttggaattacttctggcaacaagtcctggatcctgcctggcaccttctgtttgatgggtgcaacctgaccagagagagctggaaggccctggagcgggccagcttctctaagctgaagctgcagcacatccaggccccactgtcctgggagttggtgcgccctcatatctatggatatgctgtgaaatagtgtgagctggcagttaagagctgaatggctcaaagaatttaaagcttcagttttacatttaaaatgctaagtgggagaagagaaaccttttttttggggggcggtttttttggtttgttgttggttttttttttttttttggcaggagaatctcttgaacccagaaggcgaaggttgcagtgaaccgagatcatgccattgtactctagcctgggtgacaagagcaagactccgtctcaaaaaaaaaaaaaaaaaaaaaaagaagtagagacagggagacagggtctcactgtgttgcctaggccggtcttgaactcctgggctcaagtgattctcccaccttgacctcctaaattgttgggattacaggtgtgagacagtgcacctggccgaaatagctcaagtttctgaaaaacaaatctgaatctatttgttattcttagcgtcactggtctggctttcagaattaacatacaaggttgccacacctagttctgcccagctttatgtcttttattccagtattccaccaaagtttgttttcctgcattccagttctcaagtcttaagataaagattgtacttgacagtttagtatatccataaaactatttgaggtggttaaggttcttgggttcattttccttaatactttgctgaatattgtagattgtaggcaatgaaaaagtctactaaattaggaaaaccttgaataattaggtatcctaggtaagagcccctaaacatcaagcaatctgtgagtctgtaaagaaataaatattttttggattattcttatctaattccacccctgttggaagatgatttctttgttctttgcaactatggaagctgtgaaaatcatcacaagtgcctctgaaagcgagtgttaggttggttagagggtttaatattttctgcaatggtttgtaggaattttaataaatgtagtatattttctgagatgattttgtaaaagtactattttaaatatcaaatcaaccaataaattcacatttgtgttaggaacagaa

SEQ ID NO: 4489 - DNA, 1029 bp, Homo sapiens
  source 1..1029: mol_type = genomic DNA
gttccagggtcgggtttggtggattcctcagtccctgccgccgcggggcgccctgggatagcggcggggcctcctgaacagatctcggcccctttccaaacactcctgatgcctcatttgcctctcgcttcttttcgaccaccattttgggggctgaggcactcacggggcctccccaggtttcactccgtttctacacagtcggagccccatggatctcccatctcccggaggaaccgtgaagccaaacagaagcgcctgcgagagaagcaggctactctggaggctgagatagcaggggagagcaagtcacctgcagaatccattaaggcctggaggcctaaggagttagtattgtatgaaatccctacgaaacccggtgaaaagaaagatgtctctgggcccctgcctcctgcatacagcccccgatatgttgaggctgcctggtacccgtggtgggtacgagagggcttcttcaaaccagaatatcaggcccggctgccccaagctacaggggagaccttttccatgtgtatcccacctcccaatgtcactggctccctgcacattggccacgcactcacggtggccatacaggatgccctcgtgcgctggcaccggatgcgtggggatcaagtgctgtgggtccctggttcagatcatgcaggaattgctacacaagctgtggtggagaaacaactgtggaaggaacggggagtgaggagacatgagctgagccgggaggccttccttagggaggtgtggcagtggaaggaggcgaaaggtggagagatctgtgagcagctgcgagctctgggtgcctccctggactgggatcgagtgttttaccatggatgttggctcctcagtggctgtgactgaagcttttgtgcggctctacaaggcggggttgctgtaccggaaccatcagcttgtcaactggtcatgtgctttaagatcagccatctcggacattgaggtggagaaccggcccctgcctggccacacacagcttcgactgcctggctg

SEQ ID NO: 4490 - DNA, 1539 bp, Homo sapiens
  source 1..1539: mol_type = genomic DNA
cgttaaagtctctcttcaccctgccgtcatgtctaagtcagagtctcctaaagagcccgaacagctgaggaagctcttcattggagggttgagctttgaaacaactgatgagagcctgaggagccattttgagcaatggggaacgctcacggactgtgtggtaatgagagatccaaacaccaagcgctccaggggctttgggtttgtcacatatgccactgtggaggaggtggatgcagctatgaatgcaaggccacacaaggtggatggaagagttgtggaaccaaagagagctgtctccagagaagattctcaaagaccaggtgcccacttaactgtgaaaaagatatttgttggtggcattaaagaagacactgaagaacatcacctaagagattattttgaacagtatggaaaaattgaagtgattgaaatcatgactgaccgaggcagtggcaagaaaaggggctttgcctttgtaacctttgacgaccatgactccgtggataagattgtcattcagaaataccatactgtgaatggccacaactgtgaagttagaaaagccctgtcaaagcaagagatggctagtgcttcatccagccaaagaggtcgaagtggttctggaaactttggtggtggaagctacaatgattttgggaattacaacaatcagtcttcaaattttggacccatgaagggaggaaattttggaggcagaagctctggcccctatggcggtggaggccaatactttgcaaaaccacgaaaccaaggtggctatggcggttccagcagcagcagtagctatggcagtggcagaagattttaattaggaaacaaagcttagcaggagaggagagccagagaagtgacagggaagctacaggttacaacagatttgtgaactcagccaagcacagtggtggcagggcctagctgctacaaagaagacatgttttagacaaatactcatgtgtatgggcaaaaaactcgaggactgtatttgtgactaattgtataacaggttattttagtttctgttctgtggaaagtgtaaagcattccaacaaagggttttaatgtagatttttttttttgcaccccatgctgttgattgctaaatgtaacagtctgatcgtgacgctgaataaatgtcttttttttaatgtgctgtgtaaagttagtctactcttaagccatcttggtaaatttccccaacagtgtgaagttagaattccttcagggtgatgccaggttctatttggaatttatatacaacctgcttgggtggagaagccattgtcttcggaaaccttggtgtagttgaactgatagttactgttgtgacctgaagttcaccattaaaagggattacccaagcaaaatcatggaatggttataaaagtgattgttggcacatcctatgcaatatatctaaattgaataatggtaccagataaaattatagatgggaatgaagcttgtgtatccattatcatgtgtaatcaataaacgatttaattctcttgaatgaaa

SEQ ID NO: 4491 - DNA, 623 bp, Homo sapiens
  source 1..623: mol_type = genomic DNA
gcactaagcacatctacaatcaaggagaggggcaggctttaccttttgaaggaagaagtatgaaagtgtatcactgactgatcaagtagagtaaaatgaatgaaagtaaacctggtgactcacagaaccttgcttgtgttttctgtcgaaaacatgatgactgtcctaataaatacggagaaaagaaaactaaggagaaatggaatctcactgtacattactactgtttgttgatgtcaagtggaatttggcagagaggcaaagaagaagaaggagtttatggttttctaatagaagatatcaggaaggaagtgaatagagcttctaaactgaaatgctgtgtttgcaagaaaaatggtgcttcaattggatgtgttgcaccccgatgtaaacgaagttatcatttcccatgtggacttcagagagaatgtattttccagtttactggcaattttgcgtcattttgttgggaccatcgacctgttcaaataattacatctaataattatagagagtccttaccatgcaccatttgcttggaatttattgagcctattccaagttataacatattacgaagtccttgttgtaagaacgcttggtttcatagagactgtttacag

SEQ ID NO: 4492 - DNA, 5298 bp, Homo sapiens
  source 1..5298: mol_type = genomic DNA
aacgtgatggcgtcaggggccggggcgccgcttcctgttgtcagtggccgagagaccgcatcgtcggctcggaggctgaggggctgccgcggccgggagcgcccctcgcctcgctcctcgctccgcttggtgtcatgtgattctctgagggagcagctgcgtgagtggagatgctttcagtggtggagaatggactggacccccaggctgccatcccggtcatcaagaagaagctggtgggatccgtgaaggccttgcagaagcagtacgtgtccctggacacggtggtcactagtgaagacggagatgccaacaccatgtgcagcgccctggaggccgtatttatccatggcctgcacgccaagcacatccgagctgaggccggaggaaaaaggaagaaaagtgcccaccagaagcctctgccccagcctgtcttctggcccctcctgaaagctgtcacccacaaacacatcatctcagagttggagcacctgacgtttgtcaacacggatgtgggccgctgccgggcatggctgcggctggccctgaacgatggcctgatggagtgctacctgaagctgctgctgcaggagcaggcccgcttgcatgagtactaccagcccaccgccctgctccgagatgctgaggagggcgagttcctccttagcttcctgcagggcctcacgtccttgtccttcgaactctcctacaagtctgccatcttaaatgagtggacgctcaccccactggccctgtctgggctttgcccgctttctgagctggaccctctctctacctctggtgcagaactacagcggaaggaatctctggattccatttcgcattcttcaggctctgaagacatcgaagtccatcactcgggccataagatacggaggaaccagaagctgactgcctcctccctcagcctggacacggccagttcatcccagctgtcctgcagcctaaactctgatagctgcttactccaagagaatggctccaagagtccagaccattgtgaggagcccatgtcctgtgactcagacctgggcacagcaaatgctgaggactcagaccggtctctgcaagaggtattgttggaattcagcaaagcccaggtaaactctgtgccaaccaacggactgagccaagaaacggagatccccacaccacaggcctcgctctccctccatggcctcaacaccagcacatacctgcactgtgaggcacctgcagagccccttcctgcccaggcagcctctggaactcaagatggtgtccacgtgcaggagccgcgtccccaggcgcccagccccctggacttacagcagcctgtagagagcacctcaggccagcagccttctagtactgtcagcgagacagccagagaagtgggccaagggaatggcctgcagaaggcccaggctcatgacggagctggtctgaagctggtagtttcctcacccaccagtccgaaaaacaagagctggatctcagaggatgacttctaccggccttcccgggagcaacccctggagagtgcttcagaccacccaatagcttcttacagggggactccagggtcaaggcctggtctccacaggcatttttctcaagaaccaagaaaaaactgctccctgggggcgttagaccaagcgtgtgtaccttccccaggaagaaggcaagcccaggcagccccatcccaggggcataagagcttccgggtggtacaccggagacagatgggactgtccaacccattccggggtctcatgaagctgggcaccgtggagcggcggggggcaatgggcatctggaaggagctcttctgcgagctctccccgctggagttccgcctctacctgagcaacgaggagcacacctgtgtggagaactgctcgctgcttcgctgtgagtctgtggggccagcccatagtgatgggcgctttgagctggtcttctctggcaagaagctggccctgcgcgcctcctcccaggacgaagctgaggactggctggaccgggtgcgggaggccctgcagaaggtccggcctcagcaggaggatgagtgggtgaacgtgcagtacccagaccagcctgaggaaccccccgaggcgccccagggctgcctctctccctcagacctgctctcggagcccgcggccctccagggcacacagtttgactggtcgtccgcccaggttccagagccagatgccatcaaggagtccctgctgtacttgtacatggacaggacctggatgccctatatattttctctgtccttggaggctctgaaatgtttccgcatcaggaacaatgagaagatgctgagtgacagccacggcgtggagaccatccgggacatcctgccagacaccagccttgggggcccatccttcttcaaaatcatcacggccaaggctgtcctgaagctgcaggccggaaacgccgaggaagccgccctgtggagggatctggtccgcaaagtcctggcatcctacttggagacagccgaggaggcggtgaccctgggcgggagcctggatgaaaactgtcaggaggtgctgaaatttgccacccgggagaatggcttcctgctgcagtacctggtggctatccccatggagaaaggccttgactcccaaggctgcttctgcgcaggctgctcccggcagatcggcttctcctttgtacgacccaagctctgtgccttctctggcctctattactgtgacatctgccaccaagacgatgcctcagtgattccggccaggatcatccacaactgggacctcaccaagcgcccgatctgcaggcaggccctgaagtttctgacacagatccgggcccagcccctcatcaacctgcagatggtgaacgcgtctctgtacgagcatgtggagcggatgcacctcattgggaggagacgggagcagctgaagctcctgggggattacctgggcctgtgccggagtggcgccctgaaggagctcagcaagaggctcaaccacaggaattatctcttggaatctccgcataggttcagtgttgctgacctccaacagatcgcagacggggtgtatgaaggattcctcaaggccctgattgaatttgcctcccagcatgtctaccactgcgacctgtgcacccagcgcggcttcatctgccagatctgccagcaccacgacatcatcttcccctttgagtttgacaccacagtcaggtgtgccgagtgcaagaccgtcttccaccagagctgccaggctgtggtgaagaagggctgcccccgctgtgcccgccggcgcaagtaccaggaacagaacattttcgcctgatgcccatctgctgaccccgctctgaaagccgggggtgagtgtggctcagccatcccggctgggtttgccatcagcccaggatactcaccgtgtcacagctgtgtccccttgtcaggaagaccctcagatgtggccagagcaccggcctcccagagaaagcccaggaagtccccgtggtgtcccctggccctccccccacccctctgctgcaggaggcgtggccaccaccagatgctccctgtctggggcaggcagggccgtttactcactaggccctggctcaccagcgtcccggcgcctccgttagggctgcccaaacactgtggaaaggggacttggggagcattttcaattccacattcctgattaaaaggtctagttttttaaggtgggtttttcccattcatatttcaacagaaagtatttttttattcttgaccctacgtgagtcacccatgaaatccagacattctcacccccagcggatgcacaggagccactcaggcctggcttagaggtagcgggtggctggtgggcaggccactgctgggacagggtctatgggcccacccagtgcctttccttggccctcactgccagtgccaaaccgcccctcagcagggcagggccagtcctggcgaccccggttcctctgtgtcctctttactccccaccccagtgcgtctcgcctgctgagcccaccgctttctcagcgtcagagcccctagctcttctctagcctggggccttggccccattaggagaaggagaaatgactggaaaccagcactgtcagcactttgagccctcctcggtttatggagggtcgccgtcttgcccacccccgatccccgtgcgctcctcacccctctacagacaggggcgctgctgcagatgctccaggcccaccttggtgggtgcccggggtcacactctctgcctgactgacccctgccagggcacagataggcaggaccccagagagggcaggcagccacgccctgcactgtggagaagtgacctggtcctaagctgtgcagggcgtgcgggggaactgccctgtggatgcagccaccacctcacaaagccatgaattcccaaagcatcactgaacttgcccagccgggacactggagactgaagaagttccccggagcaggactgcctttgaaggggccttggggctggggtgggagtctggaattgttttcaaagtgatggtcagaccctccaggcttcggggaaatgtgggtttgctggtctctctgtcgccttcccccacctctcctggacctagcaggccctcagtcctagctgtcttacctgcactcagcttggagtcaggcctcaggtggagagccgcatgtcactgtcagagatgagcccacccccacccttccctgggggcgattagctgctgagtcacccacccagccttggagctggatgcctgtgcagcagaacagaggcaacggtggcaggcaggtggaggctgcgcacagcttctcccggtcatggcacacacctgtgcccagacgccaatgcctcctaagccaggagctgggttatgcaccgccatggcccacattaacgctccaccacaagcccagcctagtcagagccctcattgccccatccctgagtgggcaggagcctggcctggggagggcttcggcctgtgaggattctccccgaaggtgccctcggaggcagcaggtttgaggccctggggggcccgttccccagaagctgccagtgctttcagatgcattgactcttcccacctcccctccctcagaaaggtagtgcccacactatttttaaaatgttattttatgcaatacactgttcctagtgagcagggctctggccctgaggagtctttgcaatgtattgaaggaattgctgccgtgtgagttttgaatgattttgcagtaaagacctgatctttctcatc

SEQ ID NO: 4493 - DNA, 581 bp, Homo sapiens; identical to SEQ ID NO: 1925
  source 1..581: mol_type = genomic DNA

SEQ ID NO: 4494 - DNA, 348 bp, Homo sapiens
  source 1..348: mol_type = genomic DNA
atgacaaagaaaagaaggaacaatggtcgtgccaaaaagggccgcggccacgtgcagcctattcgctgcactaactgtgcccgatgcgtgcccaaggacaaggccattaagaaattcgtcattcgaaacatagtggaggccgcagcagtcagggacatttctgaagtgagcgtcttcgatgcctatgtgcttcccaaactgtatgtgaagctacattactgtgtgagttgtgcaattcacagcaaagtagtcaggaatcgatctcgtgaagcccgcaaggaccgaacacccccaccccgatttagacctgcgggtgctgccccaggtcccccaccaaagcccatgtaa

SEQ ID NO: 4495 - DNA, 2190 bp, Homo sapiens
  source 1..2190: mol_type = genomic DNA
gttttcaaaccggagctgtgggcgcggcgctgctctgccgttgggtgaggcgcggagcgaagtgaagggtggcccaggtggggccaggctgactgaatgtatctcctagctatggactaaataatacatggggggaaataaacaagtattcatgagggtgaaaatgtgacccagcaggaaaattacaactattttcaattgacgttgaatagggagagccaaaggaaatcaacatttgaattgactacccaatgtcctgcccctgtttctgtcctgtagcacttaggaaagatggatactatgatgctgaatgtgcggaatctgtttgagcagcttgtgcgccgggtggagattctcagtgaaggaaatgaagtccaatttatccagttggcgaaggactttgaggatttccgtaaaaagtggcagaggactgaccatgagctggggaaatacaaggatcttttgatgaaagcagagactgagcgaagtgctctggatgttaagctgaagcatgcacgtaatcaggtggatgtagagatcaaacggagacagagagctgaggctgactgcgaaaagctggaacgacagattcagctgattcgagagatgctcatgtgtgacacatctggcagcattcaactaagcgaggagcaaaaatcagctctggcttttctcaacagaggccaaccatccagcagcaatgctgggaacaaaagactatcaaccattgatgaatctggttccattttatcagatatcagctttgacaagactgatgaatcactggattgggactcttctttggtgaagactttcaaactgaagaagagagaaaagaggcgctctactagccgacagtttgttgatggtccccctggacctgtaaagaaaactcgttccattggctctgcagtagaccaggggaatgaatccatagttgcaaaaactacagtgactgttcccaatgatggcgggcccatcgaagctgtgtccactattgagactgtgccatattggaccaggagccgaaggaaaacaggtactttacaaccttggaacagtgactccaccctgaacagcaggcagctggagccaagaactgagacagacagtgtgggcacgccacagagtaatggagggatgcgcctgcatgactttgtttctaagacggttattaaacctgaatcctgtgttccatgtggaaagcggataaaatttggcaaattatctctgaagtgtcgagactgtcgtgtggtctctcatccagaatgtcgggaccgctgtccccttccctgcattcctaccctgataggaacacctgtcaagattggagagggaatgctggcagactttgtgtcccagacttctccaatgatcccctccattgttgtgcattgtgtaaatgagattgagcaaagaggtctgactgagacaggcctgtataggatctctggctgtgaccgcacagtaaaagagctgaaagagaaattcctcagagtgaaaactgtacccctcctcagcaaagtggatgatatccatgctatctgtagccttctaaaagactttcttcgaaacctcaaagaacctcttctgacctttcgccttaacagagcctttatggaagcagcagaaatcacagatgaagacaacagcatagctgccatgtaccaagctgttggtgaactgccccaggccaacagggacacattagctttcctcatgattcacttgcagagagtggctcagagtccacatactaaaatggatgttgccaatctggctaaagtctttggccctacaatagtggcccatgctgtgcccaatccagacccagtgacaatgttacaggacatcaagcgtcaacccaaggtggttgagcgcctgctttccttgcctctggagtattggagtcagttcatgatggtggagcaagagaacattgaccccctacatgtcattgaaaactcaaatgccttttcaacaccacagacaccagatattaaagtgagtttactgggacctgtgaccactcctgaacatcagcttctcaagactccttcatctagttccctgtcacagagagtccgttccaccctcaccaagaacactcctagatttgggagcaaaagcaagtctgccactaacctaggacgacaaggcaacttttttgcttctccaatgctcaagtga

SEQ ID NO: 4496 - DNA, 581 bp, Homo sapiens; identical to SEQ ID NO: 1925
  source 1..581: mol_type = genomic DNA

SEQ ID NO: 4497 - DNA, 5891 bp, Homo sapiens
  source 1..5891: mol_type = genomic DNA
gcggagtcgggaatcaaaacaaagggcctggggggggcggggggaaggcggcggggccggaatgtgagcggaggtggagccggcggcagagggtggaagaatgaaagaaaagaaagatgaaaggatgttgaatcactttgcatggctgtatgatggaaggaaacggaactgagaactcctgcagtagaacacgtggatggcttcaacaagataatgatgctaagccatggctttggaaattctctaattgcttttctcgtcctgagcagacgctgccacatagtccccaaacgaaagagtacatggagaacaagaaagttgctgtggaactaaaggatgtaccatcaccccttcatgctggctctaagctttttccagcagtcccacttcctgatattcgttctcttcagcagcctaaaatacagctttcttctgtccccaaagtaagctgctgtgctcattgccctaatgaaccctccacttcgccaatgcgttttggtggtggtggtggcggtagcggaggtaccagtagcttgattcacccgggcgcactgttagactcgcaaagcaccaggacaatcacgtgtcaggtagggtcagggtttgctttccagtctgcatcttcactccagaatgcctcagctaggaacaatttggcaggcattgcaagtgactttcccagcatgtgtctagagagtaacctgtcttcctgcaaacacctgccctgttgtggaaaactccacttccagtcatgtcatggtaatgtgcacaagctgcatcagtttccgagtctgcagggctgcacctccgctggctatttcccctgttctgatttcacaagcggggctccagggcatttggaagagcacatttcacagtcggagctaacgcctcacttgtgcaccaactctttgcaccttaatgtggtacctccggtttgtttaaagggctcactttactgcgaagactgtctaaacaagccagcaagaaatagcataatcgatgcggctaaagtctggccaaatataccacctccaaatactcaacctgcacctcttgctgtccctctgtgtaatggctgtggaaccaaaggaacagggaaggagaccacgttgttattggcgaccagtctaggcaaagctgcttcaaaatttgaagttgcagtagctggacaggtgctagaaaacttaccccccattggagttttttgggatattgaaaactgctccgttccctctggccggtcagcaactgctgttgtgcaaagaatccgtgagaagttttttaaaggccacagagaagcagaattcatctgtgtatgtgacatcagtaaagaaaacaaggaagttattcaagagctgaataattgccaggtaaccgttgcccacatcaatgctactgcaaagaatgccgctgatgataaactgcggcagagtctccgcagatttgcaaatacacacactgctccagccacagtggttcttgtgtcaactgatgtcaattttgcattggaacttagtgacctgagacacaggcatggtttccacattattttggtccataaaaaccaggcctcagaagcactgctgcatcatgctaacgagctgatcagatttgaagagttcatttccgacttgccccccaggttaccactaaaaatgccacagtgccacactctgctctatgtttataacctaccagcaaataaggatggcaagagcgtcagcaacaggctcagacgcctgtccgataattgtggtgggaaagtgctgagtatcacaggctgcagtgcaattctccgcttcataaaccaagatagtgcagagcgcgctcagaagcgaatggaaaacgaagatgtctttggtaataggatcattgtgtcatttactccaaaaaatagagaactctgtgaaacaaagagttcaaatgcaattgctgataaagtgaagtctcccaaaaaacttaagaatccaaaattgtgcctcatcaaagatgcaagtgaacaatcttccagtgccaaagccacgcctggaaaagggtcacaggcaaattctggatctgctacaaaaaatacaaatgttaaaagtttacaggagctgtgccgcatggagtcaaaaactggtcatagaaacagtgagcaccagcaaggtcacctgaggctggtcgtacccactcacggtaactcaagtgctgcagtgtcgacgccgaaaaactcgggggtggcagaacccgtttacaaaaccagtcagaaaaaggagaacctcagtgcccgaagtgttaccagttctcctgtagagaaaaaagataaagaggagactgtattccaagtgagttacccgtctgcttttagcaagttagttgcatccaggcaagtcagtcctctgctcgcatctcagtcttggtcttctaggagtatgtctccaaaccttttaaacagagcatccccgcttgctttcaacattgcaaattcgagcagcgaagccgactgcccagacccatttgcaaatggtgctgatgtccaagtcagcaacatagactacagattatcccggaaggagctgcagcagctcctgcaggaagcatttgccaggcatggcaaggtgaagagtgttgagctcagcccccatacagattatcaactcaaggctgttgtgcaaatggaaaacttacaagatgcgatcggtgcagtgaatagcctccacagatacaaaattggcagcaaaaagatcctggtctcacttgccaccggggctgccagcaaatcactctctttactgagtgcagaaacaatgtctgttcttcaggatgcccctgcctgttgcctgcctctgtttaaatttacagatatctatgaaaaaaagtttggacacaagttgaatgtgtcagatctatataaattaacagacacggtcgcaatccgtgaacaaggaaacggacggctggtgtgtctcctacccagcagtcaggcccgccagagccccttggggtcttcccagtcacacgacggctcctccacgaattgcagcccaattatatttgaagagttagaatatcacgagcctgtctgcagacagcattgttccaataaggatttcagcgaacatgaatttgatccagactcttacaagattccttttgtgattctttctttgaagacatttgcgccccaggttcacagtcttctccagacccacgagggcaccgtgcctttattgagctttccagattgttacattgcagagtttggcgatctagaagtagtgcaagaaaaccaaggaggtgttcccttagaacacttcattacctgtgttccaggtgtaaacattgccactgctcagaatggcatcaaagtggttaaatggattcacaacaagcccccgcctcccaacactgacccttggcttctgcgttcgaagagtcctgtaggtaacccccagctgatccagttcagtagagaagtgattgacttgctgaaaagccagccatcttgtgtcatacccatcagtcatttcatcccatcctatcaccatcattttgcaaagcagtgccgagtgtcagactacggatactccaagctgattgagttattagaagcagtgcctcatgtattgcagattcttggaatgggctccaaacgtctgctgacccttacccacagggcccaggtgaagcgctttactcaggatttactaaaacttctcaaatcccaggccagcaaacaggtcattgtgagagaattctcacaggcttatcactggtgtttctcaaaggactgggatgtcactgaatatggtgtttgtgagttgattgacatcgtatcagagattccagacacaaccatctgcttgtcccaacaagataatgaaatggtgatttgtatccccaaaagagaacgcactcaggatgaaatagaaaggacaaaacagttctccaaggatgtcgttgatttgctgcgtcaccaaccccatttccggatgccctttaataaatttatcccttcttaccatcaccactttggccggcagtgcaaacttgcgtactatgggtttaccaaactacttgaactttttgaagccatacctgatactttacaagtattggaatgtggagaagaaaagatccttactctgacagaggtggagcggttcaaagctctagctgcccagtttgttaaactccttcggtcccaaaaagataactgccttatgatgacagatctccttacagaatatgctaaaacttttggttatacatttcgtctccaagactatgatgtcagttccatttcggctttaactcagaaactctgccatgtcgtgaaggttgccgatatagaatctggcagacagattcagctgatcaaccgaaagtctctgcgatctctcactgcccagttgctggtattgttgatgtcttgggaaggaaccacccatctttctgttgaggagctcaagagacattacgaaagtacccacaacactccccttaacccctgtgaatatggattcatgaccttgaccgaactgctgaagagcctgccatacttggttgaggttttcactaatgataagatggaagaatgtgtgaagctcacaagtctgtatttgtttgcaaagaatgtgcggtctttacttcatacttaccactaccagcagattttccttcatgagttttccatggcctataccaagtatgtcggagaaactctgcagcccaagacctacggccacagcagcgtggaggagctcttgggagcaattccacaggtggtctggataaaaggacatggtcataagagaattgtagtgttaaaaaatgacatgaaaagtcgtttgagttcactcagtctctcccctgccaatcatgaaaaccagccctcggagggcgagcgcatcctggaggtgcccgaatcgcacacagcctcggaactcaagcttggagctgacggcagtgggcccagtcacacagagcaggagcttctccgcctgaccgacgactcccccgtcgacctcctgtgtgcgcctgtcccctcgtgcctgccgtcccctcagctgagaccagaccccgttatcctccaatctgctgatctcattcagtttgaggagcgccctcaagagccttctgaaattatgattttaaaccaagaagaaaaaatggagattccaataccaggaaagagcaaaactctgacctctgactccagctcgtcctgcatctcagcagctgtccccgtgcctccctgcccctcctcggaaacctccgagtcactgctcagcaaggaccccgtggaaagcccggccaaaaagcaacccaaaaatagagtcaaattggcagccaacttttccttagcacctataaccaagctttaactcccatttggaatatagaattaggatgggaaaacactgtctgattctgcacacaaaagtgggtttcaaaaatacatccttttctgtgtcatgaaaaccccccgaagccattgacttcatcttacctgtgttctatcatgtttttcttttccattgaacacagctttgagctgaagtctttcttttcttcttcctttttctttcttttttcaattatttgaagaacttgtggcatttgttaaagaatccttaatatattttaccaaatttttagtaactattatgaaatacaatggtgttccaaaagaagaaagcactaaaaactcaactagcaggaagcggttttgcttccattgagccacgtcggtggtgtcatcctacatgtagcataatagagtctctcagcctttgcttactggtgtttccgacagtattaacccagtgcgtggcatgtctttgaagcaaagcctgtcccgctagcctgtgtgttcacacaccaaaggagaagggtaggcgaggggt

SEQ ID NO: 4498 - DNA, 581 bp, Homo sapiens; identical to SEQ ID NO: 1925
  source 1..581: mol_type = genomic DNA

SEQ ID NO: 4499 - DNA, 744 bp, Homo sapiens
  source 1..744: mol_type = genomic DNA
cgcagctcggagcgccggggaagagagagtccgaaccgcggctctgccccgcggcctagcgttgctgcctgctttctccagccccttctcggcgtctggaagtgcgatcagtgggtgaccgcggctgcgagggactttgtcatccgtcctccaggatctggggagaaagagccccatcccttctctctctgccaccatttcggacaccccgcagggactcgttttgggattcgcactgacttcaaggaaggacgcgaacccttctctgaccccagctcgggcggccacctgtctttgccgcggtgacccttctctcatgaccctgcggtgccttgagccctccgggaatggcggggaagggacgcggagccagtgggggaccgcggggtcggcggaggagccatccccgcaggcggcgcgtctggcgaaggccctgcgggagctcggtcagacaggatggtactggggaagtatgactgttaatgaagccaaagagaaattaaaagaggcaccagaaggaactttcttgattagagatagctcgcattcagactacctactaacaatatctgttaaaacatcagctggaccaactaatcttcgaatcgaataccaagacggaaaattcagattggactctatcatatgtgtcaaatccaagcttaaacaatttgacagtgtggttcatctgatcgactactatgttcagatgtgcaaggataagcggacaggtccagaagcccc

SEQ ID NO: 4500 - DNA, 582 bp, Homo sapiens
  source 1..582: mol_type = genomic DNA
tatattgcaaggcccagtgttataaataacttaatggtggtgctgatcataaaaaccacaaaaattcaaagaaggaaaataatgttttttgacctcttcagccttttaaaaatcctattccttgcctagtcgtttgtaaaccacacagagctccacgggggtcttagtacctcttggggaaatctcgtgctagactaggttagagtagaacatttgtgtccaggtttatccaactccctaggcaactattataatccaattccttatgattatggaaatagtattaatcactccttgaaatctgcttttagcattgggaaggcctcagagaagacctaaccctaaagacaggtgtgctcagtgatattgtatatgccgaaaacttctttgtttcaggcagtttggagcatgtgaacaccttgagccttgatgagttccagtatgtggtatattatgcagagcattcagagcaaatactctctctccgagcgcttaatccgaacaattgctgccatccgttccttcccacatgataatgtagaggacctcatcagagggggagcagatgtgaactgcactcat

SEQ ID NO: 4501 - DNA, 3888 bp, Homo sapiens
  source 1..3888: mol_type = genomic DNA
ggggaacagctgatccgtctgttgggaggacagatatctcaaggccaggatggaagaatcaccactaagccgggcaccatcccgtggtggagtcaactttctcaatgtagcccggacctacatccccaacaccaaggtggaatgtcactacacccttcccccaggcaccatgcccagtgccagtgactggattggcatcttcaaggtggaggctgcctgtgttcgggattaccacacatttgtgtggtcttccgtgcctgaaagtacaactgatggttcccccattcacaccagtgtccagttccaagccagctacctgcccaaaccaggagctcagctctaccagttccgatatgtgaaccgccagggccaggtgtgtgggcagagcccccctttccagttccgagagccaaggcccatggatgaactggtgaccctggaggaggctgatgggggctctgacatcctgctggttgtccccaaggcaactgtgttacagaaccagctcgatgagagccagcaagaacggaatgacctgatgcagctgaagctacagctggagggacaggtgacagagctgaggagccgagtgcaggagctcgagagggctctggcaactgccaggcaggagcacacggagctgatggaacagtacaaggggatttcccggtcccatggggagatcacagaagagagggacatcctgagccggcaacagggagaccatgtggcacgcatcctggagctagaggatgacatccagaccatcagtgagaaagtgctgacgaaggaagtggagctggacaggcttagagacacagtgaaggccctgactcgggaacaagagaagctccttgggcaactgaaagaagtacaagcagacaaggagcaaagtgaggctgagctccaagtggcacaacaggagaaccatcacttaaatttggacctgaaggaggcgaagagctggcaagaggagcagagtgctcaggctcagcgactgaaagacaaggtggcccagatgaaggacaccctaggccaggcccagcagcgggtggccgagctggagcccttgaaggagcagcttcgaggggcccaggagcttgcagcctcaagccagcagaaagccacccttcttggggaggagttggccagtgcagcagcagccagggaccgcaccatagccgaactacaccgcagccgcctggaagtggctgaagttaacggcaggctggctgagctcggtttgcacttgaaggaagaaaaatgccaatggagcaaggagcgggcagggctgctgcagagtgtggaggcagagaaggacaagatcctgaagctgagtgcagagatacttcgattggagaaggcagttcaggaggagaggacccaaaaccaagtgttcaagactgagctggcccgggagaaggattctagcctggtacagttgtcagaaagtaagcgggagctgacagagctgcggtcagccctgcgtgtgctccagaaggaaaaggagcagttacaggaggagaaacaggaattgctagagtacatgagaaagctagaggcccgcctggagaaggtggcagatgagaagtggaatgaggatgccaccacagaggatgaggaggccgctgtggggctgagctgcccggcagctctgacagactcagaggacgagtccccagaagacatgaggctcccaccctatggcctttgtgagcgtggagacccaggctcctctcctgctgggcctcgagaggcttctccccttgttgtcatcagccagccggctcccatttctcctcacctctctgggccagctgaggacagtagctctgactcggaggctgaagatgagaagtcagtcctgatggcagctgtgcagagtgggggtgaggaggccaacttactgcttcctgaactgggcagtgccttctatgacatggccaggtgagttcaaccagcaaggccaggagggaggtgggaggaggtcagagggaaagggcatctgtgtggacagtcaccaggccctgctcccaacccctgcccttcttggcctcagccaagaaaaggagatacaggtatggttaacaaggaaaatgactcactgctccaaatcccagatgccttcaggtaatccctacccctatcttatcaatgcactcagaggtcctgcctttaactggcttctatgttgttctagcaccatcttctgcagagcccaaattgccctgcttcccctctctcctgcctctaccccttccccaaccaccaggtaggtacctagggtcctccggggaggaagggaggtgaccatggcccccagggataggagcagagagaagactgggatccagcatccatctggctacaactgaaatgctttccctcttccctgacttccctgggtaacccttagggaagggaacctatagaggtgggggtttcaggtatcagattgtccccttctgccttcccttttattcccaggttcaagggggcaggcacagggaagagagatttgatcatctagtcccggttttgcctggatgtgagatgggctcagggcagggagggggtgatgctgtcatccttctcggctggagcaggaagatgaaggacgatgtcagactcattttcagcctcattaggcagcagacggagatggagggaggagagcaggaggctgggggatgggctctgcactgcagagaccagcagggactaaagaagagaggacatggggaactggaaaaataagccttccaggattgtggggagaaagacgctgtgggagaggccaggatgctgcattaggcacaggataacctgggaacccaggcacatgggtcctgctctccgaagtctgcaagtcaagaagggaacagagcacgccgaccctctccctttcccctctgtctctcttagtggctttacagtgggtaccctgtcagaaaccagcactgggggccctgccacccccacatggaaggagtgtcctatctgtaaggagcgctttcctgctgagagtgacaaggatgccctggaggaccacatggatggacacttctttttcagcacccaggaccccttcacctttgagtgatcttactccctcgtacatgcacaaatacacactcatgcacacacacactcacacacatgcatacacttaggtttcatgcccattttctatcacactgggctccatgatattctgttccctaagaactgcttctgtgtgccctgttttcatcccaagatttctcacttcatcctctcctacctggctcttttgtcccagggaggggtcctgttcggaagcagtggctgaatttatcccctgaaagtggttttggaggaaccgggatggaggaggccttcccctgtgggaatagaatcgtccactcctagccctggttgcttctgatacacagccactgcacacacacactcacactcacactcccttgtctgatgccccaaagccaattcctggggcaccctaccctctcttatttggagtttccgttggtttacctgagttttctctggggtctgcacagaggcagcagcatggacatcatggcctctcaggtcccttttggttctcagtttcattggttcctctttctgttcccccattgacttctgtgccccaccctagccttttccataaccttaggtattcagtttggaggggttttttgtatttttgaggattcctgtattctgtatcctctcctcgcatctcctcacatggaaagaaataatgtatttgtgccttctgtgaggaatggggggaacaagtggtcccaggtatccccatttccaaggcccccctccctctccaggtccccccacagcaataaaagcttccccctgatatcc

SEQ ID NO: 4502 - DNA, 2053 bp, Homo sapiens
  source 1..2053: mol_type = genomic DNA
gcggtgaccacgtgacctccgctgagctttcgccagtgcctgcggccctcggcggcctagtacacacgcacctgagtgagtggcaccagaggaccctctccatgtttagggacctcctgggcctcaggagcgtggcgcccgcccctgggcggactccccccatccgcgggcgcgaatggtccgggccgcgtccgcagtgctgctggctgctccctggttgctgggtgcaaagtgctgggttctgggtttctggattcgcgggccgttcacacgtagcctgtgccggctcctcgggtgagtccgtccgcgcgcggtgccccgggacggcctaggctgccgggggtccggggccccaggcattccgggctgcagattgacggggatcccggatgcaccgcgcgcccccgcgccctcaccgacgggtccagacctggtgggaagaaggtgcggggacgggtccctgaggatcccgatgcctacgagccaagatgctcagctttataggtgtgacctacacatgtgacttcacctcagttttgtgatccgtaaaatggacaaattcgaagctacttcacagtgctgttgagaggattaaatgaaacaatgcttgtaaagctctttgcaggagggagcctcggaagcagggcctggccggcagagcacacctgctgtcaccagggaccacaggcagcatgaagacccccgtggagctggccgtcagtgggatgcagaccctcggccttcagcaccgctgccgaggtggctaccgggtcaaggccaggacgtcatatgtggatgagactctgtttggcagcccagcaggcacccggcctaccccaccggacttcgatccgccctgggtggagaaggctaacagaaccagaggcgtgggcaaggaggcatcgaaggccttgggggcaaaggggagctgtgagaccaccccctcaaggggcagcacccccaccctcacaccaaggaagaagaacaaatacagacccatcagccacaccccgtcttactgtgatgagtcgctgtttggctcccgatctgaaggcgccagcttcggggccccgcggatggcgaagggggatgccgcaaagctccgtgctctcttgtggacgccaccacctacccccaggggtagccactcgccccgccccagggaggcaccactgcgagccattcacccagctggtccctccaagacagagccggggccagcggcagactcccagaagttatctatgggtgggttacactcttcacgccccctgaagcggggactttcccattccctcacccacctgaatgtccccagcactggtcatccagccaccagtgccccccacacaaatgggcctcaggatctcaggccttccacgtcaggggtgaccttccggagccccctggtgacttccagggctcgctcagttagcatttcagtgccatctaccccacgacgaggtggggccacccagaaaccaaagcccccttggaaatgatactctttcatcagggttgcctatggggccacggcgacaggtatggccccttgccagggtaggaggacattcatcacccagggaaccccaggtattaaagaagcccctgtgggggcagacagacatagcaggggtgggcagtgcctccctttatcctgacaatctctagtcgattcttgcctttttctcccgattgcggatttgggggccacctctaagatgcctctctccagccctgtctcaaccatactccaaattagtgccaacccaggggcctggcacctcccacatcatccattgtcttgctgccaagtgcgaataaacggcgtgattgccaacctggagggtcccctcttatcccttcaagccaagcttcctgctcaggattagtttccagctaagtctgcaagccctagaggagtttttccaggctgtctgtgaagcctggggaacacaacggcaactgggagatttgtgagtgaacactgtttcatcttaatatgcttctgaatttattttcatgtactaaatagatcagctcatcaaagcca

SEQ ID NO: 4503 - DNA, 876 bp, Homo sapiens
  source 1..876: mol_type = genomic DNA
cttgcgagtttacccccacctccccagccaccagcctgtgggtctcaaaccaaggctacttggtgctctgctttgagttgcagaggtgacttcatcaatgctcctaccccgagttcttgagacagacctggaccgatcccctaccttggaatctcctctcagcctttaagctcacctggtcagaatccttggatgagcctgtgggaccgttcctcctagcccggtggtttggaaccagtggctttgggactgtaagaggatggacaaagattctcaggggctgctagattcatccctgatggcatcaggcactgccagccgctcagaggatgaggagtcactggcagggcagaagcgagcctcctcccaggccttgggcaccatccctaaacggagaagctcctccaggttcatcaagaggaagaagttcgatgatgagctggtggagagcagcctggcaaaatcttctacccgggcaaagggggccagtggggtggaaccagggcgctgttcggggagtgaaccctcctccagtgagaagaagaaggtatccaaagcccccagcactcctgtgccacccagcccagccccagcccctggactcaccaagcgtgtgaagaagagtaaacagccacttcaggtgaccaaggatctgggccgctggaagcctgcagatgacctcctgctcataaatgctgtgttgcagaccaacgacctgacctccgtccacctgggcgtgaaattcagctgccgcttcacccttcgggaggtccaggagcgttggtacgccctgctctacgatcctgtcatctccaagttggcctgtcaggccatgaggcagctgcacccagaggctattgcagccatccagagcaa

SEQ ID NO: 4504 - DNA, 2841 bp, Homo sapiens
  source 1..2841: mol_type = genomic DNA
gagaccgcatcgtcggctcggaggctgaggggctgccgcggccgggagcgcccctcgcctcgctcctcgctccgcttggtgtcatgtgattctctgagggagcagctgcgtgagtggagatgctttcagtggtggagaatggactggacccccaggctgccatcccgacacatcatctcagagttggagcacctgacgtttgtcaacacggatgtgggccgctgccgggcatggctgcggctggccctgaacgatggcctgatggagtgctacctgaagctgctgctgcaggagcaggcccgcttgcaactacagcggaaggaatctctggattccatttcgcattcttcaggctctgaagacatcgaagtccatcactcgggccataagatacggaggaaccagaagctgactgcctcctccctcagcctggacacggccagttcatcccagctgtcctgcagcctaaactctgatagctgcttactccaagagaatggctccaagagtccagaccattgtgaggagcccatgtcctgtgactcagacctgggcacagcaaatgctgaggactcagaccggtctctgcaagaaaaaacaagagctggatctcagaggatgacttctaccggccttcccgggagcaacccctggagagtgcttcagaccacccaatagcttcttacagggggactccagggtcaaggcctggtctccacaggcatttttctcaagaaccaagaaaaaactgctccctgggggcgttagaccaagcgtgtgtaccttccccaggaagaaggcaagcccaggcagccccatcccaggggcataagagcttccgggtggtacaccggagacagatgggactgtccaacccattccggggtctcatgaagctgggcaccgtggagcggcggggggcaatgggcatctggaaggagctcttctgcgagctctccccgctggagttccgcctctacctgagcaacgaggagcacacctgtgtggagaactgctcgctgcttcgctgtgagtctgtggggccagcccatagtgatgggcgctttgagctggtcttctctggcaagaagctggccctgcgcgcctcctcccaggacgaagctgaggactggctggaccgggtgcgggaggccctgcagaaggtccggcctcagcaggaggatgagtgggtgaacgtgcagtacccagaccagcctgaggaaccccccgaggcgccccagggctgcctctctccctcagacctgctctcggagcccgcggccctccagggcacacagtttgactggtcgtccgcccaggttccagagccagatgccatcaaggagtccctgctgtacttgtacatggacaggacctggatgccctatatattttctctgtccttggaggctctgaaatgtttccgcatcaggaacaatgagaagatgctgagtgacagccacggcgtggagaccatccgggacatcctgccagacaccagccttgggggcccatccttcttcaaaatcatcacggccaaggctgtcctgaagctgcaggccggaaacgccgaggaagccgccctgtggagggatctggtccgcaaagtcctggcatcctacttggagacagccgaggaggcggtgaccctgggcgggagcctggatgaaaactgtcaggaggtgctgaaatttgccacccgggagaatggcttcctgctgcagtacctggtggctatccccatggagaaaggccttgactcccaaggctgcttctgcgcaggctgctcccggcagatcggcttctcctttgtacgacccaagctctgtgccttctctggcctctattactgtgacatctgccaccaagacgatgcctcagtgattccggccaggatcatccacaactgggacctcaccaagcgcccgatctgcaggcaggccctgaagtttctgacacagatccgggcccagcccctcatcaacctgcagatggtgaacgcgtctctgtacgagcatgtggagcggatgcacctcattgggaggagacgggagcagctgaagctcctgggggattacctgggcctgtgccggagtggcgccctgaaggagctcagcaagaggctcaaccacaggaattatctcttggaatctccgcataggttcagtgttgctgacctccaacagatcgcagacggggtgtatgaaggattcctcaaggccctgattgaatttgcctcccagcatgtctaccactgcgacctgtgcacccagcgcggcttcatctgccagatctgccagcaccacgacatcatcttcccctttgagtttgacaccacagtcaggtgtgccgagtgcaagaccgtcttccaccagagctgccaggctgtggtgaagaagggctgcccccgctgtgcccgccggcgcaagtaccaggaacagaacattttcgcctgatgcccatctgctgaccccgctctgaaagccgggggtgagtgtggctcagccatcccggctgggtttgccatcagcccaggatactcaccgtgtcacagctgtgtccccttgtcaggaagaccctcagatgtggccagagcaccggcctcccagagaaagcccaggaagtccccgtggtgtcccctggccctccccccacccctctgctgcaggaggcgtggccaccaccagatgctccctgtctggggcaggcagggccgtttactcactaggccctggctcaccagcgtcccggcgcctccgttagggctgcccaaacactgtggaaaggggacttggggagcattttcaattccacattcctgattaaaaggtctagtttttt

SEQ ID NO: 4505 - DNA, 4076 bp, Homo sapiens
  source 1..4076: mol_type = genomic DNA
taaagagatagagtctcactatgttgcccagacaggatttgaattcctgggctcaaggtatgcttctgtcttagctcctcagtagctgagaccatgggcacccaccactgtgcccagattcgggctttcttgtaaaaagcggatggatgcttgaaactattttctgaatccctttggctcccaaatgtgaatattctgggaaatatttttatccaaattagctgagtaatcgagtagttaggcacattttgaagactgaggcttgtcctttaaaagaagggcagcccacaaactgacttccttgagccaaaaattgttttaaaaggggaagtacagcccaaaacagtgattttaaaatatcaacaaaaagagtcaaattctgtaaaatatttaaagagatttattctgagccaaatatgagtgaccatgtcctgtgacacagccctcgggaaatcctgagaacatgtgcccaaggtggtcagggtacagcttggttttctacattttagggagacatgaggcttcaatcaaatacatttaagaaatacattggttcagtccagaaaggcaggacaacccgacgcgaggcagggagcttccaggttatagaggtcactggagagcccggtggggtgtaagtacactgcgcttataaaactctagcaggaagctagcagctgtctccaaacccagagaaggggaaacaggaatcgattaggaataaaggattataatccactttccttctgaggaaaagctgggaaccttctcattttgccttatgaaaactaagctgaatcgactgctgccaaacatctattaggcaaaattggcctcttgcccatgatttgactttccagcacagccagttctttttctcctctgcagctgattggctctggagtgtggccagaagcctctctcctgcaattaaaggagtcgggtctctaactgttgatctgtttttttcccttctgagcaatggagcttaccatctttatcctgagactggccatttacatcctgacatttcccttgtacctgctgaactttctgggcttgtggagctggatatgcaaaaaatggttcccctacttcttggtgaggttcactgtgatatacaacgaacagatggcaagcaagaagcgggagctcttcagtaacctgcaggagtttgcgggcccctccgggaaactctccctgctggaagtgggctgtggcacgggggccaacttcaagttctacccacctgggtgcagggtgacctgtattgaccccaaccccaactttgagaagtttttgatcaagagcattgcagagaaccgacacctgcagtttgagcgctttgtggtagctgccggggagaacatgcaccaggtggctgatggctctgtggatgtggtggtctgcaccctggtgctgtgctctgtgaagaaccaggagcggattctccgcgaggtgtgcagagtgctgagaccgggaggggctttctatttcatggagcatgtggcagctgagtgttcgacttggaattacttctggcaacaagtcctggatcctgcctggcaccttctgtttgatgggtgcaacctgaccagagagagctggaaggccctggagcgggccagcttctctaagctgaagctgcagcacatccaggccccactgtcctgggagttggtgcgccctcatatctatggatatgctgtgaaatagtgtgagctggcagttaagagctgaatggctcaaagaatttaaagcttcagttttacatttaaaatgctaagtgggagaagagaaaccttttttttggggggcggtttttttggtttgttgttggttttttttttttttttggcgggaagaaagagttttgctcttgttgcccaggctggagtgcaatgacgtgatctccgctcactgcaacctccacctcgcgggtttaagcgattcttctgcctcagcctccctagtagctgggattacaggtgcccaccaccatgcccagctaatttgtatttttagttgagacagggtttcactacgttggccaggctggtcttgaactcctgatctcaggcaatccacccacctcagcctcccaaagtgctgggatgacaggcgtgagcaaccgcacccagcttaaggtttttttgttttgttttgagacggagttttcgctcttgttgcccaggctggagtgcaatgctgtgatctcagcttaccacaacctccacctcccgggttcaagtgattcacctgcctcagcctcctgagtagctggtattacaggcatgcgtcaccacgccggctaattttgtacttttagtagagatggtgtttccccacgttggtcagtctggtctcaaattcctgacctcaggtgatctgcctgcctcggcctcccaaagtgctgtgattacagacgtcagccaccatgcctggcctgaaaccttttttaggtaaagttgaattccatccttaaaagtttctgttatatcctatttagccattttctattgtctcccaaagaattcacatcaaaaaaacagctttgaactcccccttcaaaggaaacagtcgactttcataattagcatctaccattatccccaaatcttattttattcattgacttgaaattttttccaattgcttttttttttttttttttaaggttaagagcagaggtttactaggccaaagaaagagaatagctctctgttgcagagaggggtcctggagaaatgggttaccccagttgtcttatttaaatggttacccatcagattttaattttatcttctctttgagagcttggtaataagaagcacttaaatcactccaaagaagactttaaaaagggagcagtgaaaaggtcttaataatttattgattgaattaagaaatactagctaattaagaatctgagtctaaacagcacagattttttctttctgcttttaaattgtgttttaaaaaaagagacagggggctgggcgtggtggctcacgcctgtaatcctagcactttgggaggccgaggcgggtggatcacgaggtaggagttaaagaccagcctggccaacatggcaaaaccctactaaagatacaaaaaaaaaaaaaaattagccaggcgtggtggtgggtgcctgtaatcccaggtacttggaaggctgaggcaggagaatctcttgaacccagaaggcgaaggttgcagtgaaccgagatcatgccattgtactctagcctgggtgacaagagcaagactccgtctcaaaaaaaaaaaaaaaaaaaaaaagaagtagagacagggagacagggtctcactgtgttgcctaggccggtcttgaactcctgggctcaagtgattctcccaccttgacctcctaaattgttgggattacaggtgtgagacagtgcacctggccgaaatagctcaagtttctgaaaaacaaatctgaatctatttgttattcttagcgtcactggtctggctttcagaattaacatacaaggttgccacacctagttctgcccagctttatgtcttttattccagtattccaccaaagtttgttttcctgcattccagttctcaagtcttaagataaagattgtacttgacagtttagtatatccataaaactatttgaggtggttaaggttcttgggttcattttccttaatactttgctgaatattgtagattgtaggcaatgaaaaagtctactaaattaggaaaaccttgaataattaggtatcctaggtaagagcccctaaacatcaagcaatctgtgagtctgtaaagaaataaatattttttggattattcttatctaattccacccctgttggaagatgatttctttgttctttgcaactatggaagctgtgaaaatcatcacaagtgcctctgaaagcgagtgttaggttggttagagggtttaatattttctgcaatggtttgtaggaattttaataaatgtagtatattttctgagatgattttgtaaaagtactattttaaatatcaaatcaaccaataaattcacatttgtgttaggaacagaaata

SEQ ID NO: 4506 - DNA, 894 bp, Homo sapiens
  source 1..894: mol_type = genomic DNA
acgcatgcgcaaaggcatggagaccgtggggtgagaatgggcttgcgagtttacccccacctccccagccaccagcctgtgggtctcaaaccaaggctacttggtgctctgctttgagttgcagaggtgacttcatcaatgctcctaccccgagttcttgagacagacctggaccgatcccctaccttgggtgtgcactcttgggagaacgaggggcggagggtccgaatctcctctcagcctttaagctcacctggtcagaatccttggatgagcctgtgggaccgttcctcctagcccggtggtttggaaccagtggctttgggactgtaagaggatggacaaagattctcaggggctgctagattcatccctgatggcatcaggcactgccagccgctcagaggatgaggagtcactggcagggcagaagcgagcctcctcccaggccttgggcaccatccctaaacggagaagctcctccaggttcatcaagaggaagaagttcgatgatgagctggtggagagcagcctggcaaaatcttctacccgggcaaagggggccagtggggtggaaccagggcgctgttcggggagtgaaccctcctccagtgagaagaagaaggtatccaaagcccccagcactcctgtgccacccagcccagccccagcccctggactcaccaagcgtgtgaagaagagtaaacagccacttcaggtgaccaaggatctgggccgctggaagcctgcagatgacctcctgctcataaatgctgtgttgcagaccaacgacctgacctccgtccacctgggcgtgaaattcagctgccgcttcacccttcgggaggtccaggagcgttggtacgccctgctctacgatcctgtcatctccaa

SEQ ID NO: 4507 - DNA, 3118 bp, Homo sapiens
  source 1..3118: mol_type = genomic DNA
acacaattcaggcagtggagagaaggccgtggggagtggctgaggagtccctcaagagaagaggttgctgttcactgatggtggagtgttttgagagtggtggaaccaggttatccctttcttcttttaacgtgtcatgtgattctctgagggagcagctgcgtgagtggagatgctttcagtggtggagaatggactggacccccaggctgccatcccgacacatcatctcagagttggagcacctgacgtttgtcaacacggatgtgggccgctgccgggcatggctgcggctggccctgaacgatggcctgatggagtgctacctgaagctgctgctgcaggagcaggcccgcttgcatgagtactaccagcccaccgccctgctccgagatgctgaggagggcgagttcctccttagcttcctgcagggcctcacgtccttgtccttcgaactctcctacaagtctgccatcttaaatgagtggacgctcaccccactggccctgtctgggctttgcccgctttctgagctggaccctctctctacctctggtgcagaactacagcggaaggaatctctggattccatttcgcattcttcaggctctgaagacatcgaagtccatcactcgggccataagatacggaggaaccagaagctgactgcctcctccctcagcctggacacggccagttcatcccagctgtcctgcagcctaaactctgatagctgcttactccaagagaatggctccaagagtccagaccattgtgaggagcccatgtcctgtgactcagacctgggcacagcaaatgctgaggactcagaccggtctctgcaagaggtattgttggaattcagcaaagcccaggtaaactctgtgccaaccaacggactgagccaagaaacggagatccccacaccacaggcctcgctctccctccatggcctcaacaccagcacatacctgcactgtgaggcacctgcagagccccttcctgcccaggcagcctctggaactcaagatggtgtccacgtgcaggagccgcgtccccaggcgcccagccccctggacttacagcagcctgtagagagcacctcaggccagcagccttctagtactgtcagcgagacagccagagaagtgggccaagggaatggcctgcagaaggcccaggctcatgacggagctggtctgaagctggtagtttcctcacccaccagtccgaaaaacaagagctggatctcagaggatgacttctaccggccttcccgggagcaacccctggagagtgcttcagaccacccaatagcttcttacagggggactccagggtcaaggcctggtctccacaggcatttttctcaagaaccaagaaaaaactgctccctgggggcgttagaccaagcgtgtgtaccttccccaggaagaaggcaagcccaggcagccccatcccaggggcataagagcttccgggtggtacaccggagacagatgggactgtccaacccattccggggtctcatgaagctgggcaccgtggagcggcggggggcaatgggcatctggaaggagctcttctgcgagctctccccgctggagttccgcctctacctgagcaacgaggagcacacctgtgtggagaactgctcgctgcttcgctgtgagtctgtggggccagcccatagtgatgggcgctttgagctggtcttctctggcaagaagctggccctgcgcgcctcctcccaggacgaagctgaggactggctggaccgggtgcgggaggccctgcagaaggtccggcctcagcaggaggatgagtgggtgaacgtgcagtacccagaccagcctgaggaaccccccgaggcgccccagggctgcctctctccctcagacctgctctcggagcccgcggccctccagggcacacagtttgactggtcgtccgcccaggttccagagccagatgccatcaaggagtccctgctgtacttgtacatggacaggacctggatgccctatatattttctctgtccttggaggctctgaaatgtttccgcatcaggaacaatgagaagatgctgagtgacagccacggcgtggagaccatccgggacatcctgccagacaccagccttgggggcccatccttcttcaaaatcatcacggccaaggctgtcctgaagctgcaggccggaaacgccgaggaagccgccctgtggagggatctggtccgcaaagtcctggcatcctacttggagacagccgaggaggcggtgaccctgggcgggagcctggatgaaaactgtcaggaggtgctgaaatttgccacccgggagaatggcttcctgctgcagtacctggtggctatccccatggagaaaggccttgactcccaaggctgcttctgcgcaggctgctcccggcagatcggcttctcctttgtacgacccaagctctgtgccttctctggcctctattactgtgacatctgccaccaagacgatgcctcagtgattccggccaggatcatccacaactgggacctcaccaagcgcccgatctgcaggcaggccctgaagtttctgacacagatccgggcccagcccctcatcaacctgcagatggtgaacgcgtctctgtacgagcatgtggagcggatgcacctcattgggaggagacgggagcagctgaagctcctgggggattacctgggcctgtgccggagtggcgccctgaaggagctcagcaagaggctcaaccacaggaattatctcttggaatctccgcataggttcagtgttgctgacctccaacagatcgcagacggggtgtatgaaggattctccccgaaggtgccctcggaggcagcaggtttgaggccctggggggcccgttccccagaagctgccagtgctttcagatgcattgactcttcccacctcccctccctcagaaaggtagtgcccacactatttttaaaatgttattttatgcaatacactgttcctagtgagcagggctctggccctgaggagtctttgcaatgtattgaaggaattgctgccgtgtgagttttgaatgattttgcagtaaagacctgatctttctc

SEQ ID NO: 4508 - DNA, 586 bp, Homo sapiens
  source 1..586: mol_type = genomic DNA
agtgaagggtggcccaggtggggccaggctgactgaagtgagtagtgggggtgccagaccagatggatactatgatgctgaatgtgcggaatctgtttgagcagcttgtgcgccgggtggagattctcagtgaaggaaatgaagtccaatttatccagttggcgaaggactttgaggatttccgtaaaaagtggcagaggactgaccatgagctggggaaatacaaggatcttttgatgaaagcagagactgagcgaagtgctctggatgttaagctgaagcatgcacgtaatcaggtggatgtagagatcaaacggagacagagagctgaggctgactgcgaaaagctggaacgacagattcagctgattcgagagatgctcatgtgtgacacatctggcagcattcaactaagcgaggagcaaaaatcagctctggcttttctcaacagaggccaaccatccagcagcaatgctgggaacaaaagactatcaaccattgatgaatctggttccattttatcagatatcagctttgacaagactgatgaatcactggattgggactcttctttggtgaagacttt

SEQ ID NO: 4509 - DNA, 4995 bp, Homo sapiens
  source 1..4995: mol_type = genomic DNA
agaccgcatcgtcggctcggaggctgaggggctgccgcggccgggagcgcccctcgcctcgctcctcgctccgcttggtgtcatgtgattctctgagggagcagctgcgtgagtggagatgctttcagtggtggagaatggactggacccccaggctgccatcccgacacatcatctcagagttggagcacctgacgtttgtcaacacggatgtgggccgctgccgggcatggctgcggctggccctgaacgatggcctgatggagtgctacctgaagctgctgctgcaggagcaggcccgcttgcatgagtactaccagcccaccgccctgctccgagatgctgaggagggcgagttcctccttagcttcctgcagggcctcacgtccttgtccttcgaactctcctacaagtctgccatcttaaatgagtggacgctcaccccactggccctgtctgggctttgcccgctttctgagctggaccctctctctacctctggtgcagaactacagcggaaggaatctctggattccatttcgcattcttcaggctctgaagacatcgaagtccatcactcgggccataagatacggaggaaccagaagctgactgcctcctccctcagcctggacacggccagttcatcccagctgtcctgcagcctaaactctgatagctgcttactccaagagaatggctccaagagtccagaccattgtgaggagcccatgtcctgtgactcagacctgggcacagcaaatgctgaggactcagaccggtctctgcaagaggtattgttggaattcagcaaagcccaggtaaactctgtgccaaccaacggactgagccaagaaacggagatccccacaccacaggcctcgctctccctccatggcctcaacaccagcacatacctgcactgtgaggcacctgcagagccccttcctgcccaggcagcctctggaactcaagatggtgtccacgtgcaggagccgcgtccccaggcgcccagccccctggacttacagcagcctgtagagagcacctcaggccagcagccttctagtactgtcagcgagacagccagagaagtgggccaagggaatggcctgcagaaggcccaggctcatgacggagctggtctgaagctggtagtttcctcacccaccagtccgaaaaacaagagctggatctcagaggatgacttctaccggccttcccgggagcaacccctggagagtgcttcagaccacccaatagcttcttacagggggactccagggtcaaggcctggtctccacaggcatttttctcaagaaccaagaaaaaactgctccctgggggcgttagaccaagcgtgtgtaccttccccaggaagaaggcaagcccaggcagccccatcccaggggcataagagcttccgggtggtacaccggagacagatgggactgtccaacccattccggggtctcatgaagctgggcaccgtggagcggcggggggcaatgggcatctggaaggagctcttctgcgagctctccccgctggagttccgcctctacctgagcaacgaggagcacacctgtgtggagaactgctcgctgcttcgctgtgagtctgtggggccagcccatagtgatgggcgctttgagctggtcttctctggcaagaagctggccctgcgcgcctcctcccaggacgaagctgaggactggctggaccgggtgcgggaggccctgcagaaggtccggcctcagcaggaggatgagtgggtgaacgtgcagtacccagaccagcctgaggaaccccccgaggcgccccagggctgcctctctccctcagacctgctctcggagcccgcggccctccagggcacacagtttgactggtcgtccgcccaggttccagagccagatgccatcaaggagtccctgctgtacttgtacatggacaggacctggatgccctatatattttctctgtccttggaggctctgaaatgtttccgcatcaggaacaatgagaagatgctgagtgacagccacggcgtggagaccatccgggacatcctgccagacaccagccttgggggcccatccttcttcaaaatcatcacggccaaggctgtcctgaagctgcaggccggaaacgccgaggaagccgccctgtggagggatctggtccgcaaagtcctggcatcctacttggagacagccgaggaggcggtgaccctgggcgggagcctggatgaaaactgtcaggaggtgctgaaatttgccacccgggagaatggcttcctgctgcagtacctggtggctatccccatggagaaaggccttgactcccaaggctgcttctgcgcaggctgctcccggcagatcggcttctcctttgtacgacccaagctctgtgccttctctggcctctattactgtgacatctgccaccaagacgatgcctcagtgattccggccaggatcatccacaactgggacctcaccaagcgcccgatctgcaggcaggccctgaagtttctgacacagatccgggcccagcccctcatcaacctgcagatggtgaacgcgtctctgtacgagcatgtggagcggatgcacctcattgggaggagacgggagcagctgaagctcctgggggattacctgggcctgtgccggagtggcgccctgaaggagctcagcaagaggctcaaccacaggaattatctcttggaatctccgcataggttcagtgttgctgacctccaacagatcgcagacggggtgtatgaaggattcctcaaggccctgattgaatttgcctcccagcatgtctaccactgcgacctgtgcacccagcgcggcttcatctgccagatctgccagcaccacgacatcatcttcccctttgagtttgacaccacagtcaggtgtgccgagtgcaagaccgtcttccaccagagctgccaggctgtggtgaagaagggctgcccccgctgtgcccgccggcgcaagtaccaggaacagaacattttcgcctgatgcccatctgctgaccccgctctgaaagccgggggtgagtgtggctcagccatcccggctgggtttgccatcagcccaggatactcaccgtgtcacagctgtgtccccttgtcaggaagaccctcagatgtggccagagcaccggcctcccagagaaagcccaggaagtccccgtggtgtcccctggccctccccccacccctctgctgcaggaggcgtggccaccaccagatgctccctgtctggggcaggcagggccgtttactcactaggccctggctcaccagcgtcccggcgcctccgttagggctgcccaaacactgtggaaaggggacttggggagcattttcaattccacattcctgattaaaaggtctagttttttaaggtgggtttttcccattcatatttcaacagaaagtatttttttattcttgaccctacgtgagtcacccatgaaatccagacattctcacccccagcggatgcacaggagccactcaggcctggcttagaggtagcgggtggctggtgggcaggccactgctgggacagggtctatgggcccacccagtgcctttccttggccctcactgccagtgccaaaccgcccctcagcagggcagggccagtcctggcgaccccggttcctctgtgtcctctttactccccaccccagtgcgtctcgcctgctgagcccaccgctttctcagcgtcagagcccctagctcttctctagcctggggccttggccccattaggagaaggagaaatgactggaaaccagcactgtcagcactttgagccctcctcggtttatggagggtcgccgtcttgcccacccccgatccccgtgcgctcctcacccctctacagacaggggcgctgctgcagatgctccaggcccaccttggtgggtgcccggggtcacactctctgcctgactgacccctgccagggcacagataggcaggaccccagagagggcaggcagccacgccctgcactgtggagaagtgacctggtcctaagctgtgcagggcgtgcgggggaactgccctgtggatgcagccaccacctcacaaagccatgaattcccaaagcatcactgaacttgcccagccgggacactggagactgaagaagttccccggagcaggactgcctttgaaggggccttggggctggggtgggagtctggaattgttttcaaagtgatggtcagaccctccaggcttcggggaaatgtgggtttgctggtctctctgtcgccttcccccacctctcctggacctagcaggccctcagtcctagctgtcttacctgcactcagcttggagtcaggcctcaggtggagagccgcatgtcactgtcagagatgagcccacccccacccttccctgggggcgattagctgctgagtcacccacccagccttggagctggatgcctgtgcagcagaacagaggcaacggtggcaggcaggtggaggctgcgcacagcttctcccggtcatggcacacacctgtgcccagacgccaatgcctcctaagccaggagctgggttatgcaccgccatggcccacattaacgctccaccacaagcccagcctagtcagagccctcattgccccatccctgagtgggcaggagcctggcctggggagggcttcggcctgtgaggattctccccgaaggtgccctcggaggcagcaggtttgaggccctggggggcccgttccccagaagctgccagtgctttcagatgcattgactcttcccacctcccctccctcagaaaggtagtgcccacactatttttaaaatgttattttatgcaatacactgttcctagtgagcagggctctggccctgaggagtctttgcaatgtattgaaggaattgctgccgtgtgagttttgaatgattttgcagtaaagacctgatctttctc

SEQ ID NO: 4510 - DNA, 1522 bp, Homo sapiens; identical to SEQ ID NO: 4483
  source 1..1522: mol_type = genomic DNA

SEQ ID NO: 4511 - DNA, 571 bp, Homo sapiens
  source 1..571: mol_type = genomic DNA
cagcggtcacgtgacatggccccggggagccgaggtgagcgttccagcttccggagccggagggggcccggcgtacccagcccccagcccgacgtgaccatgctgtcccgcctcctaaaagaacaccaggccaagcagaatgaacgcaaggagctgcaggaaaagaggaggcgagaggctatcactgcagcgacctgcctgacagaagctttggtggatcacctcaatgtgggtgtggcccaggcctacatgaaccagagaaagctggaccatgaggtgaagaccctacaggtccaggctgcccaatttgccaagcagacaggccagtggatcggaatggtggagaacttcaaccaggcactcaaggaaattggggatgtggagaactgggctcggagcatcgagctggacatgcgcaccattgccactgcactggaatatgtctacaaagggcagctgcagtctgccccttcctagcccctgttccctcccccaaccctatccctcctacctcacccgcagggggaaggagggaggctgacaagccttgaataaaacacaagcctccgtt

SEQ ID NO: 4512 - DNA, 2038 bp, Homo sapiens
  source 1..2038: mol_type = genomic DNA
aaaaaaaaaaaagtaccaaagccgaggcgcatcctcgcacctgcctgccttgggccagcgggcggggcccgggaacgtgcatttcaaaggggccgcggttcctgcgatgcgctggactctgggaagcgcgaacagagcgttttgcgggctctgcggggagagctggcgccggcgtctccctgtagcaggactgggcgccgcgcccgtgggtgggctgctgcccggccccgccgcccagccaagccgccgcctgggtggccattcccaagccggactccggggaagtggcagcgtggatcccagccgccagaattcgaggtctgcggcggctttcaaaacttgacaactttcctttccaggaggaccccgttctggagcgttatttcaaaggccacaaagctgcgatcacctccttggacctcagccccaacggcaagcaacttgctactgcttcttgggatacctttctcatgctatggaatttcaagccacatgctagagcttacagatatgtgggtcacaaggatgttgtaaccagcgtgcagttttctccacatggaaacttattggcgtctgcctcacgagacagaaccgtgagactctggattcctgataagagaggaaaattctcagaatttaaagctcatacagctccagttcgaagtgtagacttttcagctgatggccagtttctagctacagcttctgaagacaaatccataaaagtatggagcatgtatcgccagcgcttcctgtattccttgtatcgacatacacactgggtacgctgtgccaaattttcacccgatggaagactaattgtgtcatgtagtgaggataaaactattaaaatttgggataccacaaataagcaatgtgttaataacttctcagattccgttggatttgcaaattttgtggactttaaccctagtggtacatgcatagcttcagcaggttctgatcaaactgtgaaagtctgggatgtaagagtgaacaaattactacagcattaccaagttcacagcggtggagttaattgcatatcattccatccttcgggtaactatctcatcacagcttcttcagatggtacccttaagattctggacctcttagaaggaaggctcatctatacacttcaaggacatacgggacctgtctttactgtttcattttcaaaaggtggagagctatttgcatcaggaggtgcagacacacaggtcttattatggaggactaactttgatgaattgcattgtaaaggtcttaccaaaagaaatctcaaaagattacattttgattcaccaccacatcttcttgatatctacccaagaacaccacatccccatgaggaaaaagttgagactgtagaaattaatccaaagcttgaggtaatcgatttgcagatctctactccccctgttatggatatcctttcttttgattctaccacaacaacagaaaccagtggtaggactctgccagacaagggtgaagaggcctgtggatatttcttgaacccttccttaatgtcaccagaatgtttgccaacaaccacgaaaaagaaaacagaagacatgagtgacctcccctgtgaaagtcaaaggagcatacctctcgctgtgactgatgctttagagcatattatggaacaactcaatgttttgacacagactgtttcaatcttggagcagcgactgactttgacagaggataagctgaaagactgccttgaaaatcagcaaaagcttttcagtgctgtccaacagaaaagctgaataaaaaattcattttcatttgttgggcagaggcccaataaatgaacaaatgtacatacactcaggaaggtagtacaagatactccatacaacacaaccatgtgctatttatcatggcatttcttaaaagggtgagcaacagaacaaaaggcagaaaaggcatacctaaggactaatttaaacacatatcaatgtgaaggactaatttaaattactatcatttatgattgcagtaataaagtgataagcattcaagc

SEQ ID NO: 4513 - DNA, 2391 bp, Homo sapiens
  source 1..2391: mol_type = genomic DNA
gcggctctgccccgcggcctagcgttgctgcctgctttctccagccccttctcggcgtctggaagtgtctggagtttcttttttttatttcccctaaactgccattcaaattaataatcctcctaataacctgatctcccgctcctccccaccggcctgcctcccgccctcgctccttcctccctccctccctctctccttcccacctccagggtcgcagccggagggaaacccggcagcagtccgagagtggaggtgtcccagcccgtagggggcgtcgccgcgcggtgggggatggggtcgaggcaatgatcctcgaggcttttgtgtgccctctgcgcacggaactccgaccgccgcctccgagcgcggggctggttgcatccccgggcatctcgttcccaaattaaacgttaacgggggaaacaagggcagacgcccctcctctcccgggcccctcccacctccccttttccccccacccccccgccccatgtccgctgaggaggctgcctggtgcggaggcggcggcggcggccgcggccgaggtcgaggcgatcagtgggtgaccgcggctgcgagggactttgtcatccgtcctccaggatctggggagaaagagccccatcccttctctctctgccaccatttcggacaccccgcagggactcgttttgggattcgcactgacttcaaggaaggacgcgaacccttctctgaccccagctcgggcggccacctgtctttgccgcggtgacccttctctcatgaccctgcggtgccttgagccctccgggaatggcggggaagggacgcggagccagtgggggaccgcggggtcggcggaggagccatccccgcaggcggcgcgtctggcgaaggccctgcgggagctcggtcagacaggatggtactggggaagtatgactgttaatgaagccaaagagaaattaaaagaggcaccagaaggaactttcttgattagagatagctcgcattcagactacctactaacaatatctgttaaaacatcagctggaccaactaatcttcgaatcgaataccaagacggaaaattcagattggactctatcatatgtgtcaaatccaagcttaaacaatttgacagtgtggttcatctgatcgactactatgttcagatgtgcaaggataagcggacaggtccagaagccccccggaacggcactgttcacctttatctgaccaaaccgctctacacgtcagcaccatctctgcagcatctctgtaggctcaccattaacaaatgtaccggtgccatctggggactgcctttaccaacaagactaaaagattacttggaagaatataaattccaggtataaatgtttctctttttttaaacatgtctcacatagagtatctccgaatgcagctatgtaaaagagaaccaaaacttgagtgctctggataactatatggaatgctttctaagaacagctgaagctaatctaatttaaatttaacagcttgaagaggtagctaggtgtttaaagttcctccagatacttttacctgagtgatgcttcccttcctaaggctgaccaagacctgttgatccttttagattaaaaataaaatgtcgcatgtaaaggctgaagtcgcgttttatcagaatgccttgccttcttaggttcttttccattatgtcaaaggtccaggctccagtaggagagaaagaactcctcataggaatactgaagaagtgggaaggaaccaagctgacacaggcctcactgcaatttgatatgcctgctgatcagagtctcttgggcattttatattttgcattctgatgtacctaggagttttgttaaacagatgatgtatgtgagtatttatcccattttatgcaattaaccaaatcaaccaaaaaaagtgaccatgaagtcctgtatttgtctttttactacatgtaggaactctcatgtgaatgagtactgtagtaatccattctatgggagccttatttcagaaatatttcaaactggtgcaaatggaaaagactttctcttttcctttaaagctaaagacaagaatatcatgctatacaggtgcaactcaatccccgttaataaaaaccaatgtaggtataggcattctaccctttgaaatagctgtgtcccaacctgttgccattgattttttggaaatggctttagaaatatccaagttgtccttgaattgtctaaccatggacataaacagttgtctcccttctactgtgtagaatactttgacttaattttcttccagatacagggggatacctgcctgtttttcaaagtgtttatttactgctgttactatttgattagaatgtattaaataaaaaaaacctgatttctacaa

SEQ ID NO: 4514 - DNA, 2072 bp, Homo sapiens
  source 1..2072: mol_type = genomic DNA
acctgatcaaggggaccgcctccggtccccggccgtgggcaccgggacgagcacggcgtccccacgccatcgatgtgtcttagagccggagagtctggtttccgaggacccacagtcgctcctgcacgcccaccccccgcaaaagtgcggccaggagggtcgcatcgagggggcgccgccgggatgtttagaggaacccacccccgtggcaggccaagggccaaggatcgctatccttccctgaacccgggcgctcagctggcccgggcgatcagtgggtgaccgcggctgcgagggactttgtcatccgtcctccaggatctggggagaaagagccccatcccttctctctctgccaccatttcggacaccccgcagggactcgttttgggattcgcactgacttcaaggaaggacgcgaacccttctctgaccccagctcgggcggccacctgtctttgccgcggtgacccttctctcatgaccctgcggtgccttgagccctccgggaatggcggggaagggacgcggagccagtgggggaccgcggggtcggcggaggagccatccccgcaggcggcgcgtctggcgaaggccctgcgggagctcggtcagacaggatggtactggggaagtatgactgttaatgaagccaaagagaaattaaaagaggcaccagaaggaactttcttgattagagatagctcgcattcagactacctactaacaatatctgttaaaacatcagctggaccaactaatcttcgaatcgaataccaagacggaaaattcagattggactctatcatatgtgtcaaatccaagcttaaacaatttgacagtgtggttcatctgatcgactactatgttcagatgtgcaaggataagcggacaggtccagaagccccccggaacggcactgttcacctttatctgaccaaaccgctctacacgtcagcaccatctctgcagcatctctgtaggctcaccattaacaaatgtaccggtgccatctggggactgcctttaccaacaagactaaaagattacttggaagaatataaattccaggtataaatgtttctctttttttaaacatgtctcacatagagtatctccgaatgcagctatgtaaaagagaaccaaaacttgagtgctctggataactatatggaatgctttctaagaacagctgaagctaatctaatttaaatttaacagcttgaagaggtagctaggtgtttaaagttcctccagatacttttacctgagtgatgcttcccttcctaaggctgaccaagacctgttgatccttttagattaaaaataaaatgtcgcatgtaaaggctgaagtcgcgttttatcagaatgccttgccttcttaggttcttttccattatgtcaaaggtccaggctccagtaggagagaaagaactcctcataggaatactgaagaagtgggaaggaaccaagctgacacaggcctcactgcaatttgatatgcctgctgatcagagtctcttgggcattttatattttgcattctgatgtacctaggagttttgttaaacagatgatgtatgtgagtatttatcccattttatgcaattaaccaaatcaaccaaaaaaagtgaccatgaagtcctgtatttgtctttttactacatgtaggaactctcatgtgaatgagtactgtagtaatccattctatgggagccttatttcagaaatatttcaaactggtgcaaatggaaaagactttctcttttcctttaaagctaaagacaagaatatcatgctatacaggtgcaactcaatccccgttaataaaaaccaatgtaggtataggcattctaccctttgaaatagctgtgtcccaacctgttgccattgattttttggaaatggctttagaaatatccaagttgtccttgaattgtctaaccatggacataaacagttgtctcccttctactgtgtagaatactttgacttaattttcttccagatacagggggatacctgcctgtttttcaaagtgtttatttactgctgttactatttgattagaa

SEQ ID NO: 4515 - DNA, 581 bp, Homo sapiens
  source 1..581: mol_type = genomic DNA
gcatttgtgtcttttggacttctctgagcgggtggaagaatgaaagaaaagaaagatgaaaggatgttgaatcactttgcatggctgtatgatggaaggaaacggaactgagaactcctgcagtagaacacgtggatggcttcaacaagataatgatgctaagccatggctttggaaattctctaattgcttttctcgtcctgagcagacgctgccacatagtccccaaacgaaagagtacatggagaacaagaaagttgctgtggaactaaaggatgtaccatcaccccttcatgctggctctaagctttttccagcagtcccacttcctgatattcgttctcttcagcagcctaaaatacagctttcttctgtccccaaagtaagctgctgtgctcattgccctaatgaaccctccacttcgccaatgcgttttggtggtggtggtggcggtagcggaggtaccagtagcttgattcacccgggcgcactgttagactcgcaaagcaccaggacaatcacgtgtcaggtagggtcagggtttgctttccagtctgcatcttcactccagaatgcctcag

SEQ ID NO: 4516 - DNA, 1025 bp, Homo sapiens
  source 1..1025: mol_type = genomic DNA
aacgtgatggcgtcaggggccggggcgccgcttcctgttgtcagtggccgagagaccgcatcgtcggctcggaggctgaggggctgccgcggccgggagcgcccctcgcctcgctcctcgctccgcttggtgtcatgtgattctctgagggagcagctgcgtgagtggagatgctttcagtggtggagaatggactggacccccaggctgccatcccggtcatcaagaagaagctggtgggatccgtgaaggccttgcagaagcagtacgtgtccctggacacggtggtcactagtgaagacggagatgccaacaccatgtgcagcgccctggaggccgtatttatccatggcctgcacgccaagcacatccgagctgaggccggaggaaaaaggaagaaaagtgcccaccagaagcctctgccccagcctgtcttctggcccctcctgaaagctgtcacccacaaacacatcatctcagagttggagcacctgacgtttgtcaacacggatgtgggccgctgccgggcatggctgcggctggccctgaacgatggcctgatggagtgctacctgaagctgctgctgcaggagcaggcccgcttgcaactacagcggaaggaatctctggattccatttcgcattcttcaggctctgaagacatcgaagtccatcactcgggccataagatacggaggaaccagaagctgactgcctcctccctcagcctggacacggccagttcatcccagctgtcctgcagcctaaactctgatagctgcttactccaagagaatggctccaagagtccagaccattgtgaggagcccatgtcctgtgactcagacctgggcacagcaaatgctgaggactcagaccggtctctgcaagatataaagattttcagctgggcgcagtggctcacgcctgtaatcccagcactttgggaggccgaggcgggcggatcacaaaggcaacagatcgagacctttctggctaacacggtgaaaccccatctctactaa

SEQ ID NO: 4517 - DNA, 3609 bp, Homo sapiens
  source 1..3609: mol_type = genomic DNA
ggcggggcctcctggtgagcgcgcgccggggcggcctccgggaagtgggagacgctgcgggtcctgggcccaggccttgggatgggcgggaaggcctggccgcgccgggctgtgggcactgcaggaggcccctgtgcagaacagatctcggcccctttccaaacactcctgatgcctcatttgcctctcgcttcttttcgaccaccattttgggggctgaggcactcacggggcctccccaggtttcactccgtttctacacagtcggagccccatggatctcccatctcccggaggaaccgtgaagccaaacagaagcgcctgcgagagaagcaggctactctggaggctgagatagcaggggagagcaagtcacctgcagaatccattaaggcctggaggcctaaggagttagtattgtatgaaatccctacgaaacccggtgaaaagaaagatgtctctgggcccctgcctcctgcatacagcccccgatatgttgaggctgcctggtacccgtggtgggtacgagagggcttcttcaaaccagaatatcaggcccggctgccccaagctacaggggagaccttttccatgtgtatcccacctcccaatgtcactggctccctgcacattggccacgcactcacggtggccatacaggatgccctcgtgcgctggcaccggatgcgtggggatcaagtgctgtgggtccctggttcagatcatgcaggaattgctacacaagctgtggtggagaaacaactgtggaaggaacggggagtgaggagacatgagctgagccgggaggccttccttagggaggtgtggcagtggaaggaggcgaaaggtggagagatctgtgagcagctgcgagctctgggtgcctccctggactgggatcgagagtgttttaccatggatgttggctcctcagtggctgtgactgaagcttttgtgcggctctacaaggcggggttgctgtaccggaaccatcagcttgtcaactggtcatgtgctttaagatcagccatctcggacattgaggtggagaaccggcccctgcctggccacacacagcttcgactgcctggctgccccacccccgtgtcttttggcctcctattttctgttgccttccccgtggatggagagcctgatgcagaggttgtggtaggaaccacaaggccagagacgctgcctggagatgtggctgtggccgttcatccagacgactcgcgatacacacatctacacgggcgacagcttcgtcaccccttgatggggcagcctcttcccctcatcacagactatgctgttcagccacatgtgggcacgggggcagtgaaggtgactccagctcacagtcctgccgatgctgagatgggggcccgacatggcttgagccccttgaatgtcattgcggaggatgggaccatgacctccctctgcggggactggttgcagggtcttcaccggtttgtggcccgggaaaagataatgtctgtgctgagtgaacggggcctattccggggcctccagaaccaccccatggtactgcccatctgcagccgttctggggatgtgatagaatacctgctgaagaaccagtggtttgtccgctgccaggaaatgggggcccgagctgccaaggctgtggagtcgggggccctggagctcagtccctccttccaccagaagaactggcagcactggttttcccatattggggactggtgtgtctcccggcagctgtggtggggccatcagattccagcctacctggttgtagaggaccatgcgcagggagaagaggactgttgggtggttgggcggtcagaggctgaggccagagaggtagcagcggaactgacagggaggccaggggcagagctgaccctggagagggatcctgatgtcctagacacatggttttcttctgccctgttccccttttctgccctgggctggccccaagagaccccagaccttgctcgtttctaccccctgtcacttttggaaacgggcagcgaccttctgctgttctgggtgggccgcatggtcatgttggggacccagctcacagggcagctgcccttcagcaaggtgcttcttcatcccatggttcgggacaggcagggccggaagatgagcaagtccctggggaatgtgctggacccaagagacatcatcagtggggtggagatgcagttgctgcaggaaaagctgagaagcggaaatttggaccctgcagagctggccattgtggctgcagcacagaaaaaggactttcctcacgggatccctgagtgtgggacagatgccctgagattcacactctgctcccatggagttcaggcgggcgacttgcacctgtcagtctctgaggtccagagctgccgacatttctgcaacaagatctggaatgctcttcgctttatcctcaatgctttaggggagaaatttgtgccacagcctgctgaggagctgtctccctcctccccgatggatgcctggatcctgagccgccttgccctggctgcccaggagtgtgagcggggcttcctcacccgagagctctcgctcgtcactcatgccctgcaccacttctggcttcacaacctctgtgacgtctacctggaggctgtgaagcccgtgctgtggcactcgccccgccccctggggccccctcaggtcctgttctcctgcgctgacctcggcctccgcctcctggccccactgatgcccttcctggctgaagagctctggcagaggctgccccccaggcctggttgcccccctgcccccagcatctcggttgccccctaccctagcgcctgcagcttggagcactggcgccagccagagctggagcggcgcttctcccgggtccaagaggtcgtgcaggtgctaagggctctccgagccacgtaccagctcaccaaagcccggccccgagtgctgctgcagagctcagagcctggggaccagggcctcttcgaggccttcttggagcccctgggcaccctgggctactgtggggctgtgggcctgttacccccaggcacagcagctccctccggctgggcccaggctccactcagtgacacggctcaagtctacatggagctgcagggcctggtggacccgcagatccagctacctctgttagccgcccgaaggtacaagttgcagaagcagcttgatagcctcacagccaggaccccatcagaaggggaggcagggactcagaggcaacaaaagctttcttccctccagctggaattgtcaaaactggacaaggcagcctctcacctccggcagctgatggatgagcctccagccccagggagcccggagctctaactcatcatccccatcagttttcctccctctcagacctgtctttgaggacaaacagatttgtcagctgtcagggtgcagtgggacgtcagagactatgtggtccatcgccttcattgtgtaaatgaggacacagactggcttggtcgcagtgactgtggtgtccttgagatgctcacattactgcccggcctgcctcccacctggaagtctgggaatgaggagattgagataaacttttgaaatccc

SEQ ID NO: 4518 - DNA, 3757 bp, Homo sapiens
  source 1..3757: mol_type = genomic DNA
aggctgcgccgcggggcggcgggacggaatgtgggcgctgcgggggcttttctctcctacccgaactgtgggaacaatggactgaaaggggaagatggattgaggggccgagcggggaagcgagctgcaccggggaatcatgacttctgcagccgagataaagaagccaccagtggcccccaagcccaagtttgttgtggcaaataataagccagccccacctcctattgcacctaaacccgacattgtgatttctagtgttccacagtcgacaaagaaaatgaaaccagcaatagccccaaaaccaaaagtcctgaagacctcacctgttcgagagattgggcagtcgccatcaaggaaaatcatgttgaacctggaagggcataaacaggaattagctgaaagcactgacaactttaattgtaaatatgaaggcaatcagagcaatgattatatttcaccaatgtgttcctgcagttctgagtgtatccataagctgggccatagagagaatttgtgtgtaaagcagcttgttttagagcccctggaaatgaatgaaaatttagaaaacagtaaaattgatgagactttgactataaaaactaggagtaaatgtgatttgtatggtgaaaaagccaagaaccagggtggggttgttttaaaggcaagcgttttagaagaggagctcaaagatgccttaatacaccaaatgccaccttttatttctgcacagaagcacaggcccacagacagcccagaaatgaatggtggctgtaattcaaatggacaattcagaattgaatttgcggatttgtcaccttccccatccagctttgaaaaagttcctgatcatcacagttgccacttacagcttcctagtgatgaatgtgaacattttgaaacttgccaggatgacagtgaaaaaagcaataattgctttcagtcatctgaactagaggctctggaaaatgggaaaaggagtactttaatatcttcagatggagttagtaagaaatcagaagtcaaagaccttggtcccttagaaattcatttagtaccatataccccaaaatttccaactcccaagcccagaaagacacgaactgctcgtctgttacgccaaaagtgtgtagatactcctagtgaaagcactgaagaaccggggaattcagacagtagctcttcctgtcttactgaaaatagtttgaaaatcaataaaatcagtgttctgcatcagaatgttttgtgtaagcaggaacaggtggataaaatgaagctaggaaataaaagtgaattgaatatggaatccaacagtgatgcacaggacttagtcaattcacagaaagccatgtgtaatgaaacaacttcctttgaaaaaatggcaccttcttttgataaagactctaatttgagttctgacagcacaactgtagatggttctagtatgtcgcttgctgtggacgaagggaccggttttataagatgtactgtatctatgagcctgcctaagcagctcaaattaacttgcaatgaacatttgcaatctgggagaaacctgggagtttctgcccctcaaatgcaaaaggaatctgttataaaagaggaaaattctctacgaattgtccccaaaaaacctcaaagacatagcttgcctgctacaggagtgcttaaaaaggctgcctccgaggagcttttggaaaaaagttcttatccttcaagtgaagaaaaaagttcagagaagagtctagaaagaaatcaccttcagcatttgtgtgcccaaaaccgtggtgtgtcatcctcctttgatatgcctaaacgggcttcagaaaagccagtgtggaagttacctcatcctattttacccttttcagggaacccagaattcttaaagtctgtcaccgtatcgtcaaacagtgagccttcaacagccctaaccaagcccagagcaaaatcgttatctgctatggatgtggaaaagtgcactaagccttgcaaagactctacaaagaaaaactcttttaaaaagttgctcagcatgaaactgtccatctgtttcatgaagagtgactttcaaaaattttggtccaagagtagccaactcggagacaccaccacaggccacctctccagtggggagcagaaggggattgaaagtgattggcaaggcttgttggtaggagaggagaagagaagtaaacccatcaaggcatattccacagaaaactatagcctggaatctcaaaagaagaggaagaagtctcggggccagaccagtgcagctaatggtctgagagctgagtctttggatgaccaaatgctctcccgggagtcatcatctcaggcaccttacaagtctgttacaagcctctgtgcaccggagtatgaaaatatacgccattatgaggaaataccagagtacgagaacttgccatttattatggctatacggaaaactcaagagttggaatggcagaattccagcagcatggaggacgctgatgcaaatgtgtatgaggtagaagagccgtatgaagctccagatggccagctgcagcttggacccagacatcagcattccagttcaggagcatcccaggaggaacagaatgatcttggtcttggtgaccttccctctgatgaggaggaaatcatcaacagttctgatgaagatgatgtcagctctgagtcaagtaaaggagagcctgacccactggaagataaacaggatgaagataatggaatgaaaagtaaagttcatcatattgccaaggagatcatgagctcagagaaagtgtttgtggatgtgttaaaacttttgcatattgatttccgggatgcagtagctcatgcttccaggcaacttgggaaaccagtgattgaggaccggattctaaatcagatcctatactacttgcctcagctgtatgagctcaaccgggatctcttgaaggaactggaggaaagaatgttgcactggactgaacaacaaagaattgctgatatctttgtaaagaagggaccatatctaaaaatgtattccacatacatcaaagaatttgataagaatatagccttgctggatgaacagtgcaagaaaaatccaggttttgctgctgttgttagagaatttgagatgagccctcgctgtgctaatctggccctcaagcactacctgctcaagccggttcagaggatcccccagtacaggctgttgctgacagattatttgaagaatctcatagaagatgctggagattacagagacactcaagatgcccttgctgttgttatagaggtagccaaccacgccaatgacaccatgaagcaaggagacaactttcagaaacttatgcaaattcagtacagcttaaatggacaccatgaaattgtgcagcctggtcgggtttttctcaaagaaggaattctgatgaagctgtctcggaaagtgatgcaacctcgaatgtttttcctgtttaatgatgccctgctgtatacaacaccagtgcagtctgggatgtataaactgaacaacatgctctcactggctggaatgaaggtcagaaaacctacccaagaagcctatcagaatgaattaaagattgaaagtgtagaacgttccttcattctctcagccagttctgccacagaaagggatgaatggctagaagcgatttccagggcaatagaagagtatgccaagaaaagaatcaccttctgtcctagtaggagtcttgatgaggcagactcagaaaataaa

SEQ ID NO: 4519 - DNA, 646 bp, Homo sapiens
  source 1..646: mol_type = genomic DNA
ccgtggggtgagaatgggcttgcgagtttacccccacctccccagccaccagcctgtgggtctcaaaccaaggctacttggtgctctgctttgagttgcagagaatctcctctcagcctttaagctcacctggtcagaatccttggatgagcctgtgggaccgttcctcctagcccggtggtttggaaccagtggctttgggactgtaagaggatggacaaagattctcaggggctgctagattcatccctgatggcatcaggcactgccagccgctcagaggatgaggagtcactggcagggcagaagcgagcctcctcccaggccttgggcaccatccctaaacggagaagctcctccaggaccctttacaggttcatcaagaggaagaagttcgatgatgagctggtggagagcagcctggcaaaatcttctacccgggcaaagggggccagtggggtggaaccagggcgctgttcggggagtgaaccctcctccagtgagaagaagaaggtatccaaagcccccagcactcctgtgccacccagcccagccccagcccctggactcaccaagcgtgtgaagaagagtaaacagccacttcaggtgaccaaggatctgggccgctggaagcctgcagatgacc

SEQ ID NO: 4520 - DNA, 2041 bp, Homo sapiens
  source 1..2041: mol_type = genomic DNA
gcggtgaccacgtgacctccgctgagctttcgccagtgcctgcggccctcggcggcctagtacacacgcacctgagtgagtggcaccagaggaccctctccatgtttagggacctcctgggcctcaggagcgtggcgcccgcccctgggcggactccccccatccgcgggcgcgaatggtccgggccgcgtccgcagtgctgctggctgctccctggttgctgggtgcaaagtgctgggttctgggtttctggattcgcgggccgttcacacgtagcctgtgccggctcctcgggtgagtccgtccgcgcgcggtgccccgggacggcctaggctgccgggggtccggggccccaggcattccgggctgcagattgacggggatcccggatgcaccgcgcgcccccgcgccctcaccgacgggtccagacctggtgggaagaaggtgcggggacgggtccctgaggatcccgatgcctacgagccaagatgctcaggtgtgacctacacatgtgacttcacctcagttttgtgatccgtaaaatggacaaattcgaagctacttcacagtgctgttgagaggattaaatgaaacaatgcttgtaaagctctttgcaggagggagcctcggaagcagggcctggccggcagagcacacctgctgtcaccagggaccacaggcagcatgaagacccccgtggagctggccgtcagtgggatgcagaccctcggccttcagcaccgctgccgaggtggctaccgggtcaaggccaggacgtcatatgtggatgagactctgtttggcagcccagcaggcacccggcctaccccaccggacttcgatccgccctgggtggagaaggctaacagaaccagaggcgtgggcaaggaggcatcgaaggccttgggggcaaaggggagctgtgagaccaccccctcaaggggcagcacccccaccctcacaccaaggaagaagaacaaatacagacccatcagccacaccccgtcttactgtgatgagtcgctgtttggctcccgatctgaaggcgccagcttcggggccccgcggatggcgaagggggatgccgcaaagctccgtgctctcttgtggacgccaccacctacccccaggggtagccactcgccccgccccagggaggcaccactgcgagccattcacccagctggtccctccaagacagagccggggccagcggcagactcccagaagttatctatgggtgggttacactcttcacgccccctgaagcggggactttcccattccctcacccacctgaatgtccccagcactggtcatccagccaccagtgccccccacacaaatgggcctcaggatctcaggccttccacgtcaggggtgaccttccggagccccctggtgacttccagggctcgctcagttagcatttcagtgccatctaccccacgacgaggtggggccacccagaaaccaaagcccccttggaaatgatactctttcatcagggttgcctatggggccacggcgacaggtatggccccttgccagggtaggaggacattcatcacccagggaaccccaggtattaaagaagcccctgtgggggcagacagacatagcaggggtgggcagtgcctccctttatcctgacaatctctagtcgattcttgcctttttctcccgattgcggatttgggggccacctctaagatgcctctctccagccctgtctcaaccatactccaaattagtgccaacccaggggcctggcacctcccacatcatccattgtcttgctgccaagtgcgaataaacggcgtgattgccaacctggagggtcccctcttatcccttcaagccaagcttcctgctcaggattagtttccagctaagtctgcaagccctagaggagtttttccaggctgtctgtgaagcctggggaacacaacggcaactgggagatttgtgagtgaacactgtttcatcttaatatgcttctgaatttattttcatgtactaaatagatcagctcatcaaa

SEQ ID NO: 4521 - DNA, 580 bp, Homo sapiens
  source 1..580: mol_type = genomic DNA
gagtcggccaggaggggcggccgcggcaggtgcaggtgctggcgccgtgcagggcgcggttatcttatgatgaggcttttgctatggctaatgatcccttggaaggcttccatgaagtaaaccttgcttcacctacttctccggaccttcttggtgtgtatgaatcaggaactcaagagcagactacctcaccaagtgtcatctaccggccacacccttcagctttatcctctgtacctatccaggcaaatgcattagatgtttctgaacttcctacacaacccgtgtattcatcccccagacgtttaaattgtgcggaaatatctagtatcagctttcatgttacagacccagccccttgctctacctctggagtcacagctggattaactaaattaactacaagaaaggacaactataatgcagagagagagtttttacagggtgctactataacagaggcttgcgatggcagtgatgatatttttgggttgagtactgatagtctgtctcgtttacgaagcccatctgttttggaagttagagaaaagggctatgaacgattaaaagaagaactcgc

SEQ ID NO: 4522 - DNA, 570 bp, Homo sapiens
  source 1..570: mol_type = genomic DNA
aagtgaagggtggcccaggtggggccaggctgactgaagtgagtagtgggggtgccagaccagtgtatctcctagctatggactaaataatacatggggggaaataaacaagtattcatgagggtgaaaatgtgacccagcaggaaaattacaactattttcaattgacgttgaataggaaagatggatactatgatgctgaatgtgcggaatctgtttgagcagcttgtgcgccgggtggagattctcagtgaaggaaatgaagtccaatttatccagttggcgaaggactttgaggatttccgtaaaaagtggcagaggactgaccatgagctggggaaatacaaggatcttttgatgaaagcagagactgagcgaagtgctctggatgttaagctgaagcatgcacgtaatcaggtggatgtagagatcaaacggagacagagagctgaggctgactgcgaaaagctggaacgacagattcagctgattcgagagatgctcatgtgtgacacatctggcagcattcaactaagcgaggagcaaaaatcagctctggcttttctcaac

SEQ ID NO: 4523 - DNA, 984 bp, Homo sapiens
  source 1..984: mol_type = genomic DNA
gcggccgaggtcgaggtaagagcgcggcgttggtggtttgcattttccgcagcgctcgcgaccgcccgctcggccccggcctcgcctcggagccccgcgagggctgcgcgctcgggccgattcctcgacagcgcccgcggcggcgagaaccaccgcagccatcctggtccgggagcgaccgccgcggcacccccaaccccgccagagcgggcaccaggaagcggggggaggggagcgaggagcctcccgggcggagatgcggcagctcccgcacctccgcaccccgggcgatcagtgggtgaccgcggctgcgagggactttgtcatccgtcctccaggatctggggagaaagagccccatcccttctctctctgccaccatttcggacaccccgcagggactcgttttgggattcgcactgacttcaaggaaggacgcgaacccttctctgaccccagctcgggcggccacctgtctttgccgcggtgacccttctctcatgaccctgcggtgccttgagccctccgggaatggcggggaagggacgcggagccagtgggggaccgcggggtcggcggaggagccatccccgcaggcggcgcgtctggcgaaggccctgcgggagctcggtcagacaggatggtactggggaagtatgactgttaatgaagccaaagagaaattaaaagaggcaccagaaggaactttcttgattagagatagctcgcattcagactacctactaacaatatctgttaaaacatcagctggaccaactaatcttcgaatcgaataccaagacggaaaattcagattggactctatcatatgtgtcaaatccaagcttaaacaatttgacagtgtggttcatctgatcgactactatgttcagatgtgcaaggataagcggacaggtccagaagccccccggaacggcactgttcacctttatctgaccaaaccgctctacacgtcagcaccat

SEQ ID NO: 4524 - DNA, 1936 bp, Homo sapiens
  source 1..1936: mol_type = genomic DNA
tgcggctgctaccgtcgccgcggagaaattgttggatctggcagtctaggaatgaggtgacttcatcaatgctcctaccccgagttcttgagacagacctggaccgatcccctaccttgggtgtgcactcttgggagaacgaggggcggagggtccgaatctcctctcagcctttaagctcacctggtcagaatccttggatgagcctgtgggaccgttcctcctagcccggtggtttggaaccagtggctttgggactgtaagaggatggacaaagattctcaggggctgctagattcatccctgatggcatcaggcactgccagccgctcagaggatgaggagtcactggcagggcagaagcgagcctcctcccaggccttgggcaccatccctaaacggagaagctcctccaggttcatcaagaggaagaagttcgatgatgagctggtggagagcagcctggcaaaatcttctacccgggcaaagggggccagtggggtggaaccagggcgctgttcggggagtgaaccctcctccagtgagaagaagaaggtatccaaagcccccagcactcctgtgccacccagcccagccccagcccctggactcaccaagcgtgtgaagaagagtaaacagccacttcaggtgaccaaggatctgggccgctggaagcctgcagatgacctcctgctcataaatgctgtgttgcagaccaacgacctgacctccgtccacctgggcgtgaaattcagctgccgcttcacccttcgggaggtccaggagcgttggtacgccctgctctacgatcctgtcatctccaagttggcctgtcaggccatgaggcagctgcacccagaggctattgcagccatccagagcaaggccctgtttagcaaggctgaggagcagctgctgagcaaagtgggatcgaccagccagcccaccttggagaccttccaggacctgctgcacagacaccctgatgccttctacctggcccgtaccgcgaaggccctgcaggcccactggcagctcatgaagcagtattacctgctggaggaccagacagtgcagccgctgcccaaaggggaccaagtgctgaacttctctgatgcagaggacctgattgatgacagtaagctcaaggacatgcgagatgaggtcctggaacatgagctgatggtggctgaccggcgccagaagcgagagattcggcagctggaacaggaactgcataagtggcaggtgctagtggacagcatcacaggcatgagctctccggacttcgacaaccagacactggcagtgctgcggggccgcatggtgcggtacctgatgcgctcgcgtgagatcaccctgggcagagcaaccaaggataaccagattgatgtggacctgtctctggagggtccggcctggaagatatcccggaaacaaggtgtcatcaagctgaagaacaacggtgatttcttcattgccaatgagggtcgacggcccatctacatcgatggacggccggtgctctgtggctccaaatggcgcctcagcaacaactctgtggtggagatcgccagcctgcgattcgtcttccttatcaaccaggacctcattgccctcatcagggctgaggctgccaagatcacaccacagtgaggagtggtggcaggactcgtgggccctctccggcctgtttcccctgccactccagcccccttgagctgggaactcaggctcctggaaaaacctgggcagtgggaggctcagctgcgggccattgatttgagcctttgagggaggatagggctggcctttgtgaagccagcagaggctgagaacctcaggcttccctagatccagagcccctccccatcttcctctctctaaaaacaaccctaccccccattgccaccttcactcctgtgtctccagctga

SEQ ID NO: 4525 - DNA, 894 bp, Homo sapiens
  source 1..894: mol_type = genomic DNA
gttagcccagagggaaagaaagaactggggcgatccggtaggtaaaggagggaacccccattcattttctacctttggggctcctcttctgcatgaaggtataaagggagattttccttgtctctccctcaaaatgaagaacacatgtaaatccttgtttttcctggtgaggcaggggaggccatagccacaatgcttaactgcatgcatctaacatggggctggttttaaccccagcgctctgacctaaactgctcagctcccggaaattccaagggacctggtggccttagtctttcaggtggaacggtgtgcgacatgggaaagaaaaccaagcggacagctgacagttcttcttcagaggatgaggaggagtatgttgtggagaaggtgctagacaggcgcgtggttaagggacaagtggaatatctactgaagtggaaaggcttttctgaggagcacaatacttgggaacctgagaaaaacttggattgccctgagctaatttctgaatttatgaaaaagtataagaagatgaaggagggtgaaaataataaacccagggagaagtcagaaagtaacaagaggaaatccaatttctcaaacagtgccgatgacatcaaatctaaaaaaaagagagagcagagcaatgatatcgctcggggctttgagagaggactggaaccagaaaagatcattggggcaacagattcctgtggtgatttaatgttcctaatgaaatggaaagacacagatgaagctgacctggttcttgcaaaagaagctaatgtgaaatgtccacaaattgtgatagcattttatgaagagagactgacatggcatgcatatcctgaggatgcggaaaacaaagagaaagaaacagcaaagagctaa

SEQ ID NO: 4526 - DNA, 1532 bp, Homo sapiens
  source 1..1532: mol_type = genomic DNA
gatagctgccggctccggcttccacttggtcggttgcgcgggagactatggcgtcctcctcggtcccaccagccacggtatcggcggcgacagcaggccccggcccaggtttcggcttcgcctccaagaccaagaagaagcatttcgtgcagcagaaggtgaaggtgttccgggcggccgacccgctggtgggtgtgttcctgtggggcgtagcccactcgatcaatgagctcagccaggtgcctcccccggtgatgctgctgccagatgactttaaggccagctccaagatcaaggagtattgtccccaggtcttcaggaacctccgtgatcgatttggcattgatgaccaagattacttggtgtcccttacccgaaacccccccagcgaaagtgaaggcagtgatggtcgcttccttatctcctacgatcggactctggtcatcaaagaagtatccagtgaggacattgctgacatgcatagcaacctctccaactatcaccagtacattgtgaagtgccatggcaacacgcttctgccccagttcctggggatgtaccgagtcagtgtggacaacgaagacagctacatgcttgtgatgcgcaatatgtttagccaccgtcttcctgtgcacaggaagtatgacctcaagggttccctagtgtcccgggaagccagcgataaggaaaaggttaaagaattgcccacccttaaggatatggactttctcaacaagaaccagaaagtatatattggtgaagaggagaagaaaatatttctggagaagctgaagagagatgtggagtttctagtgcagctgaagatcatggactacagccttctgctaggcatccacgacatcattcggggctctgaaccagaggaggaagcgcccgtgcgggaggatgagtcagaggtggatggggactgcagcctgactggacctcctgctcttgtgggctcctatggcacctccccagagggtatcggaggctacatccattcccatcggcccctgggcccaggagagtttgagtccttcattgatgtctatgccatccggagtgctgaaggagccccccagaaggaggtctacttcatgggcctcattgatatccttacacagtatgatgctaagaagaaagcagctcatgcagccaaaactgtcaagcatggggctggggcagagatctctactgtccatccggagcagtatgctaagcgattcctggattttattaccaacatctttgcctaagagactgcctggttctctctgatgttcaaggtggtggggttctgagacacttgggggaattgtggggatattctagccaccagttctcttcttcctttgctaaattcaggctgcaggctccttccatccagataactccatcctgtcgagtaggctctttctgaccctcagaaatacattgtcctttttcctctttgcccatttttcttccctctcttcctccccatgagaagtctgcttgtagtattagaatgttattgttgactctctccc

SEQ ID NO: 4527 - DNA, 832 bp, Homo sapiens
  source 1..832: mol_type = genomic DNA
aaaattgaagtgattgaaatcatgactgaccgaggcagtggcaagaaaaggggctttgcctttgtaacctttgacgaccatgactccgtggataagattgtcattcagaaataccatactgtgaatggccacaactgtgaagttagaaaagccctgtcaaagcaagagatggctagtgcttcatccagccaaagaggtcgaagtggttctggaaactttggtggtggtcgtggaggtggtttcggtgggaatgacaacttcggtcgtggaggaaacttcagtggtcgtggtggctttggtggcagccgtggtggtggtggatatggtggcagtggggatggctataatggatttggtaatgatggaagcaattttggaggtggtggaagctacaatgattttgggaattacaacaatcagtcttcaaattttggacccatgaagggaggaaattttggaggcagaagctctggcccctatggcggtggaggccaatactttgcaaaaccacgaaaccaaggtggctatggcggttccagcagcagcagtagctatggcagtggcagaagattttaattaggtaagtaagcacctttttgtgtgttgacataattttttaaattgctgatgaacccaataaccctaatgtagctgagcagtgcaacatagttaacattataattgcagtaattgtggatataaagttaatattcagatcagcaaaatttgtgggaaacaaacttgatattggattgtagccttgagtcttaatatgtttagattaacaactttattccatattgttcaacaggaaacaaagcttagcaggaga

SEQ ID NO: 4528 - DNA, 618 bp, Homo sapiens
  source 1..618: mol_type = genomic DNA
acatttaagaaatacattggttcagtccagaaaggcaggacaacccgacgcgaggcagggagcttccaggttatagcaatggagcttaccatctttatcctgagactggccatttacatcctgacatttcccttgtacctgctgaactttctgggcttgtggagctggatatgcaaaaaatggttcccctacttcttggtgaggttcactgtgatatacaacgaacagatggcaagcaagaagcgggagctcttcagtaacctgcaggagtttgcgggcccctccgggaaactctccctgctggaagtgggctgtggcacgggggccaacttcaagttctacccacctgggtgcagggtgacctgtattgaccccaaccccaactttgagaagtttttgatcaagagcattgcagagaaccgacacctgcagtttgagcgctttgtggtagctgccggggagaacatgcaccaggtggctgatggctctgtggatgtggtggtctgcaccctggtgctgtgctctgtgaagaaccaggagcggattctccgcgaggtgtgcagagtgctgagaccgggaggggctttctatttcatggagcatgtggcagctgagtgt

SEQ ID NO: 4529 - DNA, 9646 bp, Homo sapiens
  source 1..9646: mol_type = genomic DNA
gagtccagcgggttacctggcggcgggcgggcgcggccgggagcggagggccgcggtcgcgaagaggatgaagagagagttcccgaacaagtcggaagcagctcacaacaccggacgccgcgcggcagggctgtggacctggggtggtttcgtgtcccagtcttaggaaactacgcgcgaggcaccgtgctgaggcgtagaggtcaccctcgggaggtttcggtgaaacctggtgggaaattccgggcaggcgcccggagtcgcgcccaagtaggcagctccgtgccgccagacttgtgttcgggggagttgagacgaactgcacgggtgggattgcatggctctgccctcccagcgttgacaactcgccccgaccgcccaggaagcgcgagcttactggctccagaagtgatgatgctgggtggaagtcgcagcatgtgaagagttgccggttgttatgggattaaaaaagatgaaagggttatcttatgatgaggcttttgctatggctaatgatcccttggaaggcttccatgaagtaaaccttgcttcacctacttctccggaccttcttggtgtgtatgaatcaggaactcaagagcagactacctcaccaagtgtcatctaccggccacacccttcagctttatcctctgtacctatccaggcaaatgcattagatgtttctgaacttcctacacaacccgtgtattcatcccccagacgtttaaattgtgcggaaatatctagtatcagctttcatgttacagacccagccccttgctctacctctggagtcacagctggattaactaaattaactacaagaaaggacaactataatgcagagagagagtttttacagggtgctactataacagaggcttgcgatggcagtgatgatatttttgggttgagtactgatagtctgtctcgtttacgaagcccatctgttttggaagttagagaaaagggctatgaacgattaaaagaagaactcgcaaaagctcagagggaactgaagttaaaagatgaagaatgtgagaggctttcaaaagtgcgagatcaacttggacaggaattggaagaactcacagctagtctatttgaggaagctcataaaatggtgagagaagcaaatatcaagcaggcaacagcagaaaaacagctaaaagaagcacaaggaaaaattgatgtacttcaagctgaagtagctgcattgaagacacttgtattgtccagttctccaacatcacctacgcaggagcctttgccaggtggaaagacaccttttaaaaaggggcatacaagaaataaaagcacaagcagtgctatgagtggcagtcatcaggacctcagtgtgatacagccaattgtaaaagactgcaaagaggctgacttatccttgtataatgaattccgattgtggaaggatgagcccacaatggacaggacgtgtcctttcttagacaaaatctaccaggaagatatctttccatgtttaacattctcaaaaagtgagttggcttcagctgttctggaggctgtggaaaacaatactctaagcattgaaccagtgggattacaacctatccggtttgtgaaagcttctgcagttgaatgcggaggaccaaaaaaatgtgctctcactggccagagtaagtcctgtaaacacagaattaaattaggggactcaagcaactattattatatttctcctttttgcagatacaggatcacttctgtatgtaacttttttacatacattcgatacattcagcagggactcgtgaaacagcaggatgttgatcagatgttttgggaggttatgcagttgagaaaagagatgtcattggcaaagctgggttatttcaaagaggaactctgatgctctgcgtgggaccatgcctgaactccccgaataactgaaaaatggctgaatatttttatggttacttgatatttatttccaaggagtgagcctaagacttttttccccttttgcaaattgctctaagaagtaccatgatttcttttaaactgatctatgctgtgtttgcttattctttagttgaacacactatgaagaattccaggtgtactagtgaatgtaatttatagttgccaaaaaaaaaaaaaacctgaaataaataaatgttagattgaatgtgtgtacattttctcttctagctctgacatggcatttagggttagcagaatgtattaaatagtaattttcaaactacacagtagcttccttccttgtgagaggcaagaaagaagtctgagtggatagtactcactttccaaggcccccacctctagaatggctttatttttatctgttttctatattgggtttcaaaaaagattttatttgaagaaatacttctgctgctacaaagtttgaaagttactattttaattattctgctctctgtaactgaaagaatccctttattttggttattcattaaaatataatagaaggcagtcagattttatcccagagatgtattcctgagtgtcttgatatagtgtattcatgttttatatgtgttgaccactatattgtcattggagggacatagatgtaaatgagtttgacgtgtgtcaaaggggtttaaaggggtgtggattgaatgaatggtacgtgcgaagtatatgctgattatagaaccacttgatctctgcattccaaattgtaaaactgactcaactggagaaattataacaaagaggtttgtggtagacatgtaataagtatagaaaagcaaaaagaaaagagaaactgctttagtttctgtttagagaaagctgctgttaatatttttggatagtagcctttcagctttcagatattttctacttacatatgcatatttttgaaacaaaaagtaggctttttttttgctttttaaacctaaacattaaatatattttcccttgggtaaacctacacatcctaatccctgtttatagaattttaacataatttaattgtgtttggagatgaggtggttttcagtttatttttcatattataatgctgtgacgagtatccttatctgtacacttctgaacattgtggagttctttcatgtggatgcctggagataaaattgtgtcgagatatatatgtatttttaaatgtttgatctgcattgctagattgccatccagaaaagttaatcaatttgtattcacagcagcagtgtacaagagggctggttttctgaagataacatttttttcagtcctgttcagaggtttggtcaatcttacctgtagatgacttcagccaccaggctggatgggagcccacagacaaaaggacattggtgtatgttatggtgaaaaccatcagtaccatgcctagctcaagaatgtgaaattgaacctgaaaaaaactttgaacctacaattttatgttctgaaaatagttattctaatgtgagggcattaataagaatatgtaccatcaaagcttcagaagattttccgtacaaactaaaatcacttttggagaaagtacctaaataaaaagagaaacaaatccaggagatactgtacggtttgaaagaaaggtaatcaaatactcagaaaaagtttgttgatgacttaaaaaggataaataaaaagtaagactaaagaaaatcagtatacccattaataataaatctttagtaatctataaggggaagaatgcttttcaaccttatacactagaagcatgctctttaaaattaatgcaacaggatgacgacttgatgtagaaactatatgtggaattatagattaaaatgtgattgaaacatatttagaaaatgtgattatcttcctgatcctactccctttaggaagaacttcttaaactggaagcaggaaaaaaaaaaaccataaaagataaccataaaagaatataagttatggtatattataaattcttaatttagaaatcgtgcatcagtagttaggcattgtggctcatgcctgtaatcccagcactttgggaggcagaggcagaaggattacttgagctgcttgagcccaggagtttgagacgggcctgggaaaaatagggaaactccatttacacacacacacacacacacacacacacacacactgtgtccatgaacttgggaggatgaggtgggaggattgcttgagcccaggggttcaagtccaacttgggcaacatagggagaccttgtctctaaaaaaaaaactaaagctaaactacaaactgtgaggcaatatctgcaacatttataactagtaatagcttagtatcaagaatgtatgcagaaattctacaaaccaacaaaaaaggacagtgtcacagaaaaacaggcaaaagactgaaccaggccttccacacaattagaagtgcatgtgggccaataaacattaagaggttttcatctctcaatcaggaaaacgtaaatcaagatgacaatgacatgttcaaattcattcgattggtgaaaatgaagaaacacaaagtcaagttttggagagggttttagtcattaggatcactcacatattgctgatgggggtatcaattggtatatccactgtgaaaaaccattcactagaaaagttgggccaggcccagtggctcatgcctcttggctttgggaggccaaggtaggaggatcacttgagcccaagagttcaagaccagcttgagcaacatagggagaccacatctgcacaaaaagatttttttgaattagctgggcatggtggtgcatgcctgtggtcccagctacttgggaagctgaggtggaaggattgcttaagcccaggaggttgaggctgcagtgaatcatgattgtgccactgcactcttaccttgggtgacagagtaagatcataccttaaaaaaaaaaaaaaagtatacccatgggtcagcaatttcacttttcagtatatacttgagaaatgcttgcacaggtcccccagatcacacatataagaatgttctggaataaattaaaatgtctatttttaggaaggtgtaatgtgttcacagaatgggtgattattacatggcagcaaaatgaatgaataccagctacttgcagcacaataactcagaatgaaaaagcaattctgagaaaactatatgtgacatgatacttttcttataaaagtcaagaacaactaaaactgaacagctgtttaggcattgacatatgtgacaaaacttttaaaaagtaataaagttcaagatagtggttacctctggagaggtagaggaggagcaaatctatgagtaagtcactggtaatgttttagtccctgggttaggtggtgggttttggggtggttcatttgtcattaaaagtaagtacatgagctgggtgtagtggtgcgtgcttatagtcccagctacttgggagtctgagataggaagatccttgaggccagttcaaggctatagtgtgctatgatttcacctgtgaatagctactatattccaacctgggcaacgtagaccttgcccccctttaaaaaaattcaaaaacaaaataaatgcatggacaaatgaataagagagttatgcatggaacatcggtggtgtattatgaatcaagcattattactagctcagttatatgtgccttcattccaaaacaaaaaataaaaggtaagaaaattgttgaattgcatttgagagagaggaaaggaaagaattcaggtctgaatcttaggcttttggcttgagctattgcagtttattgagatggggaaatacatggtggggaaagtttgggtatgtgcataacagagacagaaattcagtgtttgacagatcaagtgtgaggtgcccactgagcatcaaagtggatatgttaagcaggtattggatgtacaaatctaaattcagtaaggtcagtccaggagaaaatttggggagtagttagccatgggatcagatgggcgctttagggacactttggagatgaagtacagcactgagccctgagttcctgtgacagagaagcagcctgcaaagacgaaaggaggagctgttaggaagagcaaggcaacagaaaaggaagaaccagcatgctgattatgttcaggagagtgtttctacgctgaatttaattgccaagattaccaattctaaagaagaggaggactcttggacaagtttttagaagttggtttggagctggggtgagagcctggcctaatggagacagctctggattgggagtcacttagacctacattctggtctaggtttggctcccaaaaactgggaaggttagttaggtggccactcctctctcttcatggtctctctcagcttgaagacaatttacagtctttgactaagcatccacactggaagaacaagatttggtttctgaacattgggtcttagtccttaaaataacttgcaacctgttacgtcttcacttactcccatcgccaccacaagaatcctgtgtgtttttgttttgtgcatccagtctaaaacgggtctgcttttattcataggcttttgttttcagtggtttttgttgttgcatttttccctagataaaatgttttttctataagacactgcttaaaagagtccaatgcagtatgaatttgtatttgtgtttaacttttgtgcttaacagatctgccatggctgaactctcagttgcttaagcaaaattctggggcttattctaggttcctttatttgtcattgtcactcccattccagttatcagcaaattccatcagctgtctccgagacatcttaaatctgtctacctccctccatgtccactgctaccactctgcccaagctattatcatctttcacctgaactcctgcactaatgtctgctgtccttgcatccactcctgccctcctacaatcactgacggcagccgcagggatctttataaaacgaaaatcagataatgtcacttccctgcttaaagccctttgagtggcttcccattgcacttagaaaaaaaaaaaaaaaaaaaaactggccaggtgcgatggctcatgcctgtaatcccagcactttgggaggccgaggcgggcggatcccctgaggttggtagttcgagacctgcttggccaacatggagaaaccctgtctctactaaaaacacaaaattagtcaggtgtgatggcgcatgcctgtaatcccagctacttgggaggctgagtcaggagaaacgctcgaacccaggaggcagaggttgtggtgagttgacatcacgccattgcactccagcctgggcaacaagagtgaaactccgtctgaaaaaaaaaaaaaaaaacccaaactcaatagaaaatcaagttttcatagtggtagttgttaacagagaaataacaatgaaagctttaaaaaactccatgaaaatttgcaaaacttaaaaaaaaaatgtagaagaggactaaacttgataaaatattaaaagaattgaaacccttcctaaaggcagcttctcaagggagcacaagttcacacacagtttacttttggaggaacgtctgaggtcatgaggactagattctagagctacaggtctcagggacagtctcgagggatacagggcccccatcaccacatccccagatttaaccgcagcagctcagcttttatctgtatctgttggagctctctaggaaatgtcaataccaaagcaaacccaaatcacaactagattagattactattcaagagaatgattctctaccgaaactctgcaaaatggggatatcaagagagttggaaaatgtaagacgtaaagaccataatcaggaaaatacgcatcatatttgttattcactgagagggaggaatttccacttaaatcctatttccagcagctggattgtgctctcagtggagtgctctggattctgattaatagagattttctagtcctcccagcaacttccttctcaattctcttcactttccgcagatctcggcaccagggttgcatcttgtgggctccattgtgttttcacacaatgtgctatttgtccttcacagtgttttggtttatttttctgtttgtccatcttgtttttgaacaattgccagcatttaaaaatgaggaaatctaaaatctgcatttcaagctgctcttttttaaaatgtgccgtttcgacaacactgagcccacagtcttgaatgacaacacttgggtggagctgagtgactccacctgtcgggtggctacacccttgctcagggtatgcactccatggtttgctctatggcccaccatcctggattgtctccctgacaccaaggctaagggacccactttactcacttatctgctgggccttggaagtatttcagttcggaaccccaattctaaccttagcttctcaggccattaaatgaaatctcatttctatgatgcttcctgtcacatcactgtgctgctgagaacatgaagtctgtgggtgaattggtggacgggatccagaatcattacttggcagtggattatagtgtgatgactcatttccggtggtctccaggagacttggctgggagcttctcttggagtctagggttagccagaggctacatgttttaggcatcttaattcatattttatctaaaggcatataaatccttaaaaaaaatcatttgacttcatccttgctccctacatccagccagtaaccattgctttgttttacatcgcgtgcttcaggctttactacagcctacctggattttgcagtagcttcttaaactgcttaaactttggatattgccccagccaacacattctgccacagagatctctctgagttaaatgggattgtatcatgccccacacccaagcagatagaaactgtcaatagatacacttagaatgaatatgcatggaatcaaattacattcagaatctaccactataggtagtgaatacaacaggatagcagaggctgggaagggtaatgggggttggggggtgggaggataaaggggttgggtaatgggtgtaaaaatctatagaaggaatatgatctgttgtttggtagcacaatagggtaaatacagttaataatttattgtatatttcacaataaaggagtggatttggaatgttctcaacacaaatgataaatgtttgaggtgatggataccccaattaccctgatttgatcattatacgttgtatgtttgtatcaaaatatcatatgtaccccataaatatgtacaactattatgtatccataaaaattggaaataaactaccaccatctttcttcagcctattttcctatctcctctcgcaccatactaggcacacaatctctgtacctgtgctgtcttccaagccattgctcatgttttaagaaatatacttattgtttaatatatcctgtaccactgtaggatgactgtagttaacaataatgtgtagtttcaaatagctaatagctggaaggaagttgttgaatgtttccaacataaagaaatgataagtgtttgagatgatggatatgctaattaccctgatctgatcactacacattatatgtatggaaatatcattgtgtaccccatgaatatgggcaattattatttgttaattaaaaaaataaaaaaaagacccacccactgtttaa

SEQ ID NO: 4530 - DNA, 551 bp, Homo sapiens
  source 1..551: mol_type = genomic DNA
gttttcaaaccggagctgtgggcgcggcgctgctctgccgttgggtgaggcgcggagcgaagtgaagggtggcccaggtggggccaggctgactgaatgtatctcctagctatggactaaataatacatggggggaaataaacaagtattcatgagggtgaaaatgtgacccagcaggaaaattacaactattttcaattgacgttgaataggaaagatggatactatgatgctgaatgtgcggaatctgtttgagcagcttgtgcgccgggtggagattctcagtgaaggaaatgaagtccaatttatccagttggcgaaggactttgaggatttccgtaaaaagtggcagaggactgaccatgagctggggaaatacaaggatcttttgatgaaagcagagactgagcgaagtgctctggatgttaagctgaagcatgcacgtaatcaggtggatgtagagatcaaacggagacagagagctgaggctgactgcgaaaagctggaacgacagattcagctgattcgagagatgctcatgtgtgacacat

SEQ ID NO: 4531 - DNA, 2829 bp, Homo sapiens
  source 1..2829: mol_type = genomic DNA
cttgttctctgtagctttcaatcctttatacatagtgttccttttttttaaatactgtcttccccttgttcatcttccacctaactgttcttactaatccttcgtgattagcttagatatcaatttctccaggaaattgtccccactgatccccaagcctgggttaggttcccgggagtcctgtgtgccttctgtaacaccttgtgttttcctatcatagctctcagcagcctgtttacttgtctgaacattacttgagaggaagaatttttggctgttttattcactattgtctccccagctcctaacaaagaacctggcacacagctcaatacatggtagctattattattatcagcaccttcatctatcataattctcaaatgtctggttgttgcataaataactcttaagtatgccaagaagcttagagttaagttacaagactgacaagggcatgcattgtttcagagccatgtttgggacctttgtttttcacttattcaatcattttccctttttatactaggaactgacccaggagtgtgatgaaaagaaatcccagtatgatagctgtgcagcaggcctcgaaagcaatcggtccaaattagaacaggtaagaagagagtttttattttaacaatttagcaaaaactacctgtgtgtacacctgtagtcccagctactctggaggctgaagcaggaggattgcttgagcctaggagtttgaggctacagtgagctatgatcacaccactgcattctagcctgggccacagagcaagactctctctctaaaaaaaatgttttaaatactgcccgtgtacgcacattttcactacatcaatgtcaaaagattcccaaatctttatcatcatctcctaagctccagagatctttatttctttaatttgtacacacttaatttcccatctgtaccactcccagcaaagtacaaggctcattatctgctgcctggcctcccacagtaaactcttacctattctcttgcttctactcttgctctcctaaggtttattcttcatagggaagcctaagaaacctgtttaaaatttttgccacccttcattggcttcctgttgcacttaaaataaaatctaaccaccaaactatggtctacaaggccccacctgccttatgaacttcatgtccatgtgctctactcctcatccatggagcttcagccactctgaccttcttcctgagctttaaacaggccaagcttgttttcactttgggattttgcatgtactcttcccttctgcgtgatatactctgctcctaactcttcgccctcccttctccttttcatcactaggtctcagccttagtgtcactgcctttcagagatctctgatcacctgatgttacccactcttcttcccaacctggcccacccagtccctctatcacattctactgatggatttccttcatagcgcttatccccatctcaaatatccttcattatgtttccttgtttatgttggtttcttctacttcagtgaaagcagggaacctgcctgttcacttctgtgtcctcagcacttagaacagtgctggacacacagtaggtacttaataaatgtatgattgggccagatgcagtcgctcatgcctgtaatcccagcactttgggagtccagggcgggaggatcacttgaggctaggagttcgagatcagcctggccaacccggtgaaaccctgtctctactaaaaatacaaaaattagccaggcgtggtggcacgtgcctgtagtctcagctcctcaggaggctgaggcacgagaatctcttgaacctgcgaggaggaggttgcagtgagccaagactgcaccactgcactccatcctgagtgacagagtgagactctgtctcaaaaaatacaattgaacttgcaggttatagagtgatatgtgtattctctagaaaaagattatctcttattgtgctagaataaacaaagttaaaattgcagaagaggaaatgactctgatggtagtcctttgttgtacatctaaagtcatcgtcgccatatctgtctcattctttcgataatgtcacctatctaaaattatatattataggaagttagaagactccgtgaagaatgtcttcaagaagaaagtagataccattatacaaattgtatgattaagaacctagaagttcaacttcgtcgtgctactgatgagatgaaggcatatatctcttctgatcaacaagaaaaaagaaaggcaattagggaacagtataccaaaaatactgctgaacaagaaaaccttggaaagaaacttcgggaaaaacaaaaagttatacgagaaagtcatggtccaaatatgaaacaagcaaaaatgtggcgtgatttggaacaattaatggaatgtaagaaacagtgctttctgaaacaacaaagccaaacttccattggtcaggtaattcaggagggtggggaggaccggctaatactgtgaattcttgtgtcatcgtttggggttttacttgataccactagctataagcctaatctcataatgtatttcttttttgaaactgatttgtatagcattttgttttcagaagagccattctttattaagttttcatagaaaataatgttaaggtagatttagtttgaatgttttttcatatgaaaaagaggcttttattcttttccatagtttagacatcactggcgtcttctgagttttatgagacaggaaactaagtttactatctgtaaatgtaaacatatgtccattaagaaacatgtagtttttttttagaatgtaataacccagtggctta

SEQ ID NO: 4532 - DNA, 3377 bp, Homo sapiens
  source 1..3377: mol_type = genomic DNA
gccagctgctgcgcatgcgccggccggggccccgcccccatgcgccgcgcggctccagggccacgttccagggtcgggtttggtggattcctcagtccctgccgccgcggggcgccctgggatagcggcggggcctcctgtcacctgcagaatccattaaggcctggaggcctaaggagttagtattgtatgaaatccctacgaaacccggtgaaaagaaagatgtctctgggcccctgcctcctgcatacagcccccgatatgttgaggctgcctggtacccgtggtgggtacgagagggcttcttcaaaccagaatatcaggcccggctgccccaagctacaggggagaccttttccatgtgtatcccacctcccaatgtcactggctccctgcacattggccacgcactcacggtggccatacaggatgccctcgtgcgctggcaccggatgcgtggggatcaagtgctgtgggtccctggttcagatcatgcaggaattgctacacaagctgtggtggagaaacaactgtggaaggaacggggagtgaggagacatgagctgagccgggaggccttccttagggaggtgtggcagtggaaggaggcgaaaggtggagagatctgtgagcagctgcgagctctgggtgcctccctggactgggatcgagagtgttttaccatggatgttggctcctcagtggctgtgactgaagcttttgtgcggctctacaaggcggggttgctgtaccggaaccatcagcttgtcaactggtcatgtgctttaagatcagccatctcggacattgaggtggagaaccggcccctgcctggccacacacagcttcgactgcctggctgccccacccccgtgtcttttggcctcctattttctgttgccttccccgtggatggagagcctgatgcagaggttgtggtaggaaccacaaggccagagacgctgcctggagatgtggctgtggccgttcatccagacgactcgcgatacacacatctacacgggcgacagcttcgtcaccccttgatggggcagcctcttcccctcatcacagactatgctgttcagccacatgtgggcacgggggcagtgaaggtgactccagctcacagtcctgccgatgctgagatgggggcccgacatggcttgagccccttgaatgtcattgcggaggatgggaccatgacctccctctgcggggactggttgcagggtcttcaccggtttgtggcccgggaaaagataatgtctgtgctgagtgaacggggcctattccggggcctccagaaccaccccatggtactgcccatctgcagccgttctggggatgtgatagaatacctgctgaagaaccagtggtttgtccgctgccaggaaatgggggcccgagctgccaaggctgtggagtcgggggccctggagctcagtccctccttccaccagaagaactggcagcactggttttcccatattggggactggtgtgtctcccggcagctgtggtggggccatcagattccagcctacctggttgtagaggaccatgcgcagggagaagaggactgttgggtggttgggcggtcagaggctgaggccagagaggtagcagcggaactgacagggaggccaggggcagagctgaccctggagagggatcctgatgtcctagacacatggttttcttctgccctgttccccttttctgccctgggctggccccaagagaccccagaccttgctcgtttctaccccctgtcacttttggaaacgggcagcgaccttctgctgttctgggtgggccgcatggtcatgttggggacccagctcacagggcagctgcccttcagcaaggtgcttcttcatcccatggttcgggacaggcagggccggaagatgagcaagtccctggggaatgtgctggacccaagagacatcatcagtggggtggagatgcagttgctgcaggaaaagctgagaagcggaaatttggaccctgcagagctggccattgtggctgcagcacagaaaaaggactttcctcacgggatccctgagtgtgggacagatgccctgagattcacactctgctcccatggagttcaggcgggcgacttgcacctgtcagtctctgaggtccagagctgccgacatttctgcaacaagatctggaatgctcttcgctttatcctcaatgctttaggggagaaatttgtgccacagcctgctgaggagctgtctccctcctccccgatggatgcctggatcctgagccgccttgccctggctgcccaggagtgtgagcggggcttcctcacccgagagctctcgctcgtcactcatgccctgcaccacttctggcttcacaacctctgtgacgtctacctggaggctgtgaagcccgtgctgtggcactcgccccgccccctggggccccctcaggtcctgttctcctgcgctgacctcggcctccgcctcctggccccactgatgcccttcctggctgaagagctctggcagaggctgccccccaggcctggttgcccccctgcccccagcatctcggttgccccctaccctagcgcctgcagcttggagcactggcgccagccagagctggagcggcgcttctcccgggtccaagaggtcgtgcaggtgctaagggctctccgagccacgtaccagctcaccaaagcccggccccgagtgctgctgcagagctcagagcctggggaccagggcctcttcgaggccttcttggagcccctgggcaccctgggctactgtggggctgtgggcctgttacccccaggcacagcagctccctccggctgggcccaggctccactcagtgacacggctcaagtctacatggagctgcagggcctggtggacccgcagatccagctacctctgttagccgcccgaaggtacaagttgcagaagcagcttgatagcctcacagccaggaccccatcagaaggggaggcagggactcagaggcaacaaaagctttcttccctccagctggaattgtcaaaactggacaaggcagcctctcacctccggcagctgatggatgagcctccagccccagggagcccggagctctaactcatcatccccatcagttttcctccctctcagacctgtctttgaggacaaacagatttgtcagctgtcagggtgcagtgggacgtcagagactatgtggtccatcgccttcattgtgtaaatgaggacacagactggcttggtcgcagtgactgtggtgtccttgagatgctcacattactgcccggcctgcctcccacctggaagtctgggaatgaggagattgagataaacttttgaaatccc

SEQ ID NO: 4533 - DNA, 2291 bp, Homo sapiens
  source 1..2291: mol_type = genomic DNA
ggtgaaaggtgaggggaacagctgatccgtctgttgggaggacagatatctcaaggccaggatggaagaatcaccactaagccgggcaccatcccgtggtggagtcaactttctcaatgtagcccggacctacatccccaacaccaaggtggaatgtcactacacccttcccccaggcaccatgcccagtgccagtgactggattggcatcttcaaggtggaggctgcctgtgttcgggattaccacacatttgtgtggtcttccgtgcctgaaagtacaactgatggttcccccattcacaccagtgtccagttccaagccagctacctgcccaaaccaggagctcagctctaccagttccgatatgtgaaccgccagggccaggtgtgtgggcagagcccccctttccagttccgagagccaaggcccatggatgaactggtgaccctggaggaggctgatgggggctctgacatcctgctggttgtccccaaggcaactgtgttacagaaccagctcgatgagagccagcaagaacggaatgacctgatgcagctgaagctacagctggagggacaggtgacagagctgaggagccgagtgcaggagctcgagagggctctggcaactgccaggcaggagcacacggagctgatggaacagtacaaggggatttcccggtcccatggggagatcacagaagagagggacatcctgagccggcaacagggagaccatgtggcacgcatcctggagctagaggatgacatccagaccatcagtgagaaagtgctgacgaaggaagtggagctggacaggcttagagacacagtgaaggccctgactcgggaacaagagaagctccttgggcaactgaaagaagtacaagcagacaaggagcaaagtgaggctgagctccaagtggcacaacaggagaaccatcacttaaatttggacctgaaggaggcgaagagctggcaagaggagcagagtgctcaggctcagcgactgaaagacaaggtggcccagatgaaggacaccctaggccaggcccagcagcgggtggccgagctggagcccttgaaggagcagcttcgaggggcccaggagcttgcagcctcaagccagcagaaagccacccttcttggggaggagttggccagtgcagcagcagccagggaccgcaccatagccgaactacaccgcagccgcctggaagtggctgaagttaacggcaggctggctgagctcggtttgcacttgaaggaagaaaaatgccaatggagcaaggagcgggcagggctgctgcagagtgtggaggcagagaaggacaagatcctgaagctgagtgcagagatacttcgattggagaaggcagttcaggaggagaggacccaaaaccaagtgttcaagactgagctggcccgggagaaggattctagcctggtacagttgtcagaaagtaagcgggagctgacagagctgcggtcagccctgcgtgtgctccagaaggaaaaggagcagttacaggaggagaaacaggaattgctagagtacatgagaaagctagaggcccgcctggagaaggtggcagatgagaagtggaatgaggatgccaccacagaggatgaggaggccgctgtggggctgagctgcccggcagctctgacagactcagaggacgagtccccagaagacatgaggctcccaccctatggcctttgtgagcgtggagacccaggctcctctcctgctgggcctcgagaggcttctccccttgttgtcatcagccagccggctcccatttctcctcacctctctgggccagctgaggacagtagctctgactcggaggctgaagatgagaagtcagtcctgatggcagctgtgcagagtgggggtgaggaggccaacttactgcttcctgaactgggcagtgccttctatgacatggccagtggctttacagtgggtaccctgtcagaaaccagcactgggggccctgccacccccacatggaaggagtgtcctatctgtaaggagcgctttcctgctgagagtgacaaggatgccctggaggaccacatggatggacacttctttttcagcacccaggaccccttcacctttgagtgatcttactccctcgtacatgcacaaatacacactcatgcacacacacactcacacacatgcatacacttaggtttcatgcccattttctatcacactgggctccatgatattctgttccctaagaactgcttctgtgtgccctgttttcatccca

SEQ ID NO: 4534 - DNA, 565 bp, Homo sapiens
  source 1..565: mol_type = genomic DNA
gaatttgaatcctgtgggccgttgaatgtggctgctcgcggtcggcgtgccccgacgtacagcgggccgggaaaagtggcactgaggctctggaacttctgcccagctctccttgctaaaaaacattcccttcaatttaaaaaatgttcccgactcttaacaccccagttgagaactactgatcttagatgtattaaagtaaaatgaatgaaagtaaacctggtgactcacagaaccttgcttgtgttttctgtcgaaaacatgatgactgtcctaataaatacggagaaaagaaaactaaggagaaatggaatctcactgtacattactactgtttgttgatgtcaagtggaatttggcagagaggcaaagaagaagaaggagtttatggttttctaatagaagatatcaggaaggaagtgaatagagcttctaaactgaaatgctgtgtttgcaagaaaaatggtgcttcaattggatgtgttgcaccccgatgtaaacgaagttatcatttcccatgtggacttcagagagaatgtattttccagtttactggcaattttgc

SEQ ID NO: 4535 - DNA, 1010 bp, Homo sapiens
  source 1..1010: mol_type = genomic DNA
cagggtggcccttgggtagggtgaagatcccctgtctttatcctagttccacaccttggtgtgggttactgggtgcaggatgaactgtcgctcggaggtgctggaggtgtcggtggaggggcggcaggtggaggaggccatgctggctgtgctgcacacggtgcttctgcaccgcagcacaggcaagttccactacaagaaggagggcacctactccattggcaccgtgggcacccaggatgttgactgtgacttcatcgacttcacttatgtgcgtgtctcttctgaggaactggatcgtgccctgcgcaaggttgttggggagttcaaggatgcactgcgcaactctggtggcgatgggctggggcagatgtccttggagttctaccagaagaagaagtctcgctggccattctcagacgagtgcatcccatgggaagtgtggacggtcaaggtgcatgtggtagccctggccacggagcaggagcggcagatctgccgggagaaggtgggtgagaaactctgcgagaagatcatcaacatcgtggaggtgatgaatcggcatgagtacttgcccaagatgcccacacagtcggaggtggataacgtgtttgacacaggcttgcgggacgtgcagccctacctgtacaagatctccttccagatcactgatgccctgggcacctcagtcaccaccaccatgcgcaggctcatcaaagacacccttgccctctgagcgtcgctggatctctgggagctccttgatggctcccagaccttggcttttgggaattgcacttttgggcctttgggctctggaacctgctctgggtcattggtgagacttggaaggggcagcccccgctggcttcttggttttgtggttgccagcctcaggtcatccttttaatctttgctgacggttcagtcctgcctctactgtctctccatagccctggtggggtcccccttctttctccactgtacagaagagccaccactgggatggg

SEQ ID NO: 4536 - DNA, 2193 bp, Homo sapiens
  source 1..2193: mol_type = genomic DNA
gaaagatggatactatgatgctgaatgtgcggaatctgtttgagcagcttgtgcgccgggtggagattctcagtgaaggaaatgaagtccaatttatccagttggcgaaggactttgaggatttccgtaaaaagtggcagaggactgaccatgagctggggaaatacaaggatcttttgatgaaagcagagactgagcgaagtgctctggatgttaagctgaagcatgcacgtaatcaggtggatgtagagatcaaacggagacagagagctgaggctgactgcgaaaagctggaacgacagattcagctgattcgagagatgctcatgtgtgacacatctggcagcattcaactaagcgaggagcaaaaatcagctctggcttttctcaacagaggccaaccatccagcagcaatgctgggaacaaaagactatcaaccattgatgaatctggttccattttatcagatatcagctttgacaagactgatgaatcactggattgggactcttctttggtgaagactttcaaactgaagaagagagaaaagaggcgctctactagccgacagtttgttgatggtccccctggacctgtaaagaaaactcgttccattggctctgcagtagaccaggggaatgaatccatagttgcaaaaactacagtgactgttcccaatgatggcgggcccatcgaagctgtgtccactattgagactgtgccatattggaccaggagccgaaggaaaacaggtactttacaaccttggaacagtgactccaccctgaacagcaggcagctggagccaagaactgagacagacagtgtgggcacgccacagagtaatggagggatgcgcctgcatgactttgtttctaagacggttattaaacctgaatcctgtgttccatgtggaaagcggataaaatttggcaaattatctctgaagtgtcgagactgtcgtgtggtctctcatccagaatgtcgggaccgctgtccccttccctgcattcctaccctgataggaacacctgtcaagattggagagggaatgctggcagactttgtgtcccagacttctccaatgatcccctccattgttgtgcattgtgtaaatgagattgagcaaagaggtctgactgagacaggcctgtataggatctctggctgtgaccgcacagtaaaagagctgaaagagaaattcctcagagtgaaaactgtacccctcctcagcaaagtggatgatatccatgctatctgtagccttctaaaagactttcttcgaaacctcaaagaacctcttctgacctttcgccttaacagagcctttatggaagcagcagaaatcacagatgaagacaacagcatagctgccatgtaccaagctgttggtgaactgccccaggccaacagggacacattagctttcctcatgattcacttgcagagagtggctcagagtccacatactaaaatggatgttgccaatctggctaaagtctttggccctacaatagtggcccatgctgtgcccaatccagacccagtgacaatgttacaggacatcaagcgtcaacccaaggtggttgagcgcctgctttccttgcctctggagtattggagtcagttcatgatggtggagcaagagaacattgaccccctacatgtcattgaaaactcaaatgccttttcaacaccacagacaccagatattaaagtgagtttactgggacctgtgaccactcctgaacatcagcttctcaagactccttcatctagttccctgtcacagagagtccgttccaccctcaccaagaacactcctagatttgggagcaaaagcaagtctgccactaacctaggacgacaaggcaacttttttgcttctccaatgctcaagtgaagtcacatctgcctgttacttcccagcattgactgactataagaaaggacacatctgtactctgctctgcagcctcctgtactcattactacttttagcattctccaggcttttactcaagtttaattgtgcatgagggttttattaaaactatatatatctccccttccttctcctcaagtcacataatatcagcactttgtgctggtcattgttgggagcttttagatgagacatctttccaggggtagaagggttagtatggaattggttgtgattctttttgggg

SEQ ID NO: 4537 - DNA, 1134 bp, Homo sapiens; identical to SEQ ID NO: 1979
  source 1..1134: mol_type = genomic DNA

SEQ ID NO: 4538 - DNA, 1134 bp, Homo sapiens; identical to SEQ ID NO: 1979
  source 1..1134: mol_type = genomic DNA

SEQ ID NO: 4539 - DNA, 1029 bp, Homo sapiens; identical to SEQ ID NO: 4489
  source 1..1029: mol_type = genomic DNA

SEQ ID NO: 4540 - DNA, 1522 bp, Homo sapiens; identical to SEQ ID NO: 4483
  source 1..1522: mol_type = genomic DNA

SEQ ID NO: 4541 - DNA, 1716 bp, Homo sapiens
  source 1..1716: mol_type = genomic DNA
gaggtcgaggtaagagcgcggcgttggtggtttgcattttccgcagcgctcgcgaccgcccgctcggccccggcctcgcctcggagccccgcgagggctgcgcgctcgggccgattcctcgacagcgcccgcggcggcgagaaccaccgcagccatcctggtccgggagcgaccgccgcggcacccccaaccccgccagagcgggcaccaggaagcggggggaggggagcgaggagcctcccgggcggagatgcggcagctcccgcacctccgcaccccgggttggtgcctcggggccccgcagcgctttagggcggagaaccaagtttgtgtgggtgcttcttcctgggggccctcgggctgcgccaggtgtgagaccggaatgccaatttggggaatctctcctgttctttcctttttaattttttctacttgtccttgacaagggcctattcccactggatctgcaggtgactatttgctcttcctaggtcgccagtctttgatttcagctagtgaccctgggcgggaagacaccctgttcaccctcctcctgacctccgccccccacctcttcagccaactttatcttggatctctgctctctttatcttttctctagagctgggccagggcgctaactggaagcttggggttaaatggtgcaggaacgtagaggcggaggagtccctgggattttccacgtctatttccccacccccaccccagccgcaggggtccagtttggactgacccaacctcccgctttctctttgtaggcgatcagtgggtgaccgcggctgcgagggactttgtcatccgtcctccaggatctggggagaaagagccccatcccttctctctctgccaccatttcggacaccccgcagggactcgttttgggattcgcactgacttcaaggaaggacgcgaacccttctctgaccccagctcgggcggccacctgtctttgccgcggtgacccttctctcatgaccctgcggtgccttgagccctccgggaatggcggggaagggacgcggagccagtgggggaccgcggggtcggcggaggagccatccccgcaggcggcgcgtctggcgaaggccctgcgggagctcggtcagacaggatggtactggggaagtatgactgttaatgaagccaaagagaaattaaaagaggcaccagaaggaactttcttgattagagatagctcgcattcagactacctactaacaatatctgttaaaacatcagctggaccaactaatcttcgaatcgaataccaagacggaaaattcagattggactctatcatatgtgtcaaatccaagcttaaacaatttgacagtgtggttcatctgatcgactactatgttcagatgtgcaaggataagcggacaggtccagaagccccccggaacggcactgttcacctttatctgaccaaaccgctctacacgtcagcaccatctctgcagcatctctgtaggctcaccattaacaaatgtaccggtgccatctggggactgcctttaccaacaagactaaaagattacttggaagaatataaattccaggtataaatgtttctctttttttaaacatgtctcacatagagtatctccgaatgcagctatgtaaaagagaaccaaaacttgagtgctctggataactatatggaatgctttctaagaacagctgaagctaatc

SEQ ID NO: 4542 - DNA, 577 bp, Homo sapiens
  source 1..577: mol_type = genomic DNA
aacgaaggctgctgggttcatagggaggagggcagtttggggcccgagggcgaaagagtaggctcggggtgtctggagatagcacccataagagcggtcttgcaggcgccgggggcttgtgggcgcgtggattagggcggaggtatcagggatggcaggacaggtgccccgagaactggttgatctttgatcttagattctgcctgccttcttccccgtctcaattgtagccatcatgaccacccggcaagccacgaaggatcccctcctccggggtgtatctcctacccctagcaagattccggtacgctctcagaaacgcacgcctttccccactgttacatcgtgcgccgtggaccaggagaaccaagatccaaggagatgggtgcagaaaccaccgctcaatattcaacgccccctcgttgattcagcaggccccaggccgaaagccaggcaccaggcagagacatcacaaagattggtggggatcagtcagcctcggaaccccttggaagagctcaggcctagccctaggggtcaaaatgtggggcctgggccccctgcccagacagaggct

SEQ ID NO: 4543 - DNA, 1522 bp, Homo sapiens; identical to SEQ ID NO: 4483
  source 1..1522: mol_type = genomic DNA

SEQ ID NO: 4544 - DNA, 2718 bp, Homo sapiens
  source 1..2718: mol_type = genomic DNA
aaagtaattttctgaagggaagctgcagaatatggaaaacatatattggagctacatggatcatgtcaagttcagactgtaaggagtagatgcagtagtgaagctgtccatctcaggtgaattgaaaaagtaaagaactacaaaatgccatcattccctctctgtgttgatttctggtgaagctcagaggatgagtaagagatacttacagaaagcaacaaaaggaaaactgctaataataatatttattgtaaccttgtgggggaaagttgtatccagtgcaaaccatcataaagctcaccatgttaaaacgggaacttgtgaggtggtggcactccacagatgctgtaataagaacaagatagaagaacggtcacaaacagtcaagtgctcctgcttccctgggcaggtggcaggcaccacgcgagctgctccatcatgtgtggatgcttcaatagtggaacagaaatggtggtgccatatgcagccatgtctagagggagaagaatgtaaagttcttccggatcggaaaggatggagctgttcctctgggaataaagtcaaaacaactagggtaacccattaacccaggagaaatcaagtgatcctcaaggctgatgacattgaacatgcgcatagaaacttaactcaactcctgaggtgatcttgaagatttttataccacttgaaagaggcgctcaatagtctatttccaagggatttcatggcctcttcttgaaatcaagactttttaaaagtcagacatgaacttgcatgtcatgaagatttcagcagatttgaactgtgttcaacttgtaaattgttaaaagaatttgaagtcactgtctgaggagctggtgaagagttgtttttttcagggtgatgttagagacagtcaccttttgagttattggctccagatgtgactacttttcttgtttctgcaagctgtatcccaagtgcactgtccttctgtcctggatgtgttcctgggtcctatgttcatttgctagtgggactacacatggctttaatgacatttcctttgagaacttttcctctggcatggtgtagactgagacaattttatttatatcctaatcttggagctcagaaagcctacatgttttaacatcttaaagttgcttttgttaaaggaatggaaatatatatccattggtaataatgttggcaagtaatagttatctgaataaatcaatcatataagaatgtatagacaagctgacatatttccctaaggctaacaacaccctgctgaagctctttgtcaaataggtagtagttagaactggattgccattttcattatataatactttgtacctctagagcactctccctttctgtttttttttaagtgagcttttctttaattttttatgtttacttattcccttcacagaaatcagcagtgagcagtcaagttaatgggtagccttcagtttcaaaaaaattgacagggatgcatgtgagtttctgatttcttagcttgaacattattcacttagatttcttccagtattttttaaaaaactgtcctatctcattttaaaagactttcttttgcttgatcccaatgactgtttgaatgcttatatatttgttcaatctgttgatagaaaaaattgttcattttcctcagtctcaaatttataaatatttgcttacagttttcctattcaaacaatttgttaggccaatattttgtgacatttttgtagcgattttaacgtttatggttttggttctacaggaaagtcataaatatttaaaggccttaaacatgtatgtactttttttttctaagttatagaatgtataattttgtactacatttattttgtttcatttgtgatatgaagggagagaagaaagaaaagtgcatagccattctgtaacaatattgtgtaaacctatagtttgaaggaatgcaaggagaaggatttctgtgttttactcattttaggctgttcagaagatgcttcaaaaattgtcctgttagaatttccatcatggaaggtggtatggaagaaggtatggaaatactttgtattctaaaaactcactgacgtggtcagttagacatacgttggtttccaggatagaggcccatatatcctggggagctttggtctattagtttgtgacaatattcaaaggccaaaacactactcagacactttcctgggaagagcaactaaaaatgtaaaattggttaaaaataaaatctgaaaagtatgtatctcacattgaactaaaatccactgtctcataagttcatggaatgaaatggctttctgcctccattttaatcatgcataaaatgaattagatggctttgagtggattttcacaatggctcaagactatatgaaattataaaaaaaaagttgccctggggtttctgcatcaattagaatatcattaatttctttgtaaccaagtgaaaaactatactttttggaaattatgaatttgtcctaggtttgtttgagatttgaaattatacatcatgcttctcattttttaaactatgttctttaaatcaacactggaaactctgtattatatacaagtgtaatacatgcatataatagaaaaaaaacatggaatttcaaatatactaactagattatccccagtagattaatgttgtgactattcagaaaaggtgaataaaattgggatataaaatgg

SEQ ID NO: 4545 - DNA, 2840 bp, Homo sapiens
  source 1..2840: mol_type = genomic DNA
gagcttcccggctgctttgtttacctaagcaagcctgggcaatggcgggcgtccctcccccagcctcgttgccgccttgcagtttgatctcagactgctgtgctagcaatcagcgagattccgtgggcgtaggaccctctgagccaggtgtgggatatagtctcgtggtgcgccgtttcttaagccggtctgaaaagcgcaatattcggatgggagtgacccgattttccaggaactgaagttaaaagatgaagaatgtgagaggctttcaaaagtgcgagatcaacttggacaggaattggaagaactcacagctagtctatttgaggaagctcataaaatggtgagagaagcaaatatcaagcaggcaacagcagaaaaacagctaaaagaagcacaaggaaaaattgatgtacttcaagctgaagtagctgcattgaagacacttgtattgtccagttctccaacatcacctacgcaggagcctttgccaggtggaaagacaccttttaaaaaggggcatacaagaaataaaagcacaagcagtgctatgagtggcagtcatcaggacctcagtgtgatacagccaattgtaaaagactgcaaagaggctgacttatccttgtataatgaattccgattgtggaaggatgagcccacaatggacaggacgtgtcctttcttagacaaaatctaccaggaagatatctttccatgtttaacattctcaaaaagtgagttggcttcagctgttctggaggctgtggaaaacaatactctaagcattgaaccagtgggattacaacctatccggtttgtgaaagcttctgcagttgaatgcggaggaccaaaaaaatgtgctctcactggccagagtaagtcctgtaaacacagaattaaattaggggactcaagcaactattattatatttctcctttttgcagatacaggatcacttctgtatgtaacttttttacatacattcgatacattcagcagggactcgtgaaacagcaggatgttgatcagatgttttgggaggttatgcagttgagaaaagagatgtcattggcaaagctgggttatttcaaagaggaactctgatgctctgcgtgggaccatgcctgaactccccgaataactgaaaaatggctgaatatttttatggttacttgatatttatttccaaggagtgagcctaagacttttttccccttttgcaaattgctctaagaagtaccatgatttcttttaaactgatctatgctgtgtttgcttattctttagttgaacacactatgaagaattccaggtgtactagtgaatgtaatttatagttgccaaaaaaaaaaaaaacctgaaataaataaatgttagattgaatgtgtgtacattttctcttctagctctgacatggcatttagggttagcagaatgtattaaatagtaattttcaaactacacagtagcttccttccttgtgagaggcaagaaagaagtctgagtggatagtactcactttccaaggcccccacctctagaatggctttatttttatctgttttctatattgggtttcaaaaaagattttatttgaagaaatacttctgctgctacaaagtttgaaagttactattttaattattctgctctctgtaactgaaagaatccctttattttggttattcattaaaatataatagaaggcagtcagattttatcccagagatgtattcctgagtgtcttgatatagtgtattcatgttttatatgtgttgaccactatattgtcattggagggacatagatgtaaatgagtttgacgtgtgtcaaaggggtttaaaggggtgtggattgaatgaatggtacgtgcgaagtatatgctgattatagaaccacttgatctctgcattccaaattgtaaaactgactcaactggagaaattataacaaagaggtttgtggtagacatgtaataagtatagaaaagcaaaaagaaaagagaaactgctttagtttctgtttagagaaagctgctgttaatatttttggatagtagcctttcagctttcagatattttctacttacatatgcatatttttgaaacaaaaagtaggctttttttttgctttttaaacctaaacattaaatatattttcccttgggtaaacctacacatcctaatccctgtttatagaattttaacataatttaattgtgtttggagatgaggtggttttcagtttatttttcatattataatgctgtgacgagtatccttatctgtacacttctgaacattgtggagttctttcatgtggatgcctggagataaaattgtgtcgagatatatatgtatttttaaatgtttgatctgcattgctagattgccatccagaaaagttaatcaatttgtattcacagcagcagtgtacaagagggctggttttctgaagataacatttttttcagtcctgttcagaggtttggtcaatcttacctgtagatgacttcagccaccaggctggatgggagcccacagacaaaaggacattggtgtatgttatggtgaaaaccatcagtaccatgcctagctcaagaatgtgaaattgaacctgaaaaaaactttgaacctacaattttatgttctgaaaatagttattctaatgtgagggcattaataagaatatgtaccatcaaagcttcagaagattttccgtacaaactaaaatcacttttggagaaagtacctaaataaaaagagaaacaaatccaggagatactgtacggtttgaaagaaaggtaatcaaatactcagaaaaagtttgttgatgactt

SEQ ID NO: 4546 - DNA, 3377 bp, Homo sapiens
  source 1..3377: mol_type = genomic DNA
gccagctgctgcgcatgcgccggccggggccccgcccccatgcgccgcgcggctccagggccacgttccagggtcgggtttggtggattcctcagtccctgccgccgcggggcgccctgggatagcggcggggcctcctgtcacctgcagaatccattaaggcctggaggcctaaggagttagtattgtatgaaatccctacgaaacccggtgaaaagaaagatgtctctgggcccctgcctcctgcatacagcccccgatatgttgaggctgcctggtacccgtggtgggtacgagagggcttcttcaaaccagaatatcaggcccggctgccccaagctacaggggagaccttttccatgtgtatcccacctcccaatgtcactggctccctgcacattggccacgcactcacggtggccatacaggatgccctcgtgcgctggcaccggatgcgtggggatcaagtgctgtgggtccctggttcagatcatgcaggaattgctacacaagctgtggtggagaaacaactgtggaaggaacggggagtgaggagacatgagctgagccgggaggccttccttagggaggtgtggcagtggaaggaggcgaaaggtggagagatctgtgagcagctgcgagctctgggtgcctccctggactgggatcgagagtgttttaccatggatgttggctcctcagtggctgtgactgaagcttttgtgcggctctacaaggcggggttgctgtaccggaaccatcagcttgtcaactggtcatgtgctttaagatcagccatctcggacattgaggtggagaaccggcccctgcctggccacacacagcttcgactgcctggctgccccacccccgtgtcttttggcctcctattttctgttgccttccccgtggatggagagcctgatgcagaggttgtggtaggaaccacaaggccagagacgctgcctggagatgtggctgtggccgttcatccagacgactcgcgatacacacatctacacgggcgacagcttcgtcaccccttgatggggcagcctcttcccctcatcacagactatgctgttcagccacatgtgggcacgggggcagtgaaggtgactccagctcacagtcctgccgatgctgagatgggggcccgacatggcttgagccccttgaatgtcattgcggaggatgggaccatgacctccctctgcggggactggctgcagggtcttcaccggtttgtggcccgggaaaagataatgtctgtgctgagtgaatggggcctgttccggggcctccagaaccaccccatggtactgcccatctgcagccgttctggggatgtgatagaatacctgctgaagaaccagtggtttgtccgctgccaggaaatgggggcccgagctgccaaggctgtggagtcgggggccctggagctcagtccctccttccaccagaagaactggcagcactggttttcccatattggggactggtgtgtctcccggcagctgtggtggggccatcagattccagcctacctggttgtagaggaccatgcgcagggagaagaggactgttgggtggttgggcggtcagaggctgaggccagagaggtagcagcggaactgacagggaggccaggggcagagctgaccctggagagggatcctgatgtcctagacacatggttttcttctgccctgttccccttttctgccctgggctggccccaagagaccccagaccttgctcgtttctaccccctgtcacttttggaaacgggcagcgaccttctgctgttctgggtgggccgcatggtcatgttggggacccagctcacagggcagctgcccttcagcaaggtgcttcttcatcccatggttcgggacaggcagggccggaagatgagcaagtccctggggaatgtgctggacccaagagacatcatcagtggggtggagatgcaggtgctgcaggaaaagctgagaagcggaaatttggaccctgcagagctggccattgtggctgcagcacagaaaaaggactttcctcacgggatccctgagtgtgggacagatgccctgagattcacactctgctcccatggagttcaggcgggcgacttgcacctgtcagtctctgaggtccagagctgccgacatttctgcaacaagatctggaatgctcttcgctttatcctcaatgctttaggggagaaatttgtgccacagcctgctgaggagctgtctccctcctccccgatggatgcctggatcctgagccgccttgccctggctgcccaggagtgtgagcggggcttcctcacccgagagctctcgctcgtcactcatgccctgcaccacttctggcttcacaacctctgtgacgtctacctggaggctgtgaagcccgtgctgtggcactcgccccgccccctggggccccctcaggtcctgttctcctgcgctgacctcggcctccgcctcctggccccactgatgcccttcctggctgaagagctctggcagaggctgccccccaggcctggttgcccccctgcccccagcatctcggttgccccctaccccagcgcctgcagcttggagcactggcgccagccagagctggagcggcgcttctcccgggtccaagaggtcgtgcaggtgctaagggctctccgagccacgtaccagctcaccaaagcccggccccgagtgctgctgcagagctcagagcctggggaccagggcctcttcgaggccttcttggagcccctgggcaccctgggctactgtggggctgtgggcctgttacccccaggcgcagcagctccctccggctgggcccaggctccactcagtgacacggctcaagtctacatggagctgcagggcctggtggacccgcagatccagctacctctgttagccgcccgaaggtacaagttgcagaagcagcttgacagcctcacagccaggaccccatcagaaggggaggcagggactcagaggcaacaaaagctttcttccctccagctggaattgtcaaaactggacaaggcagcctctcacctccggcagctgatggatgagcctccagccccagggagcccggagctctaactcatcatccccatcagttttcctccctctcagacctgtctttgaggacaaacagatttgtcagctgtcagggtgcagtgggacgtcagagactatgtggtccatcgccttcattgtgtaaatgaggacacagactggcttggtcgcagtgactgtggtgtccttgagatgctcacattactgcccggcctgcctcccacctggaagtctgggaatgaggagattgagataaacttttgaaatccc

SEQ ID NO: 4547 - DNA, 5900 bp, Homo sapiens
  source 1..5900: mol_type = genomic DNA
gcggagtcgggaatcaaaacaaagggcctggggggggcggggggaaggcggcggggccggaatgtgagcggaggtggagccggcggcagagggtggaagaatgaaagaaaagaaagatgaaaggatgttgaatcactttgcatggctgtatgatggaaggaaacggaactgagaactcctgcagtagaacacgtggatggcttcaacaagataatgatgctaagccatggctttggaaattctctaattgcttttctcgtcctgagcagacgctgccacatagtccccaaacgaaagagtacatggagaacaagaaagttgctgtggaactaaaggatgtaccatcaccccttcatgctggctctaagctttttccagcagtcccacttcctgatattcgttctcttcagcagcctaaaatacagctttcttctgtccccaaagtaagctgctgtgctcattgccctaatgaaccctccacttcgccaatgcgttttggtggtggtggtggcggtagcggaggtaccagtagcttgattcacccgggcgcactgttagactcgcaaagcaccaggacaatcacgtgtcaggtagggtcagggtttgctttccagtctgcatcttcactccagaatgcctcagctaggaacaatttggcaggcattgcaagtgactttcccagcatgtgtctagagagtaacctgtcttcctgcaaacacctgccctgttgtggaaaactccacttccagtcatgtcatggtaatgtgcacaagctgcatcagtttccgagtctgcagggctgcacctccgctggctatttcccctgttctgatttcacaagcggggctccagggcatttggaagagcacatttcacagtcggagctaacgcctcacttgtgcaccaactctttgcaccttaatgtggtacctccggtttgtttaaagggctcactttactgcgaagactgtctaaacaagccagcaagaaatagcataatcgatgcggctaaagtctggccaaatataccacctccaaatactcaacctgcacctcttgctgtccctctgtgtaatggctgtggaaccaaaggaacagggaaggagaccacgttgttattggcgaccagtctaggcaaagctgcttcaaaatttgggtcaccagaagttgcagtagctggacaggtgctagaaaacttaccccccattggagttttttgggatattgaaaactgctccgttccctctggccggtcagcaactgctgttgtgcaaagaatccgtgagaagttttttaaaggccacagagaagcagaattcatctgtgtatgtgacatcagtaaagaaaacaaggaagttattcaagagctgaataattgccaggtaaccgttgcccacatcaatgctactgcaaagaatgccgctgatgataaactgcggcagagtctccgcagatttgcaaatacacacactgctccagccacagtggttcttgtgtcaactgatgtcaattttgcattggaacttagtgacctgagacacaggcatggtttccacattattttggtccataaaaaccaggcctcagaagcactgctgcatcatgctaacgagctgatcagatttgaagagttcatttccgacttgccccccaggttaccactaaaaatgccatgccacactctgctctatgtttataacctaccagcaaataaggatggcaagagcgtcagcaacaggctcagacgcctgtccgataattgtggtgggaaagtgctgagtatcacaggctgcagtgcaattctccgcttcataaaccaagatagtgcagagcgcgctcagaagcgaatggaaaacgaagatgtctttggtaataggatcattgtgtcatttactccaaaaaatagagaactctgtgaaacaaagagttcaaatgcaattgctgataaagtgaagtctcccaaaaaacttaagaatccaaaattgtgcctcatcaaagatgcaagtgaacaatcttccagtgccaaagccacgcctggaaaagggtcacaggcaaattctggatctgctacaaaaaatacaaatgttaaaagtttacaggagctgtgccgcatggagtcaaaaactggtcatagaaacagtgagcaccagcaaggtcacctgaggctggtcgtacccactcacggtaactcaagtgctgcagtgtcgacgccgaaaaactcgggggtggcagaacccgtttacaaaaccagtcagaaaaaggagaacctcagtgcccgaagtgttaccagttctcctgtagagaaaaaagataaagaggagactgtattccaagtgagttacccgtctgcttttagcaagttagttgcatccaggcaagtcagtcctctgctcgcatctcagtcttggtcttctagcaggagtatgtctccaaaccttttaaacagagcatccccgcttgctttcaacattgcaaattcgagcagcgaagccgactgcccagacccatttgcaaatggtgctgatgtccaagtcagcaacatagactacagattatcccggaaggagctgcagcagctcctgcaggaagcatttgccaggcatggcaaggtgaagagtgttgagctcagcccccatacagattatcaactcaaggctgttgtgcaaatggaaaacttacaagatgcgatcggtgcagtgaatagcctccacagatacaaaattggcagcaaaaagatcctggtctcacttgccaccggggctgccagcaaatcactctctttactgagtgcagaaacaatgtctgttcttcaggatgcccctgcctgttgcctgcctctgtttaaatttacagatatctatgaaaaaaagtttggacacaagttgaatgtgtcagatctatataaattaacagacacggtcgcaatccgtgaacaaggaaacggacggctggtgtgtctcctacccagcagtcaggcccgccagagccccttggggtcttcccagtcacacgacggctcctccacgaattgcagcccaattatatttgaagagttagaatatcacgagcctgtctgcagacagcattgttccaataaggatttcagcgaacatgaatttgatccagactcttacaagattccttttgtgattctttctttgaagacatttgcgccccaggttcacagtcttctccagacccacgagggcaccgtgcctttattgagctttccagattgttacattgcagagtttggcgatctagaagtagtgcaagaaaaccaaggaggtgttcccttagaacacttcattacctgtgttccaggtgtaaacattgccactgctcagaatggcatcaaagtggttaaatggattcacaacaagcccccgcctcccaacactgacccttggcttctgcgttcgaagagtcctgtaggtaacccccagctgatccagttcagtagagaagtgattgacttgctgaaaagccagccatcttgtgtcatacccatcagtcatttcatcccatcctatcaccatcattttgcaaagcagtgccgagtgtcagactacggatactccaagctgattgagttattagaagcagtgcctcatgtattgcagattcttggaatgggctccaaacgtctgctgacccttacccacagggcccaggtgaagcgctttactcaggatttactaaaacttctcaaatcccaggccagcaaacaggtcattgtgagagaattctcacaggcttatcactggtgtttctcaaaggactgggatgtcactgaatatggtgtttgtgagttgattgacatcgtatcagagattccagacacaaccatctgcttgtcccaacaagataatgaaatggtgatttgtatccccaaaagagaacgcactcaggatgaaatagaaaggacaaaacagttctccaaggatgtcgttgatttgctgcgtcaccaaccccatttccggatgccctttaataaatttatcccttcttaccatcaccactttggccggcagtgcaaacttgcgtactatgggtttaccaaactacttgaactttttgaagccatacctgatactttacaagtattggaatgtggagaagaaaagatccttactctgacagaggtggagcggttcaaagctctagctgcccagtttgttaaactccttcggtcccaaaaagataactgccttatgatgacagatctccttacagaatatgctaaaacttttggttatacatttcgtctccaagactatgatgtcagttccatttcggctttaactcagaaactctgccatgtcgtgaaggttgccgatatagaatctggcagacagattcagctgatcaaccgaaagtctctgcgatctctcactgcccagttgctggtattgttgatgtcttgggaaggaaccacccatctttctgttgaggagctcaagagacattacgaaagtacccacaacactccccttaacccctgtgaatatggattcatgaccttgaccgaactgctgaagagcctgccatacttggttgaggttttcactaatgataagatggaagaatgtgtgaagctcacaagtctgtatttgtttgcaaagaatgtgcggtctttacttcatacttaccactaccagcagattttccttcatgagttttccatggcctataccaagtatgtcggagaaactctgcagcccaagacctacggccacagcagcgtggaggagctcttgggagcaattccacaggtggtctggataaaaggacatggtcataagagaattgtagtgttaaaaaatgacatgaaaagtcgtttgagttcactcagtctctcccctgccaatcatgaaaaccagccctcggagggcgagcgcatcctggaggtgcccgaatcgcacacagcctcggaactcaagcttggagctgacggcagtgggcccagtcacacagagcaggagcttctccgcctgaccgacgactcccccgtcgacctcctgtgtgcgcctgtcccctcgtgcctgccgtcccctcagctgagaccagaccccgttatcctccaatctgctgatctcattcagtttgaggagcgccctcaagagccttctgaaattatgattttaaaccaagaagaaaaaatggagattccaataccaggaaagagcaaaactctgacctctgactccagctcgtcctgcatctcagcagctgtccccgtgcctccctgcccctcctcggaaacctccgagtcactgctcagcaaggaccccgtggaaagcccggccaaaaagcaacccaaaaatagagtcaaattggcagccaacttttccttagcacctataaccaagctttaactcccatttggaatatagaattaggatgggaaaacactgtctgattctgcacacaaaagtgggtttcaaaaatacatccttttctgtgtcatgaaaaccccccgaagccattgacttcatcttacctgtgttctatcatgtttttcttttccattgaacacagctttgagctgaagtctttcttttcttcttcctttttctttcttttttcaattatttgaagaacttgtggcatttgttaaagaatccttaatatattttaccaaatttttagtaactattatgaaatacaatggtgttccaaaagaagaaagcactaaaaactcaactagcaggaagcggttttgcttccattgagccacgtcggtggtgtcatcctacatgtagcataatagagtctctcagcctttgcttactggtgtttccgacagtattaacccagtgcgtggcatgtctttgaagcaaagcctgtcccgctagcctgtgtgttcacacaccaaaggagaagggtaggcgaggggt

SEQ ID NO: 4548 - DNA, 1029 bp, Homo sapiens
  source 1..1029: mol_type = genomic DNA
gttccagggtcgggtttggtggattcctcagtccctgccgccgcggggcgccctgggatagcggcggggcctcctgaacagatctcggcccctttccaaacactcctgatgcctcatttgcctctcgcctcttttcgaccaccattttgggggctgaggcactcacggggcctccccaggtttcactccgtttctacacagtcggagccccatggatctcccatctcccggaggaaccgtgaagccaaacagaagcgcctgcgagagaagcaggcgactctggaggctgagatagcaggggagagcaagtcacctgcagaatccattaaggcctggaggcctaaggagttagtattgtatgaaatccctacgaaacccggtgaaaagaaagatgtctctgggcccctgcctcctgcatacagcccccgatatgttgaggctgcctggtacccgtggtgggtacgagagggcttcttcaaaccagaatatcaggcccggctgccccaagctacaggggagaccttttccatgtgtatcccacctcccaatgtcactggctccctgcacattggccacgcactcacggtggccatacaggatgccctcgtgcgctggcaccggatgcgtggggatcaagtgctgtgggtccctggttcagatcatgcaggaattgctacacaagctgtggtggagaaacaactgtggaaggaacggggagtgaggagacatgagctgagccgggaggccttccttagggaggtgtggcagtggaaggaggcgaaaggtggagagatctgtgagcagctgcgagctctgggtgcctccctggactgggatcgagtgttttaccatggatgttggctcctcagtggctgtgactgaagcttttgtgcggctctacaaggcggggttgctgtaccggaaccatcagcttgtcaactggtcatgtgctttaagatcagccatctcggacattgaggtggagaaccggcccctgcctggccacacacagcttcgactgcctggctg

SEQ ID NO: 4549 - DNA, 1134 bp, Homo sapiens; identical to SEQ ID NO: 1979
  source 1..1134: mol_type = genomic DNA

SEQ ID NO: 4550 - DNA, 776 bp, Homo sapiens
  source 1..776: mol_type = genomic DNA
gcgttctcctccgtcctctctcggttccccttgattcctgcggggtccagggacccggacagcttggggacgtccgcagagcctgggttcgagttctttacccttatcatgaagttttccctcatccccagctccacttgctgggcagagttgttcttgcggaggctggcaacgcgtcagtcgcaggtggctttttctcaagtatattttccagtctgtttggaactcgggaaatgagaattttaattttgggattagatggagcaggaaaaaccacaattttgtacagattacaagtgggagaagttgttactactatacctaccattggatttaatgtagagacggtgacgtacaaaaaccttaaattccaagtctgggatttaggaggacagacaagtatcaggccatactggagatgttactattcaaacacagatgcagtcatttatgtagtagacagttgtgaccgagaccgaattggcatttccaaatcagagttagttgccatgttggaggaagaagagctgagaaaagccattttagtggtgtttgcaaataaacaggacatggaacaggccatgacttcctcagagatggcaaattcacttgggttacctgccttgaaggaccgaaaatggcagatattcaaaacgtcagcaaccaaaggcaccggccttgatgaggcaatggaatggttagttgaaacattaaaaagcagacagtaattcagtccattcttctcccctgaaatgaagactacatcacctctctcc

SEQ ID NO: 4551 - DNA, 539 bp, Homo sapiens
  source 1..539: mol_type = genomic DNA
aaactggcaaaattattatattaatcaataggcttgacttgaagaaccacattttcttgttggtcagtcacttgctaatgaactgacatgctctttcctatttgttttctgctccaagtgattggaggggctgttatattcaaagaaagatggatactatgatgctgaatgtgcggaatctgtttgagcagcttgtgcgccgggtggagattctcagtgaaggaaatgaagtccaatttatccagttggcgaaggactttgaggatttccgtaaaaagtggcagaggactgaccatgagctggggaaatacaaggatcttttgatgaaagcagagactgagcgaagtgctctggatgttaagctgaagcatgcacgtaatcaggtggatgtagagatcaaacggagacagagagctgaggctgactgcgaaaagctggaacgacagattcagctgattcgagagatgctcatgtgtgacacatctggcagcattcaactaagcgaggagcaaaaatcagctctggcttttctcaacaga

SEQ ID NO: 4552 - DNA, 530 bp, Homo sapiens
  source 1..530: mol_type = genomic DNA
aaaccggagctgtgggcgcggcgctgctctgccgttgggtgaggcgcggagcgaagtgaagggtggcccaggtggggccaggctgactgaatgtatctcctagctatggactaaataatacatggggggaaataaacaagtattcatgagggtgaaaatgtgacccagcaggaaaattacaactattttcaattgacgttgaataggatggatactatgatgctgaatgtgcggaatctgtttgagcagcttgtgcgccgggtggagattctcagtgaaggaaatgaagtccaatttatccagttggcgaaggactttgaggatttccgtaaaaagtggcagaggactgaccatgagctggggaaatacaaggatcttttgatgaaagcagagactgagcgaagtgctctggatgttaagctgaagcatgcacgtaatcaggtggatgtagagatcaaacggagacagagagctgaggctgactgcgaaaagctggaacgacagattcagctgattcgagagatgctcat

SEQ ID NO: 4553 - DNA, 932 bp, Homo sapiens
  source 1..932: mol_type = genomic DNA
gaggcgcggagcgaagtgaagggtggcccaggtggggccaggctgactgaaatggatactatgatgctgaatgtgcggaatctgtttgagcagcttgtgcgccgggtggagattctcagtgaaggaaatgaagtccaatttatccagttggcgaaggactttgaggatttccgtaaaaagtggcagaggactgaccatgagctggggaaatacaaggatcttttgatgaaagcagagactgagcgaagtgctctggatgttaagctgaagcatgcacgtaatcaggtggatgtagagatcaaacggagacagagagctgaggctgactgcgaaaagctggaacgacagattcagctgattcgagagatgctcatgtgtgacacatctggcagcattcaactaagcgaggagcaaaaatcagctctggcttttctcaacagaggccaaccatccagcagcaatgctgggaacaaaagactatcaaccattgatgaatctggttccattttatcagatatcagctttgacaagactgatgaatcactggattgggactcttctttggtgaagactttcaaactgaagaagagagaaaagaggcgctctactagccgacagtttgttgatggtccccctggacctgtaaagaaaactcgttccattggctctgcagtagaccaggggaatgaatccatagttgcaaaaactacagtgactgttcccaatgatggcgggcccatcgaagctgtgtccactattgagactgtgccatattggaccaggagccgaaggaaaacaggtactttacaaccttggaacagtgactccaccctgaacagcaggcagctggagccaagaactgagacagacagtgtgggcacgccacagagtaatggagggatgcgcctgcatgactttgtttctaagacggt

SEQ ID NO: 4554 - DNA, 1621 bp, Homo sapiens
  source 1..1621: mol_type = genomic DNA
aattttcagaagtttcgtatggggatggttttatataaattcaggtttttcccacaataataaatgtatttagtctcagtgctcaatagaagagatttctaatagaaaaggattcaaactgtgaaaccatttctcttttaatgtttcacattcctgttacagatttgttctcttgtgactctgttatccataatatggacagttcttgagtcctaacattgagaggttttcccttagtgcatagagggaatgagtattaattggagaagcttaaagtattgccactttagcactgaagattgggatgagaggaggtgaaacctcactagaaaaagggacaatgttagtgtggcccttcctgatcatgtttaagaaaagtcatgaaaatggtgaactagtgtttccaagcatattggaagggttgagtgtatactgtctgtcaaagacttccagcatttccaggtcctagagaggaacaagactggtaacctgcctatctgtatttttaagaacccaggaggaaagctttataatagaacattatttctgtgtttatgtataaggggttttttgtttttttaaagacaggatctcactccattgtccaggccaagtgcaatggcacgaacctcatagctcctggacttaagtgatctgcctgcctttgcctcctgagtagctgggactacaggcatgagcccccatgcctggctaagtttgtttttttgtttgtttgtttgtttgtttttgggggggggttgttttgttttttgtagagacgtagtcttgctttgttgccaggctagtctcaaactcctggcttcaagtgatcctcctgcctcagcctcccagagtgctaggattacagcacttggattcagcttcttcatttccaacatggaagaaacttacaccgactccctggaccctgagaagctattgcaatgcccctatgacaaaaaccatcaaatcagggcttgcaggtttccttatcatcttatcaagtgcagaaagaatcatcctgatgttgcaagcaaattggctacttgtcccttcaatgctcgccaccaggttcctcgagctgaaattagtcatcatatctcaagctgtgatgacagaagttgtattgagcaagatgttgtcaaccaaaccaggagccttagacaagagactctggctgagagcacttggcagtgccctccttgcgatgaagactgggataaagatttgtgggagcagaccagcaccccatttgtctggggcacaactcactactctgacaacaacagccctgcgagcaacatagttacagaacataagaataacctggcttcaggcatgcgagttcccaaatctctgccgtatgttctgccatggaaaaacaatggaaatgcacagtaactgaatacctatctcatcaaatgccagaccctagaagactgttgcttcttcttctaccagtgggttctcattttcctcctaatctaattatagaatggtaaactccctgtgactttccaaactgacaagcacacttttttcctccccccttgaatcctcatttaatgcaagaaccctcatactcagaagcttccaaataaacctttgatacagattgctt

SEQ ID NO: 4555 - DNA, 1898 bp, Homo sapiens
  source 1..1898: mol_type = genomic DNA
ctccgctgagctttcgccagtgcctgcggccctcggcggcctagtacacacgcacctgagtgagtggcaccagaggaccctctccatgtttagggacctcctgggcctcaggagcgtggcgcccgcccctgggcggactccccccatccgcgggcgcgaatggtccgggccgcgtccgcagtgctgctggctgctccctggttgctgggtgcaaagtgctgggttctgggtttctggattcgcgggccgttcacacgtagcctgtgccggctcctcgggtgagtccgtccgcgcgcggtgccccgggacggcctaggctgccgggggtccggggccccaggcattccgggctgcagattgacggggatcccggatgcaccgcgcgcccccgcgccctcaccgacgggtccagacctggtgggaagaaggtgcggggacgggtccctgaggatcccgatgcctacgagccaagatgctcagggagcctcggaagcagggcctggccggcagagcacacctgctgtcaccagggaccacaggcagcatgaagacccccgtggagctggccgtcagtgggatgcagaccctcggccttcagcaccgctgccgaggtggctaccgggtcaaggccaggacgtcatatgtggatgagactctgtttggcagcccagcaggcacccggcctaccccaccggacttcgatccgccctgggtggagaaggctaacagaaccagaggcgtgggcaaggaggcatcgaaggccttgggggcaaaggggagctgtgagaccaccccctcaaggggcagcacccccaccctcacaccaaggaagaagaacaaatacagacccatcagccacaccccgtcttactgtgatgagtcgctgtttggctcccgatctgaaggcgccagcttcggggccccgcggatggcgaagggggatgccgcaaagctccgtgctctcttgtggacgccaccacctacccccaggggtagccactcgccccgccccagggaggcaccactgcgagccattcacccagctggtccctccaagacagagccggggccagcggcagactcccagaagttatctatgggtgggttacactcttcacgccccctgaagcggggactttcccattccctcacccacctgaatgtccccagcactggtcatccagccaccagtgccccccacacaaatgggcctcaggatctcaggccttccacgtcaggggtgaccttccggagccccctggtgacttccagggctcgctcagttagcatttcagtgccatctaccccacgacgaggtggggccacccagaaaccaaagcccccttggaaatgatactctttcatcagggttgcctatggggccacggcgacaggtatggccccttgccagggtaggaggacattcatcacccagggaaccccaggtattaaagaagcccctgtgggggcagacagacatagcaggggtgggcagtgcctccctttatcctgacaatctctagtcgattcttgcctttttctcccgattgcggatttgggggccacctctaagatgcctctctccagccctgtctcaaccatactccaaattagtgccaacccaggggcctggcacctcccacatcatccattgtcttgctgccaagtgcgaataaacggcgtgattgccaacctggagggtcccctcttatcccttcaagccaagcttcctgctcaggattagtttccagctaagtctgcaagccctagaggagtttttccaggctgtctgtgaagcctggggaacacaacggcaactgggagatttgtgagtgaacactgtttcatcttaatatgcttctgaatttattttcatgtactaaatagatcagctcatc

SEQ ID NO: 4556 - DNA, 3609 bp, Homo sapiens; identical to SEQ ID NO: 4517
  source 1..3609: mol_type = genomic DNA

SEQ ID NO: 4557 - DNA, 675 bp, Homo sapiens
  source 1..675: mol_type = genomic DNA
agttgcatcttgggaattactgaataatctagtgactaattttgaattttaggactgaaaaattttttctcctttctgcctccctcccatccccaaattagctttctaaaaaggaagattagtgtgtttgagatgtcagccttgcttttgtgagctgatggatgctctgaagggacaagctcaatttgtttaagggaaatgtaccaagtcactgaaaatgtggtgaaaggtgcctaagcaagccttttttgtgtgctgctaagagactgggcaagatgctcagagcacagaaaactcatattttagtggcttttcttttttcatttttataaagacgcttattcaccttggagaaaaagggacctggtggccttagtctttcaggtggaacggtgtgcgacatgggaaagaaaaccaagcggacagctgacagttcttcttcagaggatgaggaggagtatgttgtggagaaggtgctagacaggcgcgtggttaagggacaagtggaatatctactgaagtggaaaggcttttctgaggagcacaatacttgggaacctgagaaaaacttggattgccctgagctaatttctgaatttatgaaaaagtataagaagatgaaggagggtgaaaataataaacccagggagaagtcagaaagtaacaagaggaaat

SEQ ID NO: 4558 - DNA, 581 bp, Homo sapiens; identical to SEQ ID NO: 1925
  source 1..581: mol_type = genomic DNA

SEQ ID NO: 4559 - DNA, 1134 bp, Homo sapiens; identical to SEQ ID NO: 1979
  source 1..1134: mol_type = genomic DNA

SEQ ID NO: 4560 - DNA, 2710 bp, Homo sapiens
  source 1..2710: mol_type = genomic DNA
gtaactctacggcctagcaaccgttgccaaggagctcgactctgggagcggtctagagcccgggcgcctcctggggggtggggaaacggtttcgtgaggagaatttgagttaaaattataagacctaattatgagtgatcaaattaaattcattatggacagtctcaataaggagccctttaggaagaactataatttaatcacgtttgattccttggagccaatgcaactattacaagttctcagtgatgttctggctgagattgacccaaagcaacttgtggatatcagagaggagatgccagagcagacagccaaacgaatgttgagccttcttggtattcttaagtacaaaccttcaggaaatgccacagatatgagtacttttcgtcagggtttggtgattggaagtaaacctgtaatttacccagtgctccactggcttcttcagaggactaatgaactgaagaaaagagcatatttagctcgttttttaataaaacttgaggtaccaagtgagtttcttcaggatgaaactgtggctgacaccaataaacagtatgaagagttaatggaagcctttaaaactttgcataaagaatatgagcagctcaagatatctggattttctacagcagaaataagaaaggatatcagtgcaatggaagaagaaaaggatcagctcattaagagagttgaacatttgaagaaaagggttgagacagctcagaatcatcaatggatgcttaaaatagcaaggcaacttcgagttgaaaaagagagagaagaatatcttgcacaacagaaacaggaacaaaagaatcagctatttcatgcagtgcaaagattgcaaagagtacaaaaccagctgaaaagcatgcgccaagctgcagcagatgcaaagcctgaaagtttaatgaagaggctagaggaggagataaaatttaatttatatatggtaactgaaaaatttcctaaagaattagaaaataagaaaaaggaattacattttttacaaaaagtagtttcagagccagctatgggccattctgatcttcttgaacttgaatctaaaataaatgaaataaacacagaaattaaccagttgattgaaaagaaaatgatgagaaatgagcccattgaaggcaaactctcactgtataggcaacaggcatctatcatttcccgtaaaaaagaagccaaagctgaggaacttcaggaggccaaggagaagttagccagcctagagagagaagcatcagtaaagagaaatcagacccgtgaatttgatggtactgaagttttaaagggagatgagttcaaacgatatgtcaataaacttcgaagcaagagtacagttttcaaaaagaagcatcagataatagctgaacttaaagctgaattcggtcttttgcagaggactgaagaacttcttaagcaacgtcatgaaaatattcaacaacaactgcaaactatggaggagaaaaagggtatatctggatatagttacacccaagaagagctagaaagagtatctgcactgaagagtgaagttgatgaaatgaaaggacgaacattggatgatatgtctgaaatggtgaaaaaactgtattcattggtatctgaaaagaagtcagctcttgcctcagttataaaagagctacgacagttgcgtcaaaaatatcaagaactgacccaggagtgtgatgaaaagaaatcccagtatgatagctgtgcagcaggcctcgaaagcaatcggtccaaattagaacaggaagttagaagactccgtgaagaatgtcttcaagaagaaagtagataccattatacaaattgtatgattaagaacctagaagttcaacttcgtcgtgctactgatgagatgaaggcatatatctcttctgatcaacaagaaaaaagaaaggcaattagggaacagtataccaaaaatactgctgaacaagaaaaccttggaaagaaacttcgggaaaaacaaaaagttatacgagaaagtcatggtccaaatatgaaacaagcaaaaatgtggcgtgatttggaacaattaatggaatgtaagaaacagtgctttctgaaacaacaaagccaaacttccattggtcaggtaattcaggagggtggggaggaccggctaatactgtgaattcttgtgtcatcgtttggggttttacttgataccactagctataagcctaatctcataatgtatttcttttttgaaactgatttgtatagcattttgttttcagaagagccattctttattaagttttcatagaaaataatgttaaggtagatttagtttgaatgttttttcatatgaaaaagaggcttttattcttttccatagtttagacatcactggcgtcttctgagttttatgagacaggaaactaagtttactatctgtaaatgtaaacatatgtccattaagaaacatgtagtttttttttagaatgtaataacccagtggcttactgtttttcttaatctcttttaaaaaaactttagaagaatcttttaggaactaatatctcttgttctgaagaaacatttatctgacgttcagcagttcctacagttttacttcagtttatttttcttctgtaaaatgcaagaaaatttaatattttgactaacatgtcttttctgtttgtatcatttaaaggcaaataaacttggtacgtatttc

SEQ ID NO: 4561 - DNA, 563 bp, Homo sapiens
  source 1..563: mol_type = genomic DNA
gtacgtcacaccgtagagggacggcgcgggaggaataaatttctctgtgattggttggtgaaggttttcaaaccggagctgtgggcgcggcgctgctctgccgttggaaagatggatactatgatgctgaatgtgcggaatctgtttgagcagcttgtgcgccgggtggagattctcagtgaaggaaatgaagtccaatttatccagttggcgaaggactttgaggatttccgtaaaaagtggcagaggactgaccatgagctggggaaatacaaggatcttttgatgaaagcagagactgagcgaagtgctctggatgttaagctgaagcatgcacgtaatcaggtggatgtagagatcaaacggagacagagagctgaggctgactgcgaaaagctggaacgacagattcagctgattcgagagatgctcatgtgtgacacatctggcagcattcaactaagcgaggagcaaaaatcagctctggcttttctcaacagaggccaaccatccagcagcaatgctgggaacaaaagactatcaaccattgatgaatctggttc

SEQ ID NO: 4562 - DNA, 1522 bp, Homo sapiens; identical to SEQ ID NO: 4483
  source 1..1522: mol_type = genomic DNA

SEQ ID NO: 4563 - DNA, 2674 bp, Homo sapiens
  source 1..2674: mol_type = genomic DNA
tgtttacctaagcaagcctgggcaatggcgggcgtccctcccccagcctcgttgccgccttgcagtttgatctcagactgctgtgctagcaatcagcgagattccgtgggcgtaggaccctctgagccaggaactgaagttaaaagatgaagaatgtgagaggctttcaaaagtgcgagatcaacttggacaggaattggaagaactcacagctagtctatttgaggaagctcataaaatggtgagagaagcaaatatcaagcaggcaacagcagaaaaacagctaaaagaagcacaaggaaaaattgatgtacttcaagctgaagtagctgcattgaagacacttgtattgtccagttctccaacatcacctacgcaggagcctttgccaggtggaaagacaccttttaaaaaggggcatacaagaaataaaagcacaagcagtgctatgagtggcagtcatcaggacctcagtgtgatacagccaattgtaaaagactgcaaagaggctgacttatccttgtataatgaattccgattgtggaaggatgagcccacaatggacaggacgtgtcctttcttagacaaaatctaccaggaagatatctttccatgtttaacattctcaaaaagtgagttggcttcagctgttctggaggctgtggaaaacaatactctaagcattgaaccagtgggattacaacctatccggtttgtgaaagcttctgcagttgaatgcggaggaccaaaaaaatgtgctctcactggccagagtaagtcctgtaaacacagaattaaattaggggactcaagcaactattattatatttctcctttttgcagatacaggatcacttctgtatgtaacttttttacatacattcgatacattcagcagggactcgtgaaacagcaggatgttgatcagatgttttgggaggttatgcagttgagaaaagagatgtcattggcaaagctgggttatttcaaagaggaactctgatgctctgcgtgggaccatgcctgaactccccgaataactgaaaaatggctgaatatttttatggttacttgatatttatttccaaggagtgagcctaagacttttttccccttttgcaaattgctctaagaagtaccatgatttcttttaaactgatctatgctgtgtttgcttattctttagttgaacacactatgaagaattccaggtgtactagtgaatgtaatttatagttgccaaaaaaaaaaaaaacctgaaataaataaatgttagattgaatgtgtgtacattttctcttctagctctgacatggcatttagggttagcagaatgtattaaatagtaattttcaaactacacagtagcttccttccttgtgagaggcaagaaagaagtctgagtggatagtactcactttccaaggcccccacctctagaatggctttatttttatctgttttctatattgggtttcaaaaaagattttatttgaagaaatacttctgctgctacaaagtttgaaagttactattttaattattctgctctctgtaactgaaagaatccctttattttggttattcattaaaatataatagaaggcagtcagattttatcccagagatgtattcctgagtgtcttgatatagtgtattcatgttttatatgtgttgaccactatattgtcattggagggacatagatgtaaatgagtttgacgtgtgtcaaaggggtttaaaggggtgtggattgaatgaatggtacgtgcgaagtatatgctgattatagaaccacttgatctctgcattccaaattgtaaaactgactcaactggagaaattataacaaagaggtttgtggtagacatgtaataagtatagaaaagcaaaaagaaaagagaaactgctttagtttctgtttagagaaagctgctgttaatatttttggatagtagcctttcagctttcagatattttctacttacatatgcatatttttgaaacaaaaagtaggctttttttttgctttttaaacctaaacattaaatatattttcccttgggtaaacctacacatcctaatccctgtttatagaattttaacataatttaattgtgtttggagatgaggtggttttcagtttatttttcatattataatgctgtgacgagtatccttatctgtacacttctgaacattgtggagttctttcatgtggatgcctggagataaaattgtgtcgagatatatatgtatttttaaatgtttgatctgcattgctagattgccatccagaaaagttaatcaatttgtattcacagcagcagtgtacaagagggctggttttctgaagataacatttttttcagtcctgttcagaggtttggtcaatcttacctgtagatgacttcagccaccaggctggatgggagcccacagacaaaaggacattggtgtatgttatggtgaaaaccatcagtaccatgcctagctcaagaatgtgaaattgaacctgaaaaaaactttgaacctacaattttatgttctgaaaatagttattctaatgtgagggcattaataagaatatgtaccatcaaagcttcagaagattttccgtacaaactaaaatcacttttggagaaagtacctaaataaaaagagaaacaaatcc

SEQ ID NO: 4564 - DNA, 1522 bp, Homo sapiens; identical to SEQ ID NO: 4483
  source 1..1522: mol_type = genomic DNA

SEQ ID NO: 4565 - DNA, 2586 bp, Homo sapiens
  source 1..2586: mol_type = genomic DNA
ccttccaggacaccgtcgccttcccggccgcgtcggagtccggcggcgacctgcctctgaaacatggcaggctcggatgctgagtgggtaaccattgccaataaccttctttttaagtgtcatatacatctgagaatacatgaacttcaagactgtgatgctaatgtttttattgctctttatcagtctattttgggagaaaaggtaccagacctcatagttattcctaggagtcaagaagatgatgcacacaatgtacaagcagtaattgattcactggccttggactacttgcaggtcagcttgtctcacataacaggagaaaatatagtgaaaggagataaagaatctattaagaatctcctggaaatatttgatggtttgttggagtatcttacagaacgcatcagtgaaacatctcatgagaaaagtgctccttgtcttctgagatgttgggcccctcttgggatggagatgaagcagaatccactggtgaaatcattagacttggagacacagcacacaccttttctctaagaagtaatggtgctcaatgtcctaatgaaatgctgtctaaaaaagccttagcctcaccaagttctaaatcacatgaagatatgttgtaccctcctagtgttttgtccaagagtaggacatcctttgttgaagacacggaaaccctttctgtgagtgggattccaaatgctaggaagctaggggagcctatccgagcagctattcctttacatccaccctaccacccttcagagcctcgagcaccctgccccataggaaaagaatacttgcattcaagtcactgctccccagccgtaaattctactggagagcatacggaattttctggggatctagatgatggacttttcttaatttccaagttgcctaaaggcagcaaatgggaagtatatccagctcaggtccaagggcctaggacaaggaagcctcccaaaggaaaaagaaatgaaaacagagctacagcctcatcctgcaattcacctttcccccagaggccaagaaagagattaacagaacaagaattacatgatgtatcagaaaaactctctcagcggctttctgaactagattggatgttaaaaagtgctctgggtgatcggattaaagaaaagactgaccataaagaagaaaatactggaaatgaggaggtagaggatggaactgaggagacactgtctcagcacagtgatggcatcgtggagtatgggccaaagaagtcaaggccaggactttccatgcgtagaaagccaccctacagatcccattcgctctctccatctccagttaacaaacacaaacagttccacttggagagaaaaaggcagcgcaagccaagagaaacagatgtccgccaattccaagcacaggcgtttactgaagcatttgaaagggaactaagaagacataaagttcaagagaatattggacctctaagaatacatgagaaggaggaggaaacagaaaaaatatacagaggagaagctgttcgtaaaggaactccagaatgtagtcagccctggaagatttactctagaaaaaccacaacgcagagtctaagaggtggcctcccaaagccaaataaagcagttccaatgaaagtaagtgaacacagtctcctgccccttatgctggagcagtttccgtttctttatgtttctggcccaacactaagcaaaatgtggaaacagcaaattgcacaggttgaacagcttaagaaagaagcatgtagagaaaatcgatcaaagaagaaactccaagatgaaatagaagaagccctaagaaggcatgacctccttactacccttgtcaagaaagaatatgaacataacaagagactgcaagacttcaaggactgcattcgtaggcaaaggttgacccaatcaaagataaaagaaaatcgacagcaaatcgttcgtgctcgaaaatattatgatgattatagagttcagttgtgtgcaaaaatgatgagaatgaggacccgggaagaaatgatatttaagaaactgtttgaagaaggtttaaacattcaaaagcaaagattacgagacctaagaaactatgccaaagaaaagcgagatgaacaaaggagacgccaccaggatgaactggactccatggagaactactataaggaccagttttcattgctggcagaagccatatcacaggaacatcaagaacttaaagccagagagaaatctcaggcccagacattacataaggtgaagagggagctgagatctaagatggagaaggaaattcagcagctgcaggacatgataacacagaatgatgatgatgttttcttccgggaactggaagctgagcgcttcagatctcggcttcagctggcttcctttcagtacagtaaaagtccctccctatgaggccagacttgataatagtaggtgaaggttctggaggcctttaccaggacagagctagaatcgagccagtaaacagtctaagccagaaaaataattttcaaatgctttacctgtattttcattccagtactttttatgattttttaaataaaaattgttttct

SEQ ID NO: 4566 - DNA, 609 bp, Homo sapiens
  source 1..609: mol_type = genomic DNA
gggcagcgcgcgaggaccaggccgaggaggaagtggcggcggcggcggcggactcggcctgtgggcgatttcctccggacccaggctccccgcccgaggaggaagatgcagacctttctgaaagggaagagagttggctactggctgagcgagaagaaaatcaagaagctgaatttccaggccttcgccgagctgtgcaggaagcgagggatggaggttgtgcagctgaaccttagccggccgatcgaggagcagggccccctggacgtcatcatccacaagctgactgacgtcatccttgaagccgaccagaatgatagccagtccctggagctggtgcacaggttccaggagtacatcgatgcccaccctgagaccatcgtcctggacccgctccctgccatcagaaccctgcttgaccgctccaagtcctatgagctcatccggaagattgaggcctacatggaagacgacaggatctgctcgccacccttcatggagctcacgagcctgtgcggggatgacaccatgcggctgctggagaagaacggcttgactttcccattcatttgcaaaaccagagtggctcatggcaccaactctcacgag

SEQ ID NO: 4567 - DNA, 3796 bp, Homo sapiens
  source 1..3796: mol_type = genomic DNA
agagagagaagcaggaccgtggggtgggagagggtgtcaggaggccggacgtcgcagccggggcctcgcagtgcttttggggacgtctggtgctggggcccggcctggagactaagggaattcggggcactgggggcgtttgctggaccagcgctctcgacggttgcgcacgccagccagctctcagtgttgaggattcggaggccctgccggtcccccgcgagtaaaccttgtttatacgcatcctccgtggctttttttaaacccgtagtttattatttccaccaattcggctcgaatgctgaaattttaacagtagttaaatctcactgtgaaggcgttgccacgtttaaacaaatctcttttaatgaaagatggaaggttggggcgggtttagaatgaaaagatgctctacgtggctccgcgttcctcctgagagagatacccgggcaaccttgattaactctggactgcagggaagtgacagtctttgaaatgcctgagtgggatttaaactgaaattcgagtgtcctttgtatttaaaacccggatatttttctttcacggttgacatttttcatgtaccgcaaaaatccgagactcctatttaaaccggctgtggtaacagcggtggtgattaactagggtcttagtttgcaaacaatagggataaggtttagttccaccgccctgccttttcgcctccctcattcattggccaactgggttattatggagtctttttggaagtaatccactaatgctttgagcatctgtttctttgggttttattgttttgggcttttttttttttaatttttaatgatgaactatctgaaatatggaactctgtctaacccagtagtaaagtcatgccttctggaatggtttaaaagtgtgccataaatgtaaactataaatgggaactttaaatgtgtacaagttttacatctttattaaaaatcgtcagttttgtgtagcttaatacgaaaagatattttaagttccttttaaggttttaacaccaggatattgtaccatttaaatgtataaatatatttttaaaagtaggacttcataataatcagaataaaaacattccttcatccagtgctggctattccagcacccccattcttcctgctattgaacttttaagtgttagccaggaagaatagacttaaatactcggtgtttaggatagttaaaatatgagcatttttcatatagtgtctttgtaacagagacattggctatacttctctaagcctttctgctcatttcatatgtgctgtcaacaaatggtaatttttaaaaattgatcgctatatcctaatctctttatttttttctacctgaattattttcattggatttttgctctttcttaaatcagtgagtttcagaatttattgtgtatacactaccttgaaggatttgttcaacaatgctgattcctgcacttcagatctcagattctgaatcagtaggtctggaggatggcattgaacagtctgcatatttaactgaaagtaaaatgaatgaaagtaaacctggtgactcacagaaccttgcttgtgttttctgtcgaaaacatgatgactgtcctaataaatacggagaaaagaaaactaaggagaaatggaatctcactgtacattactactgtttgttgatgtcaagtggaatttggcagagaggcaaagaagaagaaggagtttatggttttctaatagaagatatcaggaaggaagtgaatagagcttctaaactgaaatgctgtgtttgcaagaaaaatggtgcttcaattggatgtgttgcaccccgatgtaaacgaagttatcatttcccatgtggacttcagagagaatgtattttccagtttactggcaattttgcgtcattttgttgggaccatcgacctgttcaaataattacatctaataattatagagagtccttaccatgcaccatttgcttggaatttattgagcctattccaagttataacatattacgaagtccttgttgtaagaacgcttggtttcatagagactgtttacaggttcaagcaataaatgcgggagtgtttttctttaggtgtacaatatgcaataatagtgacatctttcagaaagagatgttgagaatgggaattcatattcctgaaaaagatgcttcctgggaattagaggaaaacgcttatcaagagcttctgcagcactatgagcgttgtgatgttcgaagatgtcgttgcaaagaagggcgagactataatgcacctgatagcaaatgggaaataaagcgctgtcagtgttgtggttccagtggcacacatttagcctgctcctcattacggtcatgggagcaaaattgggagtgtttggaatgtaggggtattatctacaattcaggagagttccaaaaagccaaaaaacatgtattacccaattctaataatgtggggattacagattgtttgttggaagagtcatcacctaaattacccagacagtcacctggatcccagagtaaagatctactgaggcaaggcagcaaatttagaagaaatgtatcaacactattaatagagttaggattccaaattaaaaaaaaaactaaaagattgtatatcaacaaagccaatatctggaatagtgccttagatgcattcagaaatcgaaactttaatccttcatatgcaattgaagtagcatatgttattgaaaatgataattttggaagtgagcatcctggatcaaagcaagaatttctgagtctcttaatgcaacatcttgagaactcatcattgtttgaagggtccttgtcaaagaacttgtctctaaattctcaagctctgaaagagaatctttactatgaagctggcaaaatgcttgccatttctttagttcacggtggtccttcacctggtttcttttctaaaaccttgtttaactgccttgtttatggaccagaaaatacccagccaattttagatgatgtttcagactttgatgtggcacagattataatcaggataaatactgcaacaactgtagctgacttaaagtcaataataaatgaatgctataactaccttgagttaattggatgtctcagacttataacgacattaagtgataaatatatgttagtaaaagacatacttggctaccatgtaattcagagagtccacacaccctttgaaagttttaagcagggtctgaaaacccttggtgttttggagaaaattcaggcttatccagaagcattttgtagcatcctgtgtcataaacctgagagtctttctgcaaaaatccttagtgagctttttacagtacacacattacctgatgtgaaagctttggggttttggaacagttacttacaggctgttgaagatggtaaatctacaacaacaatggaagacattcttatttttgcaactggttgcagttccattcctccagctggatttaaacccactccttcaattgagtgtctgcatgtggattttcctgttggaaacaagtgtaataactgtttagcaattcccatcaccaatacatataaagagtttcaagaaaatatggacttcaccataagaaacactctaagactagaaaaggaagaaagttctcattacattggacattaaaatgtttccttgaacaaagagaagcttctttaaaagctgctattgataactctcttttatttcactaaccttttcatcatcactttgaacaaactagttagcttcttgacctaataaaatttatgatatgaatataaa

SEQ ID NO: 4568 - DNA, 6306 bp, Homo sapiens
  source 1..6306: mol_type = genomic DNA
cgcagcttgttggctcgctatataaaggagagaagcgggcggaccggacggctggagctgcagccggtggcggcagcggcggcgcagggagcggtgaccggtggtggtttccctccttggcgcggggtggggagcgggcaacgccccccggacccctgaagggtcgtggctttttttttttttttaaggcgattctcgaggttttcagctgcgggaggagtgcccccctcctcctcctctctccgctctcccctactccttcaggattgattttgtttaaaattttttccccaatcttgcggtgatttgggtcaccctccgggtgttatagtttttttttttttggttttgtttttatcttgttttcttggggttgccccctcttgtttgtgttgtgtgtggaaatggcgaactcggcaaatacaaacaccgtgcctaaattatacagatctgtgattgaagatgtcattaatgatgtgagagacatctttctggatgatggagtggatgaacaagtactgatggaactaaaaactttatgggaaaacaaactaatgcagtccagggcagtagatggatttcattcagaagagcagcagcttctactgcaagttcaacagcagcatcaaccccagcagcagcagcatcaccaccatcaccatcatcagcaagctcagcctcagcagacagtacctcagcaagcgcagacccagcaggttcttattcctgcatcacagcaagccacagcaccacaagttattgttccagattctaagttgatacagcatatgaatgcatcaaacatgagtgctgctgctacagctgctaccttagcactccctgcaggtgtgactcctgttcagcagatattaacaaattcaggccagcttcttcaggtggtcagagcagccaatggtgcccaatatatctttcagcctcagcagtcagtggttctacaacaacaggttataccacaaatgcagcctggtggagtacaagctcctgttatacagcaggtgctggctcctcttcctggagggatttcaccacagacaggtgtcatcatccagcctcagcaaatcttatttacaggaaataagactcaagttatacctacgacagtggcagcacctacaccagcccaagcacagataactgcaactggccagcagcaaccgcaggcccagcctgctcaaacacaagctccattggtcttacaagttgatggaactggggatacatcatctgaagaagatgaagatgaagaagaagactatgatgatgatgaggaggaagacaaagagaaagatggagctgaagatgggcaggtggaagaagagcccctcaatagtgaagatgatgtgagtgatgaggaaggacaggaactctttgacacagaaaatgttgttgtatgccaatatgataagatacacagaagtaaaaacaaatggaaatttcatctcaaggatggcattatgaatcttaatggaagagattatatattttccaaagccattggagatgcagaatggtgaagagttgctttttttcttttataaataaaagaaacttaaaaaaaatgtaaagcggacagtttgaaacttggggcatatgccaaccaaaacttcgtttctgcatgtcagaaaagtgcagtagaagcaaagctactggaacaaagatagaccttgacaacatagacactacttactggcaagccatggaactgtagcacctagggtttttgggtgggagggttggggttttgtgtaggaaaaccataattgttgattttaaatacaggtacctgccaccggtaattagcatgtaaagctttgtctatattccttcctccaacttgggttcaatcagaagatacttgttggaatgaactgaagaaacttcccttttgatagattgaactgaaactgcttattgtatgtggttatatttggtaaaagttgcgtgtgagctttttacaaaagggtaagaattgtgttgaattttaattcacttgtataagaaaacaatttaaaactctcataataggtcttaaatatttttacttgctattctccctcagtgatatatacctcttcctttccagctttatgaaacatctatttaagatttaaagttatcagtgatcatagtttggagataaaatttgacccaggaatgaatatttattttaattaggttttcatacttattaaatgtaattaaagacttgggtcttgtctgagttcagtggaattgaaaccacaactttaatttccttacagaaaaacttaatttgtttcttttagtgccacaccttaaaaagaaaccccaaactagctcctcaggaatatagttttattttgcaagcataccatctagctgaaattgtatacacatgaatatatgtagacttttcctgttgggctgaagtgtgtgcttataaatgtgtttagtttttaagctaaacattcagttaacagtctgtgcattgattagcatagggcaggtggtgaggacctggatttttattaaacagtttagtaattataaaagtttcttgtgtttactagtaaagaattttaaaaatctattctaattcaacaagtttttaaaatcaactttgtaatttgaggggaaaatttggggggaagaggtgggtgggccactaagttacctctctttcatttggtggcccttccaggccattgaaaataaagacgttggctccagtttgcacattgggaagaaagcatagaaatttgacttgtatattaaaaataatagaaatgtaatatgtatattaagaatgcataggtctgtattctgtaaggggctctgaagaacaatatggcactgctgtgttcagtgtgaattcactgcctgggagaactgcaggaatgcttgtcttcaccattgtgttcttacaacgaattcaactttccatggtttatcttgacaaaatttacatgtgtttaggttacttgtatattgatatatttttttaatcttcagtttttgtcttccttttgcctttgtgttttcagaagtaacacatgaacactttttaaagtacattacagagaagaaaactgtgagctattatatagtgtttcttttttaacacaaatcttttaactttaaaaaaaggcaaaaattttttttttctacttcccacccagcttaccaccttgatctctttaacttatgttctaaactttggtgttaatggtggtgtctagcatgctagtagttagattttatttagatgccataactggtaatacagcttttattttgactatattaatttagttttttgaggggaagtttgtttattctgtgactctcaaagcacacagaggttttaaaatatatattattaagactgagagaagaggaaatgggagggagtaacatcacagaagtgctgttgttcaactgttcttcaatatagttgctagtaggtttgtatttactcagtaaggaagtcagtgacctgaactacctataaaaattcagcagtgctgcagtgttgcttaagtgaaaccctttggctatctagtagtttttatgctactgaaacttggattactgtatgatattcagcttgtcttgggccctctatgtagacaaacattcatattcatagtagtgttgtatactggcctgtttttataactttatttttcaaatattaacaaccactgctttcagagtggttattttgttatttttgaagcaggaaataaccatttgtatttgcacctgcgtattgcatatgaattatggtatacttggcaaatgcttttcttttacctgtgaaaattctgaaagctggtccaagctacattgcataccaaattgtgctcttatatattatttgcatcgtgtcctttttaatcaaatagcatgttttagttttattatagtagcttttgctgtaagaatgtcacttgcttatcttttattgtacttgaattcttaatcatgcttttaacattgtatttaacaaatcatttcgtattaggttccattaaaatgtcattcctttgaaaaggcaagggatttccactttcagaatttgaaaatgaaagtagcatgtttatctaaaggcagaaaatagttcggacttggtattatgaaaataagtaatggtttctggagaggatttgtttagatttgcacagatggcgatggcaccttttacttaaattaacattaatcaacagtgctaaggaaaatttacacaaaattacaagataaaacatggaaatgtgtgcctttcagtatacaaactcttgcttggtggccatttgggtaatcagaccatttgaatgcctgagagcatgtttaatttctgtggagtgccacatatggctaaaacaactctttaatgtgcaattaatttctagagtaaaatgtctgttatgtgagggggatctttatgttgggcttttctattttttaaatgttcacatttctttctgttaattaaaatgccatcataatgtcacatttacactgttgcctcttttaaaagcaaagccactttcttgttctaagattacatcaagacttgagcagtgtgtagtaattaaaatgtgtgcttaatgagcataatagattctggttttaggaaataacatatagcttttatatgaatattttcttttgctataatgaaagtcacagattttttttttcctggcttttatggaggaatgaaaagagttgtctccctctaagagtatactatttttgattctcatagcaataatgtcaccattcttatcagagggtaaataccccttgtataggaaaacagacataatttcctcttgggagttctctttatgacttagcattttcttctacttgagaaaattcctgtttttccgattatttcatcttgaactttcttttttttaagcttttgtgcaatgtaatagtttgttgatccatctttgtacattttcattttatttcatgtctttctctcacctacctgtcagaatcagctatagcagattttgaattctttagttaaaaaatagttgctttacttgtttcctcatgagtttgttaaatagctttgcattttagtcctctattatgctatgaaaattattacgaagtttatattgttccctttttaagcctgccttactcttgtcttttgtcattgtctatggtttaatgaagaacacaccaaactaacatttttgtttattttgaggaacaaaaaaacttttctcttttaagggaagttactacacattgagttagtaactactctttcagtcaaggttccttaatcagtccagtctacatcaggactatgacttggggggcggggctaatcctttttgctgttctgagctactattgtcaactgctgttgtacatactgttatgtgtaatggcgtaaatatatttattatgtttgtaaaattcattgcagatcaaggttgctcttctgtgatatatgggatattatgttttaaagaccatcttggaatacaattagagaacttagtattttgatgtactaagacctattttaagtttaatattctactttgcaaaaactttaattaaagatgttatttaaaaaaaaatgttgcttgctttgcttactagtatatggcattgttatagataattgaataaaatacaatttagaaaggaaaatgctttacattgttaatgagaattccatttaacaacaacaaaaagatgctaaattctgtaccttaaagataagtagattgagatgtcaatttgaattagtaaactgtgttacaaatgattaatactagcttttaaaaagttgtattttccaggcacacaggaatttaggttgggcgaattcacactaacaaattataactaaaaattggtataattaacattgtttttcaaaataaagattactccttgtgaaatattaataattaacatattgtattaaataagtatttctactccaaagtatagattacttaggataaaaacattgttatttctctgtttagtcaaaccacttcctcttagttcagaggttataaataattgcatattaggagaattggattactgaggtttgtattgcgtattgaatatattttgtgttattttagaagataataattagcaggtattttaattttatagttaattcagctgaatcattaagaagctcgcctttttgtatttttttatcctgttaacagactatctagaaaacatgcaaattttaactattaacataatcataataaagatatcttatttattgccagcaaa

SEQ ID NO: 4569 - DNA, 501 bp, Homo sapiens
  source 1..501: mol_type = genomic DNA
agtcgcctccggaggaaggaagaagaggacgccgggcgcgcagcatcatgcttgggctagtggccccatctcaacatggctacttggaacagcttgagctgtgtgctgtgactgaactaatctgattaaagtgaccaagaagtccgggcgcagtggttcatgcctctcggtgctgattatcacaactgtttggtgacctacttcactgacctgtgaggattccttcccttcaggtactggattcttgatctttctgcatcatcaagaatggaaacagactgtaatcccatggagctaagcagtatgtcaggatttgaagaaggttcagagctgaacggttttgaaggaactgacatgaaagacatgaggctcgaagctgaagcagttgtaaatgatgttctctttgctgttaacaacatgtttgtctcgaaaagcctgcggtgtgcggatgatgtggcctatatcaatgtggaaacaaaggaaagaaacagatattgccta

SEQ ID NO: 4570 - DNA, 833 bp, Homo sapiens; identical to SEQ ID NO: 3444
  source 1..833: mol_type = genomic DNA

SEQ ID NO: 4571 - DNA, 3244 bp, Homo sapiens
  source 1..3244: mol_type = genomic DNA
actccgatcagctgatcccaactgacaacaggagaggaggaagcccgggaggcaacgaaggaggagggtggcggagatggagatgaggatggatctgccggtgtcctgaggaatagcctctgcccccactggcgccctgcggccccccgacgccgccttgctgcggccgagcttctcagtggtatcccctgaaatactgacttcaggtcgaattatattgaaaagctcctgaccactttctttcattaccaaaactttgtagctgatgtccaaccgatgaacccaccaccgtgaacccatcagacctctctcagatagccataaaagacccttccaagtcaattttgaccacatctttgcttgcactttatggaggatgaaaccatcaaaccaaatcaacgttgctgctaatacaagagtcttagaggcagcaaattaaaaatttgaacatttgtttgtgaagaactataacaggacatgaaaggtgttcttttttaaagtgttcagaaccctgtggaagtttcgtgcagtcttcagactcaaatcttcgtcttcacccccggggcaagctcagtgactattatatggtgggtgtgtttccttaccagcgtgagtatgagtgcccagacttccccagcagagaagggcctgaatccggggctgatgtgccaggaaagttacgcttgcagcgggactgatgaagctatctttgagtgtgatgagtgctgcagtctgcagtgtctccgctgcgaggaggagctccatcggcaggagcgcctgagaaaccatgagcggataagactcaaacctggccatgtcccttactgtgacctctgcaagggtctcagtgggcatttaccaggtgttaggcagagggcaatagtgaggtgccagacctgcaaaattaacttgtgcctggagtgccagaagaggactcattctgggggtaacaaaaggagacaccctgttactgtgtacaatgtcagtaatctccaggagtcactggaggcagaagagatggatgaggagaccaagaggaagaagatgactgagaaggttgtgagtttcctcctagtagacgaaaatgaagaaattcaggtaacaaatgaagaagactttattagaaaattggactgcaaacctgatcagcatctgaaagtggtttccatttttggaaatactggtgatggaaagtctcatactctcaaccacactttcttttatggtcgtgaagtctttaaaacctccccgacccaggagtcctgcactgtgggagtgtgggcagcctatgacccagttcacaaagtagcagtgatcgatacggaagggctcctgggggccaccgtgaatctaagccagagaacacggctgctgcttaaggtcctggccatctcagacctcgtcatctatcgaactcatgcagaccggctgcataacgacctcttcaaattccttggggatgcctcagaagcttatctgaagcacttcaccaaggagctcaaggccaccactgctcgctgtggcctggatgtccctttatccacactgggccctgcagttatcatcttccatgagaccgtgcacacccagctactgggctctgatcatccctcagaggtgccagagaagctcatccaggaccggttccggaagctgggccgtttccctgaagcctttagttccattcactacaagggaacgaggacttacaaccctcccacggacttttctgggcttcggcgtgctttggagcagctactagagaataacaccacccgttctccccggcacccgggagtcatcttcaaagccctgaaggcactaagtgaccgcttcagcggtgagatccccgatgaccagatggcgcacagctccttttttccagatgagtatttcacctgctcctccttgtgcctcagctgtggggttggatgtaagaaaagcatgaatcatgggaaggaaggagtgcctcatgaagccaagagccgctgcagatactcccaccagtatgacaaccgagtgtatacctgcaaggcctgctatgagagaggcgaggaagtcagtgtagtgcccaaaacatctgcttccactgactccccctggatgggtctcgcaaaatatgcctggtctgggtatgtgatcgaatgtcctaactgtggcgtggtctatcgtagtcggcagtactggtttggaaaccaagatcctgtggatacggtggtgcggacagagattgtgcatgtgtggcctggaactgatgggtttctgaaggacaacaacaatgctgcccagcgcctgttggacgggatgaacttcatggctcagtcggtgtccgagcttagccttggacccaccaaggctgtgacttcctggctgacagaccagatcgcccctgcctactggaggcccaactcccagattctgagctgcaacaagtgtgcgacgtcctttaaagataacgacactaagcatcactgccgagcctgtggggagggcttctgtgacagctgttcatcaaagactcggccagtgcctgagcggggctggggccctgcgccagtgcgggtctgtgacaactgctacgaagccaggaacgtccagttagctgttaccgaggcacaagtggacgatgaaggtggaacgctcattgctcggaaggtgggcgaggccgtgcagaacactctgggagccgtggtgacagccattgacataccactaggtctggtaaaggacgcggccaggcctgcgtactgggtgcctgaccacgaaatcctccactgccacaactgccggaaggagttcagcatcaagctctccaagcaccactgccgggcctgcggacagggcttctgtgatgagtgctcccatgaccgccgggctgttccttctcgtggctgggaccatcccgtccgagtctgcttcaactgcaataaaaagcccgcctggacatctctgtctgtcatgactggaaagggcccgttgtgctgaaatcctatcatcatggtggatttgatcttcagtggccaaacacgaattaaagtataattcttaactgaactggtgggtgggttgagctttagggaagtatatggcggtcattcctggtgcgcctatcggtgtgacatgagccctggagtgtgtcgtccctctcagccctgctcctcctgcctcctggggtccagtgactgggaccctactctagaactgtgtaccatccaattcgccatcataaaggaatcttcctgca

SEQ ID NO: 4572 - DNA, 2434 bp, Homo sapiens
  source 1..2434: mol_type = genomic DNA
ttggcggggaacgaaacagagtgggtaaccattgccaataaccttctttttaagtgtcatatacatctgagaatacatgaacttcaagactgtgatgctaatgtttttattgctctttatcagtctattttgggagaaaaggtaccagacctcatagttattcctaggagtcaagaagatgatgcacacaatgtacaagcagtaattgattcactggccttggactacttgcaggtcagcttgtctcacataacagctctatattctgtctccaggagaaaatatagtgaaaggagaatgttgggcccctcttgggatggagatgaagcagaatccactggtgaaatcattagacttggagacacagcacacaccttttctctaagaagtaatggtgctcaatgtcctaatgaaatgctgtctaaaaaagccttagcctcaccaagttctaaatcacatgaagatatgttgtaccctcctagtgttttgtccaagagtaggacatcctttgttgaagacacggaaaccctttctgtgagtgggattccaaatgctaggaagctaggggagcctatccgagcagctattcctttacatccaccctaccacccttcagagcctcgagcaccctgccccataggaaaagaatacttgcattcaagtcactgctccccagccgtaaattctactggagagcatacggaattttctggggatctagatgatggacttttcttaatttccaagttgcctaaaggcagcaaatgggaagtatatccagctcaggtccaagggcctaggacaaggaagcctcccaaaggaaaaagaaatgaaaacagagctacagcctcatcctgcaattcacctttcccccagaggccaagaaagagattaacagaacaagaattacatgatgtatcagaaaaactctctcagcggctttctgaactagattggatgttaaaaagtgctctgggtgatcggattaaagaaaagactgaccataaagaagaaaatactggaaatgaggaggtagaggatggaactgaggagacactgtctcagcacagtgatggcatcgtggagtatgggccaaagaagtcaaggccaggactttccatgcgtagaaagccaccctacagatcccattcgctctctccatctccagttaacaaacacaaacagttccacttggagagaaaaaggcagcgcaagccaagagaaacagatgtccgccaattccaagcacaggcgtttactgaagcatttgaaagggaactaagaagacataaagttcaagagaatattggacctctaagaatacatgagaaggaggaggaaacagtgggaaaaaatatacagaggagaagcttcgtaaaggaactccagaatgtagtcagccctggaagatttactctagaaaaaccacaacgcagagtcagaggtggcctcccaaagccaaataaagcagttccaatgaaagtaagtgaacacagtctcctgccccttatgctggagcagtttccgtttctttatgtttctggcccaacactaagcaaaatgtggaaacagcaaattgcacaggttgaacagcttaagaaagaagcatgtagagaaaatcgatcaaagaagaaactccaagatgaaatagaagaagccctaagaaggcatgacctccttactacccttgtcaagaaagaatatgaacataacaagagactgcaagacttcaaggactgcattcgtaggcaaaggttgacccaatcaaagataaaagaaaatcgacagcaaatcgttcgtgctcgaaaatattatgatgattatagagttcagttgtgtgcaaaaatgatgagaatgaggacccgggaagaaatgatatttaagaaactgtttgaagaaggtttaaacattcaaaagcaaagattacgagacctaagaaactatgccaaagaaaagcgagatgaacaaaggagacgccaccaggatgaactggactccatggagaactactataaggaccagttttcattgctggcagaagccatatcacaggaacatcaagaacttaaagccagagagaaatctcaggcccagacattacataaggtgaagagggagctgagatctaagatggagaaggaaattcagcagctgcaggacatgataacacagaatgatgatgatgttttcttccgggaactggaagctgagcgcttcagatctcggcttcagctggcttcctttcagtacagtaaaagtccctccctatgaggccagacttgataatagtaggtgaaggttctggaggcctttaccaggacagagctagaatcgagccagtaaacagtctaagccagaaaaataattttcaaatgctttacctgtattttcattccagtactttttatgattttttaaataaaaattgttttct

SEQ ID NO: 4573 - DNA, 760 bp, Homo sapiens
  source 1..760: mol_type = genomic DNA
agtcgcctccggaggaaggaagaagaggacgccgggcgcgcagctcggtgctgattatcacaactgtttggtgacctacttcactgacctgtgaggattccttcccttcagaatggaaacagactgtaatcccatggagctaagcagtatgtcaggatttgaagaaggttcagagctgaacggttttgaaggaactgacatgaaagacatgaggctcgaagctgaagcagttgtaaatgatgttctctttgctgttaacaacatgtttgtctcgaaaagcctgcggtgtgcggatgatgtggcctatatcaatgtggaaacaaaggaaagaaacagatattgcctagaactcactgaagcagggctcaaggtggtaggctatgcttttgaccaggtagatgatcatttacagactccctaccatgaaacagtctactccttgttggatacactcagccccgcctaccgagaagcatttggaaacgcactgcttcaaagactggaagctttgaaaagagatggacagtcatgactacactttttcctttcagaggggctggtgctggtacagaatgttgatataaagcttaaaattcttgcatatggtcatagaaaatgcatctttggttttgtgtttttatcacttgcttccaacttaggcttttggctcagaagattattgaataatgatttgtcttagtttctgtttcagtaagggaattctgaggccgttgctatgataccatcattaagacattca

SEQ ID NO: 4574 - DNA, 580 bp, Homo sapiens
  source 1..580: mol_type = genomic DNA
tgaggggcgaaccaagatggcggcggttttggctgtgtgaggaagacggaagagacggcggcggagggaaaccgacttccactagtccgggtcgcttgggcggccgggggccctcagagtctcccgggcagtggtagcagttgcagcaggatcaggcgcctgtcggcttctgacgtttaaaacagggggagcggaagggagccactggccgcggtggcagggccagggcccctttcctgggcgtctactggcggggcccccgccccggttcccgggcggcacgatgaccgacacccggcggcgggtgaaggtgtacacgctcaacgaggaccggcagtgggacgaccggggcaccgggcatgtgtcgtctggctacgtggagcggctgaagggcatgtccctgcttgtcagggctgagagcgacggttctctacttttagagtcgaaaataaatcctaacactgcataccagaaacaacaggacactctgattgtgtggtctgaagcagaaaattatgacttggcccttagctttcaagaaaaagctggatgtgatgaaatttgggagaaaatatgtcag

SEQ ID NO: 4575 - DNA, 4108 bp, Homo sapiens
  source 1..4108: mol_type = genomic DNA
cgcctgtcggcttctgacgtttaaaacagggggagcggaagggagccactggccgcggtggcagggccaggtataaggaaggaaaatatggcggcggcggcggcggcctgaggaggcggcggcggcgcgggaagctgcttcgcggagatcatggcggaggcgggagcagggcagtgacgggagccccgagttcctagcgctgcggggcgggaggctacgaagcgctgcgcggccccctcggggctgccgggcgccgggctcgccaggcctggacaatagcgccggggagccggaggcgaggaaaggcggcggcccagagctcggtccctggagcgggccatgcaggcggcggcgcggccccgcggcgcccagcggcggcagtgaggccggggagccctccgctcgcgggcgccctcacgcctcgcccctcgcctctccagggcccctttcctgggcgtctactggcggggcccccgccccggttcccgggcggcacgatgaccgacacccggcggcgggtgaaggtgtacacgctcaacgaggaccggcagtgggacgaccggggcaccgggcatgtgtcgtctggctacgtggagcggctgaagggcatgtccctgcttgtcagggctgagagcgacggttctctacttttagagtcgaaaataaatcctaacactgcataccagaaacaacaggacactctgattgtgtggtctgaagcagaaaattatgacttggcccttagctttcaagaaaaagctggatgtgatgaaatttgggagaaaatatgtcaggttcaaggaaaggacccttccgtggacatcactcaggaccttgtggatgaatctgaagaggagcgttttgatgatatgtcatcgccaggcttagaattgccatcttgtgaattaagtcgccttgaagaaattgcagaacttgtggcatcatctttaccttcacctcttcgtcgtgaaaaacttgcactggcactagaaaatgagggttatattaaaaagctcctggagctttttcatgtgtgtgaagatttggaaaatattgaaggactgcaccacttgtatgaaattatcaaaggcatctttctcttgaatcgaactgctctttttgaagttatgttctctgaagaatgtataatggacgtcattggatgtttagaatatgatcctgctttatcacaaccacgaaaacacagggaatttctaacaaaaacagccaagtttaaagaagtgattcccatatcagatcctgagctgaaacaaaaaattcatcagacatacagagttcagtatatacaagatatggttctaccaactccttcggtctttgaagaaaacatgttatcaacacttcactcttttatctttttcaataaggtagagattgttggcatgttgcaggaagatgaaaaatttctgacagatttgtttgcacaactaacagatgaagcaacagatgaggaaaaaagacaggaattggttaactttttaaaagaattttgtgcgttttcccaaacgctacagcctcaaaacagagatgcttttttcaagactttgtcaaacatgggcatattaccagctttagaagtcatccttggcatggatgatacacaggtgcgaagtgctgctactgatatattctcatacttggttgaatataatccatccatggtacgagagtttgtcatgcaggaggcacaacagaatgatgatgatattttgctcatcaacctcattatagaacatatgatttgtgatacagatcctgaacttggaggagcagtccagcttatgggcctgcttcgaactttagttgacccagagaacatgctagccactgccaataaaacagaaaagactgaatttctgggtttcttctacaagcactgtatgcatgttctcactgctcctttactagcaaatacaacagaagacaaacctagtaaagatgattttcagactgcccaactattggcacttgtattggaattgttaacattttgtgtggagcaccatacctaccacataaagaactacattattaataaggatatcctccggagagtgctagttcttatggcctcgaagcatgctttcttggcattatgtgcccttcgttttaaaagaaagattattggattaaaagatgagttttacaaccgctacataatgaaaagttttttgtttgaaccagtagtgaaagcatttctcaacaatggatcccgctacaatctgatgaactctgccataatagagatgtttgaatttattagagtggaagatataaaatcattaactgctcatgtaattgaaaattactggaaagcactggaagatgtagattatgtacagacatttaaaggattaaaactgagatttgaacaacaaagagaaaggcaagataatcccaaacttgacagtatgcgttccattttgaggaatcacagatatcgaagagatgccagaacactagaagatgaagaagagatgtggtttaacacagatgaagatgacatggaagatggagaagctgtagtgtctccatctgacaaaactaaaaatgatgatgatattatggatccaataagtaaattcatggaaaggaagaaattaaaagaaagtgaggaaaaggaagtgcttctgaaaacaaacctttctggacggcagagcccaagtttcaagctttccctgtccagtggaacgaagactaacctcaccagccagtcatctacaacaaatctgcctggttctccgggatcacctggatccccaggatctccaggctctcctggatccgtacctaaaaatacatctcagacggcagctattactacaaagggaggcctcgtgggtctggtagattatcctgatgatgatgaagatgatgatgaggatgaagataaggaagatacgttaccattgtcaaagaaagcaaaatttgattcataataatggcaacggcctaggatcagtacctgttgaaaaaaactggttctccacccctcccccatacaaaatccacaacaaagcgcagtggtctcttgtgaatgactgacacagatcagcctcttacacttgacttctgctcatcaagtgccaattcaatggagcaggaggaggggatatcatatatttaggggaaagacttaagcctttgagctctccagcttggaccacacattgcccttttctcagggaaggaaatggaaacaaaaagccaacagggcaggggttttgtaagtggaactctggattgactggtcagttgctacaatcagaatatgctttcttggaccatgtttgagactcagaagaatgggcctttctgccataattcttcactagtcaagaatgccagcagtttctttgtataaagagacctgcctttaaaatcatacattctgaacattttagtcaagctacaacaggtttggaaaacctctgtgggggaggggcgagtataaagttttcctcttttttaactgttccctttgcccttcaaactgcagatatttttttttttaagtggggacttctccctacttgattaaagattgagtggaattctagatgtggtcatttgtgtcataatttttttgttttattttgtttttgattttttttttcctcccctgagtgtatgcttagttgttgagtatatatatttgggaccattaaaactttttttgatgtaatataacctaacgttgtgctggtacctgttttaccatgtgtaatttttgttctacatcacagttcttaatttgtttagagttttatgaaagatggtatagtttttattgacaaaagcaaagtaatcttacaactatgtgcatacaaaagcaatactattttgtgactaaatattttatattaaaatttacatcagcaactgtcttgagaattcagggaaatagaatggaatttaaaacttcaacagttttgttaaatctagaaacatgaaattagtattccaaagagattctgaaatttcttttcttggggaaatgacggtacattaaatcaaaattgaggatggatgatttaaaaacatttgacttttgaataataaaaagaaaagtgaagagtaagagaaa

SEQ ID NO: 4576 - DNA, 537 bp, Homo sapiens
  source 1..537: mol_type = genomic DNA
aatagccaatagttatcttttctgctcctctccctcctcccaccctcctgcgtcagctaaaaaacattcccttcaatttaaaaaatgttcccgactcttaacaccccagttgagaactactgatcttagatgtattaaagtaaaatgaatgaaagtaaacctggtgactcacagaaccttgcttgtgttttctgtcgaaaacatgatgactgtcctaataaatacggagaaaagaaaactaaggagaaatggaatctcactgtacattactactgtttgttgatgtcaagtggaatttggcagagaggcaaagaagaagaaggagtttatggttttctaatagaagatatcaggaaggaagtgaatagagcttctaaactgaaatgctgtgtttgcaagaaaaatggtgcttcaattggatgtgttgcaccccgatgtaaacgaagttatcatttcccatgtggacttcagagagaatgtattttccagtttactggcaattttgcgtcattttgttgggaccatcgacctgttcaa

SEQ ID NO: 4577 - DNA, 9570 bp, Homo sapiens
  source 1..9570: mol_type = genomic DNA
ctgggcatccacttgacagccggcggcgctcgcggccctcagcatgttccgcgaggcgagggttttcctcccgcctgtgggctgaggcggcggcggcccccgaaacgagatgcacctgacgggcgcggcttagaggacgcggctggcgggaagtcccggcagccagcgggagggctttcgttgccgggccgccgccgcctcccgtcgccgccgcgggcccgagcgggagcggcgggtgggcgccccgacatggcggcccggagcgccccgagctgccacctgcggctcgagtgggtgtacggctaccggggccaccagtgccgcaacaacctctactacactgcggccaaggagatcgtatacttcgtggcgggggtcggcgtggtgtacagcccgcgggagcacaggcagaagttctaccggggccacagcgacgacatcatcagccttgcattgcatcctgaacgagtgttggtagcaacaggacaagttgggaaagagccttatatttgtatttgggattcatacactgtgcagaccatatcagttttaaaggatgttcatacacatggtatagcttgcttggcgtttgacttagatggacagcgcttggtttcagttggacttgattcaaagaatgcagtttgtgtttgggactggaaaaggggaaaaatgttgtctatggctcctggtcatacagatagaatatttgatatttcttgggatttgtaccagccaaataaacttgtcagctgtggtgtaaaacatatcaagttctggagtttatgtggaaatgctctgaccccaaaacgaggtgtctttggtaagacgggtgaccttcagacaatactgtgcctagcctgtgcaagggatgaattaacatattctggtgcactcaatggggatatatatgtttggaaaggaatcaatcttatacgaacaatacaaggagcccatgctgcaggaatttttagcatgaatgcttgtgaagaaggctttgctactggtggcagagatggttgtattcgtctttgggatttaacttttaaaccaattactgtgattgatctcagggaaacagaccagggatacaaaggtttgtctgtaaggagtgtgtgttggcgaggtgaccacattctagttggaacacaggacagtgaaatttttgaaattgtggtgcaagaaagaaataaaccttttctaattatgcaagggcattgtgaaggtgaactttgggcacttgctgtccatcctactaaacctttggctgtgactggaagtgatgatcgttcggtcaggatatggagcctagtagatcatgcattaatagcaaggtgtaatatggaagaaccaattcgttgtgcagctgtcaatgcagatggaatccatcttgcccttggaatgaaggatggctcattcactgtacttagagtaagagatatgacggaagttgtacatattaaagataggaaggaggcaattcatgagttaaaatattcaccagatggaacttaccttgctgttggatgcaatgacagctcggttgatatttatggagttgctcagcgttataaaaaagttggcgagtgtttgggatcccttagtttcatcactcatctggactggtcttcagacagtagatatttgcagacaaatgatggaaatgggaaaagacttttttatagaatgccaggaggaaaggaagtgacaagtacagaagaaataaaaggtgttcattgggcttcatggacatgtgtttcaggccttgaagtaaatggaatttggcccaagtattcagatatcaacgatataaattcagtagatggaaattatattggccaagttttagttacagctgatgactatggaattataaaattattccgatatccatgtttaagaaaaggggccaagtttagaaaatatattggccattcagctcacgtaactaatgtcagatggtcacatgattatcagtgggttatttctattggtggagcagatcactctgtctttcagtggaaatttattcctgaaagaaaactgaaagatgctgttcacatagcaccccaagaaagtctggctgactctcatagtgatgaatcagattcagatctgtctgatgttccagaactggattctgaaattgaacaagagacacagctcacctaccgtcgacaggtttacaaagaagatctacctcagcttaaagaacagtgcaaagagaaacaaaaaagtgctacttctaaaagaagagagcgggctccaggaaatagtattcgattacactttgttcacggttacagaggttatgactgtcgaagtaatctgttttatactcaaattggtgaaattgtgtaccatgtggcagcagtgggtgtcatttataatcgacagcaaaacacacagcgtttttatctgggtcatgatgatgatattctctgcctaactattcatcctttgaaagactacgtggcaacaggccaggttggtagagatccctcaattcatatatgggatacagagaccattaaaccattgtccatattaaagggccaccaccagtatggtgttagtgccgttgatttctcagcggatgggaaacgtttggcatcagttggcatagatgatagccatactgttgtgctctgggactggaagaaaggagagaaactttcaatagcaagaggaagtaaagataagatttttgttgtaaagatgaacccctatgtgcctgataaactaattacagctggaattaaacacatgaaattttggcgtaaagcagggggaggattgattggaagaaaaggctacataggcacactggggaaaaatgacacaatgatgtgtgcagtgtatggatggactgaagagatggctttttctggaacatccacaggagatgtgtgtatctggagagacatctttcttgtaaaaacagtgaaagcgcatgatgggccagtgttcagtatgcatgcattggaaaaagggtttgtaactggaggaaaagatggtatagtagctctttgggatgactcttttgaaagatgtctcaagacctatgctataaaaagagctgcattggccccaggatctaaaggtcttctcttggaagataatccatctatacgtgccatatcattaggacatggtcatattttagttggcacaaagaatggtgaaatactagaagtggataaaagtggcccaataacacttctggttcagggacacatggaaggagaggtgtggggtttagctacacacccttatctgcccatctgtgctactgtaagcgatgataaaaccttaagaatatgggatctctcacctagtcattgtatgttggctgtccggaagctgaaaaagggtgggaggtgttgctgtttttctcctgatggtaaagctttagccgtaggtctcaacgatggaagcttcttaatggcaaatgcggatactctagaggatcttgtgtcttttcatcacagaaaagatatgatttcagatattcgattttcacctggttctgggaaatatcttgctgtagcatcccatgacagctttatagatatatacaatgtaatgagtagtaaacgagtaggaatatgcaaaggagctaccagttacataacccatattgattgggatattagaggaaagcttttacaggtcaacactggtgctaaggaacaattattctttgaagctcccagagggaaaaaacaaaccatccccagcgtggaggtagaaaaaattgcttgggcatcatggacaagtgtacttggtttatgctgtgaaggaatttggccagtaattggagaagttacagatgtaactgcttcttgcctcaccagtgacaaaatggttctagctaccggggacgatttgggatttgtgaagttatttagatatcctactaaagggaaatttggaaagtttaagaggtatgtggcccatagtacacatgtcacaaatgttcgctggacttatgatgacagcatgttggttaccctaggcggtacagatatgtctttaatggtgtggacaaatgagatggaaggctatcgagaaaaaaggccttgtgatagtgaagaatccgacattgattctgaagaagatgggggctatgacagtgatgttacaagggagaatgaaatcagttacaccatcagagccttatcaacaaatattcgcccaatgttaggaatcaagcctcatttacaacaaaaagaaccctcaattgatgaaaggcagggagtagtaagaggttccaggcctccagtgagcagggccccaccacagccagagaaactccagacaaacaatgtaggcaagaaaaagagacctatagaggaccttgtgttggagctcatttttggttatcgaggcagagactgtaggaataatgttcactatttaaatgatggtgatgatataatttatcacactgcatctgttggaattctgcacaatgttgctacaggttctcagagtttttatcaggaacataatgatgatattctgtgcctcacagtaaaccagcaccccaaatttatcaacatagtggcaactggccaagtaggtgattcagcagacatgtcagctacagctccttctattcacatctgggatgcaatgaacaagcagactttatctatcctaagatgctaccattcaaagggagtatgttcagtcagcttcagtgctactggcaaactattgctgtctgtgggactagacccagaacatactattaccatttggagatggcaggaaggtgccaaaattgccagcagagctggtcacaatcaacgtatttttgtggcagaattccgaccagattcagatacccagtttgtctcagtgggagtaaaacatgtgaagttctggaccctggcaggaagagctcttcttagcaaaaaagggctactgagcacactggaagatgcccggatgcagaccatgctcgctattgcatttggtgcaaataacttgacgtttacaggtaccatcagtggtgatgtctgtgtgtggaaagatcacatattgtgtagaatcgtggcgagagctcacaacgggcctgtgtttgccatgtacaccaccctgcgagatggacttatcgtgactgggggaaaggaaaggccgtcaaaagaaggaggagcggttaaactgtgggatcaggaactgaggcggtgccgtgccttcaggcttgagacaggacaagccacagattgtgttcgttctgtgtgcagaggcaaaggcaagatccttgttgggacaaggaatgctgaaataatcgaagttggagagaaaaatgcagcttgtaatattttagttaacggtcatgtggatgggccaatctggggactagcaacacatccttccagggattttttcctttctgctgcagaagatgggacagtgagactttgggatattgctgataaaaagatgttaaacaaagtgaatttgggacatgctgctcgtactgtgtgttacagccctgaaggggacatggtggctattggaatgaaaaatggagaatttatcattttactagtgagttctctaaaaatatggggaaagaagagagacaggagatgtgcaatccatgatatcagatttagtccggattcccggtatctggcagtaggttctagtgagaactcagtggatttttatgacctaacgctgggccccactcttaacagaatcagctactgcaaagacattccaagctttgtcattcaaatggacttctctgcagatagcagttatctccaggtctctagtggctgctataaacggcatgtctatgaagtgccttcaggaaaacatcttatggatcatgccgctattgacagaattacttgggctacatggactagtattctaggagatgaggttttgggaatctggtccagacatgctgagaaagctgatgtcaactgtgcctgtgtatctcattcaggaatcagtcttgttacaggagatgactttggcatggttaagttatttgacttcccatgtccagaaaaatttgcaaaacacaaaaggttcttgggtcattcgccccatgtgacaaatattcgatttaccagtggtgatcgacatgttgttagtgctggaggtgatgactgcagcttatttgtctggaaatgtgtacatacacctcactgagagatgctgagatgactacagaaattaactttgagaccagaattacagagaagaaaaaccaaaacccaaccctgcatggtcaagtggtgctaacccaagactgtaacagggagaaatgcccagaatcatcaaaatagtgaaagactgatctgttcaaaatatttgctatatgcactgggtataatccgtaatccatacactgccagataatgccatttcaaggaaggatcgaatacttgatggtaaaggccaagtccccctgtattgggaagtgtgtgatttcggcagacctgctgggaaaatttagggtagagcactctttacagaagaactcaaaaacccaatttggataattttcattatctttttagcaaaatggtttcttaatgtttatattttattttcaaggttcattgtttaatgaaatattttattcttgcatttccataaggaaagggaaagtcatgatcatcctaaaggatcacagtttttaaaaggcaaacattttccctaaggaaacagacacaagctttcctagagaatatgatgttttttaggcattaataaggtccttttttataaaggacacttttctcctagtagttttgaattcaggaacagatccaaagttagcagtatatggctgctacatttccattttcattttcgagccatcagtttatgttcagatgccatctctgtaatcgcacatttaaaacataactgtagcctcactaatggaaaagtagtatgatgaacaatcattcccaatggtgtacaatgtaagggttttagggagcaacagtatttaactggaagaaagaattgcatatttaatgtagtctaatatatacacatttgtttaacatgtaaacaaaagtgttaaattcacatatacaacattatacaatttaatcactcttggaataaaatttttatagccttttttctattgggaaaatttgtttagatgtgtgccactccataggtttatttccaaaatgaatgagcccaactccatttgtaaaaacttgtcagttagaattcctttttttagtggattagggctgaattcttagatccttatttcttttcactttaaatgctgccaaagatcactactcatcattcaggaattcgctgtctagcctatctgtagtttcctgaagattgaaaattatgtagactgctatttaaaaatatatttttctaagtgtgaggtttaagatgctgtattgaccctatgagtttttaatgtgttaattatctttatagcataatagatcgctttaggttcctggaatcccatttggtctgacaggatatatgaagattcttaatacctattttctgtgtctaatacttggttaatactaaaaatagaaatgactaaattacatcacagaaagcataaccagtgattgaacctggtagttttaaagctctaaatagctgtggctgaaggactgattatggggctaagaagcttgaaacgtaagttggtacttgttcatcagtggattctcctaaattaagccaaattttgaaatacatgactattaagtttctactcatgtatttacagtcagtcaataaattaaaggaggaaaaaaatccctgaacaacctgcccataaaaagaaaaatactctacatttgagcctgctgcagttttaaattttccctctgggtcaagtttgccagcttttggctacagagaaattatatttccattacagtgcaggtagaaactctgtaaccttaagcatgtaaactacatagaataaaactgtttccactgcatttctgtccttcaaagtggccaacctgattaagtcagccttaatcactgctgctgtcagtttcacgactaaaggtcatattgactaagtagtcatcagctgaccacctcgctgtatcagccagcaacgaggggaaggtgaagaaacatgataggccatatagaatctgccctatgtttacttttttaacccagataattatttttgtgtgcagtatctaagctcctgattgtgtaacctgggacttctggcaccttttgttccattcattttatgtataaaatgcatgccaaagcacactgtgccctctggtacccttgcttccaatcgccaaccatgctcatttccttcctttttttgtggtccctttttgtggtgatcattttaaaccacgtcatccaacaaatgttttatggtcaaccttagcttgttcataagccatagcaactgaaagattaaactcttaaatatgtgtctgggcagtggctattaaatagcaaaaaacaatcagattttagtattttattatttccttgtaaaatggctgaactaaattaaacccttgtttcccatttgttctataatttatagtgaaactgagaacaaaactatctttataaatgatagctaaaagtatttccagatatttaaacaatttaaaataaatttcttctgcagagatgcaaagcatctcaacactggaatgaacaaatgccttaaattcaatggagtaaacctttagaatgaagaggaactgtcatttcacccaagccgaagacaacagccttatgcacttgtgtgctctgtctttgctgcttctcgtgtttcaagcctttcctgtgggatcagcacagcaaagtgcaacttaccaaatggtttaatgactggttaattctttcttctcccaatggaaaagcaatggcaacacaacagtagactgctggcttgacaatcttaaacgtgagcctttgcacatgtaggtttatcatcatttgagtatacgactaagcaagtcaatgaactttttttttttttttagcagtttaatttggtcctgagaatgttgcagtctttattaccccttttgcattaatccacttttctaaccaccttttaagctttaatttttaacactatacaccaagtctttgaaatcagtgatctgttatttaactctaaagcatttgacacttcttgccttaacagttttaaaaaccacacacaaaaaaactctgtaagtaatacagtaggccaaaagtttcatcctatctatcttgcagtttacctatctgatctgatctctgtaattatagttctgtcatttaaaatatactatttaaatctaatttttacatttcaaaaattatcttcagtagtaactaagtatattttctgtggattctgagaatgttatttttcagaatgtgagaatatatatgtacatttataatcttgtgactttaaagtctgttttcagatacagtatgtaaatacttgtaaaaaaatttgtataattttgtgataatgtagtttcccaaaaaaattatttagaaggcattatgttattagtaaatgagagcactgta

SEQ ID NO: 4578 - DNA, 3369 bp, Homo sapiens
  source 1..3369: mol_type = genomic DNA
tgaggccggggagccctccgctcgcgggcgccctcacgcctcgcccctcgcctctccagggcccctttcctgggcgtctactggcggggcccccgccccggttcccgggcggcacgatgaccgacacccggcggcgggtgaaggtgtacacgctcaacgaggaccggcagtgggacgaccggggcaccgggcatgtgtcgtctggctacgtggagcggctgaagggcatgtccctgcttgtcagggctgagagcgacggttctctacttttagagtcgaaaataaatcctaacactgcataccagaaacaacaggacactctgattgtgtggtctgaagcagaaaattatgacttggcccttagctttcaagaaaaagctggatgtgatgaaatttgggagaaaatatgtcaggttcaaggaaaggacccttccgtggacatcactcaggaccttgtggatgaatctgaagaggagcgttttgatgatatgtcatcgccaggcttagaattgccatcttgtgaattaagtcgccttgaagaaattgcagaacttgtggcatcatctttaccttcacctcttcgtcgtgaaaaacttgcactggcactagaaaatgagggttatattaaaaagctcctggagctttttcatgtgtgtgaagatttggaaaatattgaaggactgcaccacttgtatgaaattatcaaaggcatctttctcttgaatcgaactgctctttttgaagttatgttctctgaagaatgtataatggacgtcattggatgtttagaatatgatcctgctttatcacaaccacgaaaacacagggaatttctaacaaaaacagccaagtttaaagaagtgattcccatatcagatcctgagctgaaacaaaaaattcatcagacatacagagttcagtatatacaagatatggttctaccaactccttcggtctttgaagaaaacatgttatcaacacttcactcttttatctttttcaataaggtagagattgttggcatgttgcaggaagatgaaaaatttctgacagatttgtttgcacaactaacagatgaagcaacagatgaggaaaaaagacaggaattggttaactttttaaaagaattttgtgcgttttcccaaacgctacagcctcaaaacagagatgcttttttcaagactttgtcaaacatgggcatattaccagctttagaagtcatccttggcatggatgatacacaggtgcgaagtgctgctactgatatattctcatacttggttgaatataatccatccatggtacgagagtttgtcatgcaggaggcacaacagaatgatgatgtaagtaagaagttaacagagcaaaaaataaccagcaaggatattttgctcatcaacctcattatagaacatatgatttgtgatacagatcctgaacttggaggagcagtccagcttatgggcctgcttcgaactttagttgacccagagaacatgctagccactgccaataaaacagaaaagactgaatttctgggtttcttctacaagcactgtatgcatgttctcactgctcctttactagcaaatacaacagaagacaaacctagtaaagatgattttcagactgcccaactattggcacttgtattggaattgttaacattttgtgtggagcaccatacctaccacataaagaactacattattaataaggatatcctccggagagtgctagttcttatggcctcgaagcatgctttcttggcattatgtgcccttcgttttaaaagaaagattattggattaaaagatgagttttacaaccgctacataatgaaaagttttttgtttgaaccagtagtgaaagcatttctcaacaatggatcccgctacaatctgatgaactctgccataatagagatgtttgaatttattagagtggaagatataaaatcattaactgctcatgtaattgaaaattactggaaagcactggaagatgtagattatgtacagacatttaaaggattaaaactgagatttgaacaacaaagagaaaggcaagataatcccaaacttgacagtatgcgttccattttgaggaatcacagatatcgaagagatgccagaacactagaagatgaagaagagatgtggtttaacacagatgaagatgacatggaagatggagaagctgtagtgtctccatctgacaaaactaaaaatgatgatgatattatggatccaataagtaaattcatggaaaggaagaaattaaaagaaagtgaggaaaaggaagtgcttctgaaaacaaacctttctggacggcagagcccaagtttcaagctttccctgtccagtggaacgaagactaacctcaccagccagtcatctacaacaaatctgcctggttctccgggatcacctggatccccaggatctccaggctctcctggatccgtacctaaaaatacatctcagacggcagctattactacaaagggaggcctcgtgggtctggtagattatcctgatgatgatgaagatgatgatgaggatgaagataaggaagatacgttaccattgtcaaagaaagcaaaatttgattcataataatggcaacggcctaggatcagtacctgttgaaaaaaactggttctccacccctcccccatacaaaatccacaacaaagcgcagtggtctcttgtgaatgactgacacagatcagcctcttacacttgacttctgctcatcaagtgccaattcaatggagcaggaggaggggatatcatatatttaggggaaagacttaagcctttgagctctccagcttggaccacacattgcccttttctcagggaaggaaatggaaacaaaaagccaacagggcaggggttttgtaagtggaactctggattgactggtcagttgctacaatcagaatatgctttcttggaccatgtttgagactcagaagaatgggcctttctgccataattcttcactagtcaagaatgccagcagtttctttgtataaagagacctgcctttaaaatcatacattctgaacattttagtcaagctacaacaggtttggaaaacctctgtgggggaggggcgagtataaagttttcctcttttttaactgttccctttgcccttcaaactgcagatatttttttttttaagtggggacttctccctacttgattaaagattgagtggaattctagatgtggtcatttgtgtcataatttttttgttttattttgtttttgattttttttttcctcccctgagtgtatgcttagttgttgagtatatatatttgggaccattaaaactttttttgatgtaatataa

SEQ ID NO: 4579 - DNA, 4173 bp, Homo sapiens
  source 1..4173: mol_type = genomic DNA
tcgattcaaagcttcggcaagacgaagaaaaccgagcctgaaagcagggcgagaaaaggggcgctgcagggcggatggaaagaattgattggtaacgatgtggagacggaaacatccgaggacatccggaggaacccggggagttctgagtggtaatcgaggggtagagtatggcagtgggcggggtcatctcggtacgttcgaagggcgttggcggaaattaccgaagatgcccgaagccgtcgggacggacccgagtacctcacgcaagatggcggagctggaggaggtgactctggacgggaagcctcttcaggcgctgcgggtgaccgacctgaaggccgcactggagcagcgaggcctagccaagagcgggcagaagagtgccctggtcaagcggctcaaaggggctctaatgctagaaaatttacagaaacactcaacaccccatgctgcattccagccaaattcccagattggtgaggaaatgagccagaacagtttcataaaacagtatctggaaaagcagcaggagctacttaggcagcgtctggaacgtgaagctcgagaagctgcagaacttgaagaagcttcagctgagtcggaggacgagatgatccatcctgagggagtggcttccctgctgcctcctgactttcagagcagcctggagagaccagagctggagctcagcagacattcgcccagaaaaagctcctcaatttctgaagagaaaggtgactctgatgatgagaaaccaaggaaaggagaaagacgatcatctagggtcagacaggcaagagcagctaaactgtctgagggcagccaacctgctgaggaggaagaggatcaagaaacaccttccagaaacctaagggtcagagcagatcgaaatttgaaaacagaggaggaagaagaggaggaggaggaggaggaagaagatgatgaagaagaggaaggtgatgatgagggacaaaaatctagggaggcaccaatcctgaaagagtttaaggaagaaggggaagagatacctagagtaaaaccagaggagatgatggatgagagacccaaaacaagatcccaggaacaggaggtgttagagagaggagggagatttacaagatcccaggaagaggctagaaaaagtcatctggccagacagcagcaggagaaggaaatgaaaacaacatctccccttgaggaggaagaaagagaaataaaatcttcacaaggcttaaaggaaaaatcgaagtctccttcccctcctcgactgactgaagatcgaaagaaggcctcacttgtagcgctgccagagcaaactgccagcgaggaggagactcctccacctttactaacaaaggaagcatcttctccaccacctcatccacagctccatagcgaagaagaaatagagcccatggaaggcccagcccccgctgtcctcattcagttatctcctcctaatacagatgctgacaccagggagctattagtatctcagcatactgtccagttggtaggaggcctgtctcctttgtcaagtccttcagacaccaaagcagaatctccagcagagaaagtgccagaggagagtgtcctgcctctggttcagaaaagcacactggctgactactcagcccagaaggatcttgaacctgagtcagacagatctgctcagcccctccctctaaaaattgaggaattagcactggccaaaggaatcactgaagaatgtctgaaacagccatctttggaacagaaggaaggcagaagagcttctcatacccttctcccaagccacagattgaaacagtcagctgattcatcctctagccggtcctcctcatcttcctcctccagttctagatcaagatctcgctctcctgacagttcaggttctcggtctcattcaccgctcagatccaagcagagagatgtagcccaggcacgtactcatgccaaccctcgtggtagacccaagatgggctccagatcaacatcagagtccagatcaaggtcacgttcacgttctcgttcagcatcaagcaacagcagaaaatctctgagccctggagtctccagggacagcagcaccagctatactgaaaccaaagatccctcttctggtcaggaggttgcaactccaccagtgccacaactgcaggtctgtgagccaaaggagaggacttccacctcctcatcctctgtccaagcaaggcgtctgagtcagcctgaatcagctgaaaagcatgtgacccagaggttacagcctgagcgggggagcccaaagaagtgtgaagctgaagaggcagagccaccagctgccacacagccccaaacctcagagactcagacctctcatctgccagaatcagaaagaattcatcacactgttgaggagaaggaggaagtgaccatggacacaagtgaaaacagacctgaaaatgatgttccagaacctcccatgcctattgcagaccaagtcagcaatgatgaccgcccggagggcagtgttgaagatgaggagaagaaagagagctcgctgcccaaatcattcaagaggaagatctccgttgtctctaccaagggggtgccagctggaaacagtgacacagaggggggccagcctggtcggaaacgacgctggggagccagcacagccaccacacagaagaaaccttccatcagtatcaccactgaatcactaaaggaggctgttgtggatcttcatgctgatgactctcgcatctctgaggatgagacagagcgtaatggcgatgatgggacccatgacaaggggctgaaaatatgccggacagtcactcaggtagtacctgcagagggccaggagaatgggcagagggaagaagaggaagaagagaaggaacctgaagcagaacctcctgtacctccccaggtgtcagtagaggtggccttgcccccacctgcagagcatgaagtaaagaaagtgactttaggagataccttaactcgacgttccattagccagcagaagtccggagtttccattaccattgatgacccagtccgaactgcccaggtgccctccccaccccggggcaagattagcaacattgtccatatctccaatttggtccgtcctttcactttaggccagctaaaggagttgttggggcgcacaggaaccttggtggaagaggccttctggattgacaagatcaaatctcattgctttgtaacgtactcaacagtagaggaagctgttgccacccgcacagctctgcacggggtcaaatggccccagtccaatcccaaattcctttgtgctgactatgccgagcaagatgagctggattatcaccgaggcctcttggtggaccgtccctctgaaactaagacagaggagcagggaataccacggcccctgcaccccccacccccacccccggtccagccaccacagcacccccgggcagagcagcgggagcaggaacgggcagtgcgggaacagtgggcagaacgggaacgggaaatggagcggcgggagcggactcgatcagagcgtgaatgggatcgggacaaagttcgagaagggccccgttcccgatcaaggtcccgtgaccgccgccgcaaggaacgtgcgaagtctaaagaaaagaagagtgagaagaaagagaaagcccaggaggaaccacctgccaagctgctggatgaccttttccgaaagaccaaggcagctccctgcatctattggctcccactgactgacagccagatcgttcagaaagaggcagagcgggccgaacgggccaaggagcgggagaagcggcgaaaggagcaagaagaagaagagcaaaaggagcgggagaaggaagccgagcgggaacggaaccgacagctggagcgagagaaacgtcgggagcacagtcgggagagggacagggagagagagagagaaagggagcgggacaggggggaccgagatcgggatagggaaagggaccgagaacgaggcagggaaagggatcgcagggacaccaagcgccacagcagaagccggagtcggagcacacctgtgcgggaccggggtgggcgccgctagctgggaaaacactagagctgcaggtaccagccactcggccccagggggttatggccacagagggataggcacagtctccaccaccctgg

SEQ ID NO: 4580 - DNA, 1225 bp, Homo sapiens
  source 1..1225: mol_type = genomic DNA
ctttcttggggtaggtgggcccttccctgcctttctcttctagctttgggatctcaggaggaggagaacccaagaaactgtggaatgatgtgaggcactaagtgaccgcttcagcggtgagatccccgatgaccagatggcgcacagctccttttttccagatgagtatttcacctgctcctccttgtgcctcagctgtggggttggatgtaagaaaagcatgaatcatgggaaggaaggagtgcctcatgaagccaagagccgctgcagatactcccaccagtatgacaaccgagtgtatacctgcaaggcctgctatgagagaggcgaggaagtcagtgtagtgcccaaaacatctgcttccactgactccccctggatgggtctcgcaaaatatgcctggtctgggtatgtgatcgaatgtcctaactgtggcgtggtctatcgtagtcggcagtactggtttggaaaccaagatcctgtggatacggtggtgcggacagagattgtgcatgtgtggcctggaactgatgggtttctgaaggacaacaacaatgctgcccagcgcctgttggacgggatgaacttcatggctcagtcggtgtccgagcttagccttggacccaccaaggctgtgacttcctggctgacagaccagatcgcccctgcctactggaggcccaactcccagattctgagctgcaacaagtgtgcgacgtcctttaaagataacgacactaagcatcactgccgagcctgtggggagggcttctgtgacagctgttcatcaaagactcggccagtgcctgagcggggctggggccctgcgccagtgcgggtctgtgacaactgctacgaagccaggaacgtccagttagctgttaccgaggcacaagtggacgatgaaggtggaacgctcattgctcggaaggtgggcgaggccgtgcagaacactctgggagccgtggtgacagccattgacataccactaggtctggtaaaggacgcggccaggcctgcgtactgggtgcctgaccacgaaatcctccactgccacaactgccggaaggagttcagcatcaagctctccaagcaccactgccgggcctgcggacagggcttctgtgatgagtgctcccatgaccgccgggctgttccttctcgtggctgggaccatcccgtccgagtctgcttcaactgcaataaaaagcccggtgacctttaa

SEQ ID NO: 4581 - DNA, 2218 bp, Homo sapiens
  source 1..2218: mol_type = genomic DNA
ggggcggaagaaggcggggagggagggggcggcaccgccggtcggctccagtcgcctccggaggaaggaagaagaggacgccgggcgcgcagctcggtgctgattatcacaactgtttggtgacctacttcactgacctgtgaggattccttcccttcaggtactggattcttgatctttctgcatcatcaagaatggaaacagactgtaatcccatggagctaagcagtatgtcaggatttgaagaaggttcagagctgaacggttttgaaggaactgacatgaaagacatgaggctcgaagctgaagcagttgtaaatgatgttctctttgctgttaacaacatgtttgtctcgaaaagcctgcggtgtgcggatgatgtggcctatatcaatgtggaaacaaaggaaagaaacagatattgcctagaactcactgaagcagggctcaaggtggtaggctatgcttttgaccaggtagatgatcatttacagactccctaccatgaaacagtctactccttgttggatacactcagccccgcctaccgagaagcatttggaaacgcactgcttcaaagactggaagctttgaaaagagatggacagtcatgactacactttttcctttcagaggggctggtgctggtacagaatgttgatataaagcttaaaattcttgcatatggtcatagaaaatgcatctttggttttgtgtttttatcacttgcttccaacttaggcttttggctcagaagattattgaataatgatttgtcttagtttctgtttcagtaagggaattctgaggccgttgctatgataccatcattaagacattcacatgtcttcatataatatctcttcatttcaaatcctaatcactatttcatactattacagggctttgatgctgccagcactgtcttttacataggaaattctagatttgcacagtaatagaggaattagaagtacctaactatacactttgattcagcctgctaaatcaggggttcaatactagcttggacaaactttgtagtaattaattgctaccagccttattggaaacaaattatcaactagtttcccctgcacaaattttgaaattcactgcttcacttaatctatttatattactaataatggattaataaagatgaattaattatatattacttaactagtattaaatgaaaaacagggactgaaatagttctgtattccgtgtttgcaacagccagccaactaagcagaggataaaccgttagcaaatgaatgtaataattactcatttccaagatatctaagcacataagcaaatacaggaacagacttcattctttttcttaacaaaaaagcatcttcagtgtgtgatttaaaagaaagaagattctggtttcctagaaaacaatattttggcctgtgttgattcttattctgaatgtgtgtttacataatgtacagtatatattcagaaagtatttttgcttcaacgtttactttctatgatgtagtgctttggtattcctacagcaccccaccttccccaacagatgtacagtgttctgtctccattcgaaatctacaatgtaatatgagtgcattgtatgggtttgaaaccaaaggatgaatgaagcattcagagacttaatatttgaaaaaggaatagtcagtattttatattttattacaggtactgatatttataaatttaataaactgtaccatgctgctgcatgttttcaagtacatgttgaacagtaaggattggggagttgttttttaatggtcacctaaagcagctgctatagaaatgttgaactaaaattttgcatctggtcataccttcatgcatttatcatttgcagatatttttccatcattattaaaaaacaggaacttttaggctctgaagatcatgtggaccagagcaaattaaagttcagtttgtgtcacaattcattgccagacttcattggaatgctttgtttgatgatgtatgttcattctcagctttattttcagatgcttaactgggcaacgaagtctaacttcaggttgaactttctcatgtttaatctcaggctaaatgtaaatgatatttgtaaagtttgaataaaattctgtttactcattttgagttagtatgaaaaaaagtgattgtatgtttaagaattgaaattgttcattttgtgataaatgattaattccaa

SEQ ID NO: 4582 - DNA, 2635 bp, Homo sapiens
  source 1..2635: mol_type = genomic DNA
agcaagatggccgccgctgaggaaggctgtagtgtcggggccgaagcggacagggaattggaggagcttctggaaagatgccctcttcgcttcccaagagaagtttttccaggaactattcgacagtgaactggcttcccaagccactgcggagttcgagaaggcaatgaaggagttggctgaggaagaaccccacctggtggagcagttccaaaagctctcagaggctgcagggagagtggaactccagcatgtcggaagaagagctgaccaaggccatggaggggctaggcatggacgaaggggatggggaagggaacatcctccccatcatgcagagtattatgcagaacctactctccaaggatgtgctgtacccatcactgaaggagatcacagaaaagtatccagaatggttgcagagtcatcgggaatctctacctccagagcagtttgaaaaatatcaggagcagcacagcgtcatgtgcaaaatatgtgagcagtttgaggcagagacccccacagacagtgaaaccactcaaaaggctcgttttgagatggtgctggatcttatgcagcagctacaagatttaggccatcctccaaaagagctggctggagagatgctgacgtggctttttttctgtggctcccagtgggtctacggaccttggctgacatatgttggctggctacagcaaacatcattcaagatgtccagcaaagggagcagcacagatggcagaacagacttagctaatggaagcctgtctagcagtccagaggagatgtctggagctgaagaggggagggagacatcctcaggcattgaagtggaggcctcagacctgagtttgagcttgactggggatgatggtggccccaaccgcaccagcacagaaagtcgaggcacagacacagagagctcaggtgaagataaggactctgacagcatggaggacactggtcattactccattaatgatgaaaatcgagtccatgaccgctcagaggaagaggaagaggaggaagaagaggaggaagaagagcagcctcggcgccgtgtacagcgcaagcgggctaaccgtgaccaggactcatcagatgatgagcgggccctagaggactgggtgtcctcagaaacatcagctctaccccgacctcgctggcaagccctccctgcccttcgggagcgggagctgggttcaagtgcccgctttgtctatgaggcctgtggggcaagagtctttgtgcagcgtttccgcctgcagcatgggcttgagggccatactggttgtgtcaataccctgcactttaaccagcgcggcacctggctggccagtggcagcgatgacctgaaggtggtggtgtgggattgggtacggcggcagccagtactggactttgagagtggccacaaaagtaatgtgttccaggccaagtttcttcctaacagtggtgattctactctggccatgtgtgcccgtgacgggcaggttcgagtagcagaactgtctgccacacagtgttgcaagaatacaaaacgtgtggcccagcacaagggagcgtcccacaagttggcactggaaccagactctccctgtacgttcttatctgcaggtgaagatgcagttgttttcaccattgacctgagacaagaccgcccagcgtcgaaactggtggtgacaaaagagaaagagaagaaagtggggctgtatacgatctatgtgaatcctgccaatacccaccagtttgcagtgggtggacgagatcagtttgtaaggatttatgaccagaggaaaattgatgagaatgagaacaatggagtactcaagaagttctgtcctcatcacctggtgaacagtgagtccaaagcaaacatcacctgtcttgtgtacagccacgacggcacagagctcctggccagttacaatgatgaagacatttacctcttcaactcctctcacagtgatggggcccagtatgttaagagatacaagggccacagaaataatgccacagtaaaaggcgtcaatttctatggccccaagagtgagtttgtggtgagcggtagtgactgtgggcacatcttcctctgggagaaatcatcctgccagattattcagttcatggagggggacaagggaggcgtggtaaactgtcttgagccccaccctcacctgcctgtgctggcaaccagtggcctagaccatgatgtgaagatctgggcacccacagctgaagcttccactgagctgacagggttaaaagatgtgattaagaagaacaagcgggagcgggatgaagatagcttgcaccaaactgacctgtttgatagtcacatgctgtggttccttatgcatcacctgagacagagacgccatcaccggcgctggcgagaacctggggttggggccacagacgcggactctgatgagtctcccagctcctcagacacatcggacgaggaggagggccctgaccgggtgcagtgcatgccatcttgaggcctcatacctaggtggggcaggctggggctgccaacctgatcctgcctgggcaaccctttcctgtcccaggccctacattcagcagaaacgcactttggactttttgctttagataaaagaaagac

SEQ ID NO: 4583 - DNA, 2543 bp, Homo sapiens
  source 1..2543: mol_type = genomic DNA
ctgcggtcagagggccgaggcctgggggcgagctggggtcgtgcagtacagcctctttccggcaaatcacgcgagatttcgttcacccgggctccacagggtcagtgacgcgcgagcggctcccgcgactgtggctcccgaagctgcttcgggccccagcggagtattttatacagaaatcttgtgaaaccactgcccaaccagagcaatgattgttcaaagagtggtattgaattctcgacctggaaaaaatggtaatccagtggcagagaatttccgaatggaagaagtctatttaccagataatattaatgaaggacaagtacaagttagaactctttatctttctgtggatccttacatgcgttgtagaatgaatgaagacactggcactgattatataacaccttggcagctatctcaagtcgttgatggaggaggtattggaattatagaagaaagcaaacacacaaatttgactaaaggcgattttgtgacttctttctattggccctggcaaaccaaggttattctggatggaaatagccttgaaaaggtagacccacaacttgtggatggacacctttcatattttcttggagctataggtatgcctggtttgacttccttgattgggatacaggaaaaaggtcatataactgctggatctaataagacaatggttgtcagtggggccgcaggtgcctgtggatctgtggctgggcagattggccatttcttaggttgttccagagtggtgggaatttgtggaacacatgagaaatgcatcctcttgacctcagaactgggctttgatgctgcaattaattataaaaaagacaatgtggcagaacagctccgtgaatcatgcccagctggagtggatgtttattttgacaatgttggtggtaacatcagtgatacagtgataagtcagatgaatgagaacagccacatcatcctgtgtggtcaaatttctcagtacaacaaagatgtgccttatcctcccccgctatcccctgctatagaggcaatccagaaagaaagaaacatcacaagggaaagatttctggtattaaattataaagacaaatttgagcctggcattctacagctgagtcagtggtttaaagaaggaaagctaaagattaaagagacggtaataaatgggttggaaaacatgggagctgcattccagtccatgatgacaggaggtaacattggaaagcagatagtttgcatttcagaagaaatctctttgtaattgctgtaaatgtcatcaaggcaatcatagatttcttttccattttgcatattttcaaagatatgttaaaaaatccttagactatacatagctcttgatttaaatgtgatcataggtgttatttttagttgcatagggtatttgatacaatcattaatggatcatacacaataggtttttaaaaattaataacttttagtaattacttttattaatttaaaatagaacgcttgagaggcactttgtaaagatttgttaaactggaaacgttttacatgatctgatacaaccattaatgaatcatacacaataggttttttaaaattaatattaataacttttattaatttaaaatagaatgcttaaaataaaatagaatgcttgagaggcactgagtaaagatttgttgaactggaaatgttttacatgattcttaaactgaaacttggtgtaaaaatagaattgagatggcctttttttcacattgtagactgaaaagagacttaatggtatgatgtgtacatagggactgggggcaggattgggggtttcggagcttgtgtaacagtttttgggataggagaccagcggttttgggttgggattagtatgggaagataaataacttaggttggttaagttgacaagatttactccagaggatcatctctttgtatttgccaaataatttactgtatagcctaaaaactccatatatattgagaaaagcatatgtttattttaggttagcaggcacatactgtcaagttgtaaagattgagagggcaaacagatgtaaacatcacttgtaggtgattaaaaagattgacagccgggcctgatgtctcaagcctgtaatcctagcactttgggaggcagaggcgggcagatcacttgaggtcaggagttcaagaccagcctggccaacacggtgaaaccccatctctctaaaaatacaaaaattagctgggcgtggtggcacacgcctgtaatcccagctactcaggaggctgaggctggagaatcatttgaacctgggagggggaggttgccgtgagctgagcttgcaccattgcactccagcctgggcgacaagagtgaaattccatctcaaaaaacaaaaacagattgacaacaaagacagtttcagaaaatgacaggactgggcaaattaacaaatgtttgtaaacatgaatgttcaggaactactgatgtacctcaaaagtttgttttattaattgtactcaaccctcgcagaacagtaaaactgaagattatt

SEQ ID NO: 4584 - DNA, 1014 bp, Homo sapiens
  source 1..1014: mol_type = genomic DNA
ttcccaaggggaggacgcgggagaagccggggcctgagtgctccaaggccccgtgggcttcttgggtttgttgcctccggccgctcattaactcaggatggcgtggaagacctcgcccgcctccccttctgggccgcggctccgcttaggtgaaggcctgtttgggcgtccccaccctggagaggggccggggtctggattttcagaactgccactcttctagtgcgctggcgtcaatgctcccttcctcgggccattggagactccgttgctttttaatggcggcagcggctgctgggtgagcagctggaggccggacagtgttcgtcccatccggagaggatcgctttctcctggcgtcaccagcgctgggttggtgggggtagcttttccctctttgctcctccattcttgaagaaagaagaagatgccactgccatttgggttgaaactgaaacgcacccggcgctacacggtgtccagcaagagttgcctggttgcccggatccaactgcttaataacgagtttgtggagttcaccctgtccgtggagagcactggccaggaaagcctcgaggccgtggcccagaggctggagctgcgggaggtcacttacttcagcctctggtactacaacaagcaaaatcagcgccggtgggtagatttggaaaaacctttgaagaagcagctggataaatatgcattggaacctaccgtctattttggagtggtgttttatgtgccttcagtttctcagctgcagcaggagattaccaggtatcagtattatctgcaactgaagaaagatatcttggaaggaagtattccttgtaccttagaacaagcaattcagctagcaggcttagctgttcaagcggattttggtgactttgatcagtatgaatcccaggactttcttcagaaatttgccttgtttcctgtgggatggttacaagatgaaaaagtattggaagaagcaacccaaaaagtggccttactacatcagaaatacag

SEQ ID NO: 4585 - DNA, 5095 bp, Homo sapiens
  source 1..5095: mol_type = genomic DNA
agctggaggctgcgtgggatccggcggcggctcccgagcgcggcggtgcggccttccccgccccctccctccctcctcccccgcccgcttccgcccggcttattatcctccttattgacaaacagagcggtcgcggcggcgactctcggcgtgcggtgatagccaagccatgggagacaagaagagccccaccaggccgaagcggcagccgaagccgtcctcggatgagggttactgggactgtagcgtctgcaccttccggaacagcgccgaggccttcaagtgcatgatgtgcgatgtgcggaagggcacctccacccgggacagcaaggaaggggggaagctggtgtcctactccacagccagtcttggggttagaggaaccctgagaaatagagtaggtggtggcagctcagaagagaagaaacaggctgaatacctggcacctggaagaagaaggaatatagtacacaggggagttggcccaggacagagaagtgggcctagtttaaaagaggcttgaggcccacatgggggcccctgacattttttttttttaccagtacatctaagctcttgtagatccaatttttagtggtggaaacattacttgaggaggactcagagaagcattgtcatttggattgaaactgaagaggctctgggcaactcaccagaaatctaagggacactgtgttcctgaaagtaagtgttctacaccacgaccctctcagcttcttccttcctctctctgaattctcttctcttttgattttggctctaagttaaacctaagagctctaatttctctgttatctgttattttcctagtggtttctgaaattcagggtagaatctgtgtttgtatagaacagtgtggaacagggtattgttactagagaagatattgattgcatcacagaatattaatatttttcctctctggtaatgttaaaaaaacaagattaaaggactgcagaacggtgttgagaagcaaaagtttcagtagttggaagaaataattctccataattgacttattaatgaacagggtaatttccagagtaaggttggcaagtactaaagccaagactggatagctgcagagcagaaggatgcagtttgctaatgatttgtttgtgtgacgcacagatgggatttgaatcctttgggtcagactgacctttgaactgattctgcctcattgccaaatgttaggccaagtctaagccattctagacatttgaaaaacttttttctttttagacctgcagagaagattgagtccttgttctacctttgaagtcttctttttttcttttttcttttttgagataagatctcattctgttgcccaggctgggttgcagtggcatcatccaggctcactgcagcctcgaactcccaggttcaaggaatcctcccacctcagcctcccaagtagctgaaactacagatgcacaccaccatgtgtggctaattttcttattttttgtagagatgggggatctctatgttgcctaggctagtctcaaactcttgagctcaagtgatcctcctaccttggcctcccaaagaactgggattataggaatgagccaccattcggcccctttaaagtctttattggcaatataattttttttctttaaataatattaagttcaaattctttatgcaacagaagcccatttcctttggctatatccatggtaggtcatgtctttctagagaacgaagttacattcatggcatgtatttcaaaataaaatgatttgttgtagcttcagttcctcaagttttaattttattttagattttggggtacatgtgcatgtttgttacttgggtatattgcagagtggtgggattgggattccagtgtacccattacccaaatggtgaacgttatacccaacaggtcatttttcagcccctcactccaaaattttttacattgtgcttttgtgagagaaacagtagtaaatgtcaaactgacaggaaattttttaaaaggaaacaaaatgccacggtgacacattattttcaagatgctgcacagtctttatatctgaagtttcttttctttcttttcttttcttttcttttcttttcttttcttttctctttttttttttgaggcagaatttgagacagtcttgctctgtcgcccaggctggagtacagtggcgtgacctcggctcactgcaacctccacctcccaggttcaagcaattctcatgcctcagcctctgtggtagctgggattacaggtgcccgccaccacaccaggctaatttttgtatttttagtagagatggggtttcactatgctggccaggctggtctcaaactcctgacctcaggtgatccgtctgcgtcggcttcccaaagtgctgggattacaggagtgagacactgtgcccagcctatctgaagattcttataaggcaagaaatgtcccaaatataaatgcaagaaactttaggaaattaaggatcattcttggctggcccagtggcccacacctgtaagcccagcaccttgggaggctgagacaggaggatttcttgaggccaggagtttgagaccaacctgggcaacacagtgagatctcgtctctactaaaaattaaaaaaattagctgggtgtggtggtgcatgcctgtggtcccagctactcaggaggctgaagtgggaggatcccttgagccccagagttcgaggttgcagtgagctgtgatcataccactgcactccagcctgggcaacagagtgagaccttgtctcaaaaaaacaaaattctgagtcatcagagaaaatgaaatattaaatattaaggatagtctgtatgagggtgataatcaatgtgtgatgattaatttaagactggtgtcttattggtacttcatctagtagtggacagttacttaatattgcttaattcagatagcaaatatttagaaatgaaaatgatagaattattggtttgggtttcaaactgtggtctaaatggttcataccaggctttcaaatgtaacaggtaatgttacattttgttagaggatattataacagtcctttaggtttctcataggtgttattttagagagctataaaaaagatttcacatagtagaaagagtgctagatgttacactagtatgattttggtaacctgggttcatatctcatttcatatcaaccatttcaatattcagcattcagcaaatgtttattgagcatcttatttaagggctgagttggatactagacatacagtggtgagcaaaatggatttttttgtttctttaaaattttacagttttgcaaattagaaccgctttaactgtaccaagctctatatgtgaggtttagtgttagtagatctttcctttatgtgtaggctgaagaggtggaacttcttcattaaaaatatatgttgtttataactgaacacagtattattattatggttaggtaaaaagagtgagttatttcagcttcttttaaaagtaagctataaaatccacattctgaaagaagcttaaaccaactatcatctggtagaaatcttttcagcatcgttgttttcttgtcatacttgctttatgtcttcaaatttgaggtttggcactgattcttctagacttttggtgtaggaatgggagaaaaaaattgaggaccatctacataagtcctttttaaagaaatgcatggttcctgagccgcctcctgtctatctgaggagcctttctagcaaccatttagttgttcagagactccttattctaggagatttcttacttgtttgttttttgtcctgtaagaggactcacactggttaattgtatatgggtaaattttacaagtgattattagtgtttgtgtagtctggatatcagagtggttttcaaagtgtagtctgagggacactgagagtccctgagatctttttagttgaagctttctatgaggttcacactgtttttataataatttgaagatgttatttgcctttttcactgtgatggtgcagaggcagtgatgggtaaaactgccagcaccttagcatgaatcaaagcagtggcaccaaattgctatcttcattgtaatattcaccaccatgtacatgcatgcagtaagaataatgtcagtttgaattaagaatatccttgaagcagaaaaatttactaattttattacatctcatatttttaaaaatattctgtctgaccaaatgggaactacacataaagcacttctactgtataccaaagtacagtggttaagggaaagcacatgtgtagtttgtcttgcaagcagagctagtctttttgtcatagagcatcatttttacttgaaagactacctgaaataccatagttattcagacttggatatttagcatatattttcttgaaaatgaatatattcaaaaaatatatcacttcaaggaaaacacttgatactatatgttgccagtgataatcattcaagtgaaaattagaatttttgaaaatttgtagcaacaatgagctttagagtttctgtgtataaagacttttctgagaagattagtggtggtatcaatgaatataatttctgatatttcaccatgaaatgtgtcagcatttggaagctacgcataactcagcaaacaaatggttcctagttaccgatgtatgattttacaaaactgtaatgggtaatccatcaaagtacaaaataccaacagattttaagggaacactgaaaacttcattgatgtggtttcagatttcatattgcaactaacctttgagaaacaactgtgtttttatgtagtatcaaagaataacacctatagttatctgaaaatgctattcaactacttacctcttttcaactgtatatctgtgagagtccagattttcttaatatttttggaccaaaacaacatattgcaacaaattgaatgctgagatagatgtgacaatccaggtgtcttctactaaccagatgttagaggtttgcaaaaatatacgatgccactcttcatacaaaatatctttgttttggaaaataataagtttttaaaataaaaatatgtcattt

SEQ ID NO: 4586 - DNA, 4662 bp, Homo sapiens
  source 1..4662: mol_type = genomic DNA
caagcggcggcagcggggtcctgtactcttgctgtggctgggcggctagttcaagttgccatagctgcgagtctggggagagcacagtcggttgagtcgctgcgtttggtcagttgcaccttctgggtcactggtagccgcgggagccgggtggggcctaggcgatgatccggcattaaggagctgggatcatcctccgtctcaggtggtttggggaaagtgtaggggcaaccaaagatcatcggcttgactaggccctttgccctgaacctcatgaagaaatgataggaggcagacatatgtgcctaaaaagagcgttgagctcagagaagagcaactcggagttttgggggtgtgctttgatttgtgtacatcaatggcagaatcatccagcgaatcagatcacttccgctgtcgtgaccgattgagtccatgggctgccagatcaacgcacaggggaactcgaagtcttcctacagtagaagttaccgagaaggtcaacactataacaagtactttacaggataccagtcggaacctgcgacaagtggaccagatgcttggacgataccgagaatacagtaatggacaggcgggtgcgatagaacatttaaaagaaagcttggaacaatcaatcgaccaactccggagtcaacgtttattgagaaactcaggagggagaagtatttctgttacaagtttgagtgcaagtgaccttgatggtggcactgggtcagagctccatcattttccacctacctcacctctcaaggactatggggatccacagggtattaaacgaatgagatcaagaactggtgtccggtttgttcaagagactgatgatatgactcagcttcatggttttcatcagtctcttcgagacctcagcagtgaacaaattcgccttggagatgatttcaacagggagctttccagaaggagccggtcagatgccgaaacaaaaagggctttggaagaattgactgaaaaacttaatgaagcccagaaacaagaagtggtttcagatcgggtggagcggcggcttcaggaactggagagagagatgcgcacagaaagggagctggtggaaagacgccaggatcaactgggactcatgtccctgcagctacaggaggcactaaagaaacaagaagctaaagcagatgagcatgagggggcaataaaaaataagctaagacaaactgaaactgagaagaatcaacttgaacaggaattggagctatctcgaaggttattgaatcaatcagaaggcagccgagaaacacttttgcatcaggtagaagaactgcgtacacaacttacgaaagcagaaggtgatcgaaagggtttacagcatcaagtatctcagatttccaagcaacagtcaaactatcaggatgaacaaggggaggactggagatttaggagaggggttgagcgggaaaaacaggacctggagaagcaaatgtcagatttgagagtgcagctgaacttcagcgcaatggcatctgagttagaggaagtgaaacggtgcatggagagaaaagacaaggagaaagcacatttggcatcacaagtagagaatttaacacgtgaactggagaatggggaaaaacagcaactgcagatgttggatcgacttaaggagatccagaatcactttgacacatgtgaggccgagcgtaagcatgctgaccttcagatctcagagctgactcgccatgcggaggatgcaaccaagcaggctgagcggtacctcagtgagctccagcagtcagaggctctgaaagaggaggcggagaagaggagggaagacctgaaactgaaagctcaagaatccattaggcagtggaagcttaagcataagaagttagaacgagcgttggagaaacaatctgaaactgttgatgaactgacaggcaagaataatcagattttaaaagaaaaggatgaattgaaaacccagctgtatgcagcattacaacaaatagagaatcttcgaaaggaattgaatgatgtcctaacaaagcgtgcccttcaggaggaggagcttcactccaaggaggagaaattacgtgatattaagtctcatcaagctgaccttgaattggaagttaagaattccctggataccatccatagactggagagcgaattgaaaaagcagagtaagatccaaagccagatgaaagttgagaaagctcacttggaggaagaaattgcagagctcaagaagagccaggcccaggacaaagctaaacttcttgagatgcaagagtccatcaaggacctgagtgccatccgagcagatcttgctaataaattggctgaggaagagagagccaagaaagcagtgcttaaggacctttctgacctcactgcacaggcaaaatccagggatgaagaaacagctacaatcatcacacagttaaagctggaacgagatgtgcaccagagggagctgaaagatctcacatcatcattgcagagtgtgaaaacaaaacacgaacagaatatccaggagcttatgaagcactttaagaaagaaaagagtgaggctgagaatcatatcaggactctgaaggctgaaagtttagaagagaagaatatggctaaaattcatcgtggtcagctggagaagttgaaatcacagtgtgacagactgacagaggaattaacccagaatgaaaatgagaacaaaaaactgaagctaaaatatcaatgtttgaaggatcaactagaagaaagggaaaaacatataagcattgaagaggagcacttaaggaggatggaagaggccagattgcagctcaaggatcaacttctttgcttggagactgaacaggaatccattcttggtgtgataggaaaggaaattgatgcagcttgtaaaacattctccaaggactcagtggagaaattaaaagttttttcatctggtcctgatatacattatgacccacatcgctggttagcagaaagcaagactaaacttcagtggctctgtgaggaactgaaagagagagaaaacagagagaaaaatctgcgacaccagctgatgctctgcagacaacaactcaggaatttgactgaaaacaaggaatctgagttgcagtgtctctttcaacagatagaaaggcaggagcagcttctggatgaaatacatcgtgagaagagagatctactggaagagacccaaagaaaagatgaagaaatgggatctctgcaggaccgtgtaattgcattagaaacgagtacccaagtggccttggaccatctggagtctgtgcctgagaaactgagcctactagaagatttcaaagacttcagagattcctgcagttcatctgagagaactgatggaagatattccaaatacagggttcgcagaaattctcttcagcatcaccaagatgacaccaagtacagaaccaaaagtttcaaaggtgacagaacctttctggaaggttcccacactcgtgggttagatcactcatcctcttggcaggatcacagtcgcttcctgtctagtccaagattttcatacgtgaactcatttaccaaaagaactgttgctccagattcagcttcaaacaaggaagatgccacaatgaatggaacaagttcacaacccaaaaaagaggaatatgggagctaaaaaagcaaatgtaatttgttattttacatgagtatgttacaaataataacatctctattcttacagcaatttggcccagattatctaacagacatacctgcagctttggctctttggtattgccaaacattgacaaaagtgacaatactgttggtccttgtgaatggtaaaccaatccaaataatatcagatcatgaatgatgtgcagctaatttatttgcaacttatactagcacagaaagaatgatattttttcactttgtattttcctttttcaagtgtggtcagtcacattttcccaaccaaaatttggatttctaattgaggccttttaaaaattactggctaaaaagaaggaaaatgagtttcccttgaggcaaaagttgccagcactttagattcagggagcatttatatacaactgattttttgaaaaattttctccctaataaattatcatgtgttataacatgtggagatgtgcatatataacattagacagtccactttataaatgctcaggacttttatatctatcatcttaacagtccacaactgcataccgtagctgaaaattatttccaatcatccatttttaatagcaataaagaattcataaatgatatctgaactgtagagcactgtaaagaattcatagcacaatttatttatttgtctttttgtggccaaatatcctactgtgatcacttcagtcatatcctggaccgtctttggtttactgtgactaaaatcatagcaccaaactcctttgtccatgagatttatatataatcttgtataatttggtcctatctgcttctaccatcccaacttttttcatcaaagtgtctaagaacgtattccctttacacgctgatctcctagtggagaaggatttatattaaatgctaagtaatagtaaactttcaggaactgaatcctattgggtcatggattctgcatagacaagggcaataaagcaatacctttgtaatatgcat

SEQ ID NO: 4587 - DNA, 1711 bp, Homo sapiens
  source 1..1711: mol_type = genomic DNA
cgaccctcagcagccagcccggcccgcccgcgcccgtccgcagccgcccgccagacgcgcccagtatgagggagatcgtgcacatccaggccggccagtgcggcaaccagatcggggccaagttctgggaagtcatcagtgatgagcatggcatcgaccccagcggcaactacgtgggcgactcggacttgcagctggagcggatcagcgtctactacaacgaggcctcttctcacaagtacgtgcctcgagccattctggtggacctggaacccggaaccatggacagtgtccgctcaggggcctttggacatctcttcaggcctgacaatttcatctttggtcagagtggggccggcaacaactgggccaagggtcactacacggagggggcggagctggtggattcggtcctggatgtggtgcggaaggagtgtgaaaactgcgactgcctgcagggcttccagctgacccactcgctggggggcggcacgggctccggcatgggcacgttgctcatcagcaaggtgcgtgaggagtatcccgaccgcatcatgaacaccttcagcgtcgtgccctcacccaaggtgtcagacacggtggtggagccctacaacgccacgctgtccatccaccagctggtggagaacacggatgagacctactgcatcgacaacgaggcgctctacgacatctgcttccgcaccctcaagctggccacgcccacctacggggacctcaaccacctggtatcggccaccatgagcggagtcaccacctccttgcgcttcccgggccagctcaacgctgacctgcgcaagctggccgtcaacatggtgcccttcccgcgcctgcacttcttcatgcccggcttcgcccccctcacagcccggggcagccagcagtaccgggccctgaccgtgcccgagctcacccagcagatgttcgatgccaagaacatgatggccgcctgcgacccgcgccacggccgctacctgacggtggccaccgtgttccggggccgcatgtccatgaaggaggtggacgagcagatgctggccatccagagcaagaacagcagctacttcgtggagtggatccccaacaacgtgaaggtggccgtgtgtgacatcccgccccgcggcctcaagatgtcctccaccttcatcgggaacagcacggccatccaggagctgttcaagcgcatctccgagcagttcacggccatgttccggcgcaaggccttcctgcactggtacacgggcgagggcatggacgagatggagttcaccgaggccgagagcaacatgaacgacctggtgtccgagtaccagcagtaccaggacgccacggccgaggaagagggcgagatgtacgaagacgacgaggaggagtcggaggcccagggccccaagtgaagctgctcgcagctggagtgagaggcaggtggcggccggggccgaagccagcagtgtctaaacccccggagccatcttgctgccgacaccctgctttcccctcgccctagggctcccttgccgccctcctgcagtatttatggcctcgtcctccccacctaggccacgtgtgagctgctcctgtctctgtcttattgcagctccaggcctgacgttttacggttttgttttttactggtttgtgtttatattttcggggatacttaataaatctattgctgtcagataccctt

SEQ ID NO: 4588 - DNA, 411 bp, Homo sapiens
  source 1..411: mol_type = genomic DNA
aagcacatctacaatcaaggagaggggcaggctttaccttttgaaggaagaagtatgaaagtgtatcactgactgatcaagtagagctaaaaaacattcccttcaatttaaaaaatgttcccgactcttaacaccccagttgagaactactgatcttagatgtattaaagtaaaatgaatgaaagtaaacctggtgactcacagaaccttgcttgtgttttctgtcgaaaacatgatgactgtcctaataaatacggagaaaagaaaactaaggagaaatggaatctcactgtacattactactgtttgttgatgtcaagtggaatttggcagagaggcaaagaagaagaaggagtttatggttttctaatagaagatatcaggaaggaagtgaatagagcttctaaactg

SEQ ID NO: 4589 - DNA, 3236 bp, Homo sapiens
  source 1..3236: mol_type = genomic DNA
gcgtcccgcctcctccgctccctgcgctcccgccacctcggcaactccgcgcccgcctcccgcctccgtcggaagcctccgccgcagtaaggctcccggtctcgctgctgtctctttaaatggtggggctacgagccgcccctgcagctgctccctgggtggccccgcgcgccgcttttgaggggcgaaccaagatggcggcggttttggctgtgtgaggaagacggaagagacggcggcggagggaaaccgacttccactagtccgggtcgcttgggcggccgggggccctcagagtctcccgggcagtggtagcagttgcagcaggatcaggcgcctgtcggcttctgacgtttaaaacagggggagcggaagggagccactggccgcggtggcagggccaggtataaggaaggaaaatatggcggcggcggcggcggcctgaggaggcggcggcggcgcgggaagctgcttcgcggagatcatggcggaggcgggagcagggcagtgacgggagccccgagttcctagcgctgcggggcgggaggctacgaagcgctgcgcggccccctcggggctgccgggcgccgggctcgccaggcctggacaatagcgccggggagccggaggcgaggaaaggcggcggcccagagctcggtccctggagcgggccatgcaggcggcggcgcggccccgcggcgcccagcggcggcagtgaggccggggagccctccgctcgcgggcgccctcacgcctcgcccctcgcctctccagggcccctttcctgggcgtctactggcggggcccccgccccggttcccgggcggcacgatgaccgacacccggcggcgggtgaaggtgtacacgctcaacgaggaccggcagtgggacgaccggggcaccgggcatgtgtcgtctggctacgtggagcggctgaagggcatgtccctgcttgtcagggctgagagcgacggttctctacttttagagtcgaaaataaatcctaacactgcataccagaaacaacaggaagatgaaaaatttctgacagatttgtttgcacaactaacagatgaagcaacagatgaggaaaaaagacaggaattggttaactttttaaaagaattttgtgcgttttcccaaacgctacagcctcaaaacagagatgcttttttcaagactttgtcaaacatgggcatattaccagctttagaagtcatccttggcatggatgatacacaggtgcgaagtgctgctactgatatattctcatacttggttgaatataatccatccatggtacgagagtttgtcatgcaggaggcacaacagaatgatgatgtaagtaagaagttaacagagcaaaaaataaccagcaaggatattttgctcatcaacctcattatagaacatatgatttgtgatacagatcctgaacttggaggagcagtccagcttatgggcctgcttcgaactttagttgacccagagaacatgctagccactgccaataaaacagaaaagactgaatttctgggtttcttctacaagcactgtatgcatgttctcactgctcctttactagcaaatacaacagaagacaaacctagtaaagatgattttcagactgcccaactattggcacttgtattggaattgttaacattttgtgtggagcaccatacctaccacataaagaactacattattaataaggatatcctccggagagtgctagttcttatggcctcgaagcatgctttcttggcattatgtgcccttcgttttaaaagaaagattattggattaaaagatgagttttacaaccgctacataatgaaaagttttttgtttgaaccagtagtgaaagcatttctcaacaatggatcccgctacaatctgatgaactctgccataatagagatgtttgaatttattagagtggaagatataaaatcattaactgctcatgtaattgaaaattactggaaagcactggaagatgtagattatgtacagacatttaaaggattaaaactgagatttgaacaacaaagagaaaggcaagataatcccaaacttgacagtatgcgttccattttgaggaatcacagatatcgaagagatgccagaacactagaagatgaagaagagatgtggtttaacacagatgaagatgacatggaagatggagaagctgtagtgtctccatctgacaaaactaaaaatgatgatgatattatggatccaataagtaaattcatggaaaggaagaaattaaaagaaagtgaggaaaaggaagtgcttctgaaaacaaacctttctggacggcagagcccaagtttcaagctttccctgtccagtggaacgaagactaacctcaccagccagtcatctacaacaaatctgcctggttctccgggatcacctggatccccaggatctccaggctctcctggatccgtacctaaaaatacatctcagacggcagctattactacaaagggaggcctcgtgggtctggtagattatcctgatgatgatgaagatgatgatgaggatgaagataaggaagatacgttaccattgtcaaagaaagcaaaatttgattcataataatggcaacggcctaggatcagtacctgttgaaaaaaactggttctccacccctcccccatacaaaatccacaacaaagcgcagtggtctcttgtgaatgactgacacagatcagcctcttacacttgacttctgctcatcaagtgccaattcaatggagcaggaggaggggatatcatatatttaggggaaagacttaagcctttgagctctccagcttggaccacacattgcccttttctcagggaaggaaatggaaacaaaaagccaacagggcaggggttttgtaagtggaactctggattgactggtcagttgctacaatcagaatatgctttcttggaccatgtttgagactcagaagaatgggcctttctgccataattcttcactagtcaagaatgccagcagtttctttgtataaagagacctgcctttaaaatcatacattctgaacattttagtcaagctacaacaggtttggaaaacctctgtgggggaggggcgagtataaagttttcctcttttttaactgttccctttgcccttcaaactgcagatatttttttttttaagtggggacttctccctacttgattaaagattgagtggaattcta

SEQ ID NO: 4590 - DNA, 869 bp, Homo sapiens
  source 1..869: mol_type = genomic DNA
cagagaaggaaggatcttctcatgcacagaggcaacaaatggcaactttctgagtcctcatctataaaatgagcataataacatcacctacttaattggatttggtgaggattcactgggtgagttcatgcaaagcgctgagaacaggaccccccgcccccgtggtttggggaaagtgtaggggcaaccaaagatcatcggcttgactaggccctttgccctgaacctcatgaagaaatgataggaggcagacatatgtgcctaaaaagagcgttgagctcagagaagagcaactcggagttttgggggtgtgctttgatttgtgtacatcaatggcagaatcatccagcgaatcagatcacttccgctgtcgtgaccgattgagtccatgggctgccagatcaacgcacaggggaactcgaagtcttcctacagtagaagttaccgagaaggtcaacactataacaagtactttacaggataccagtcggaacctgcgacaagtggaccagatgcttggacgataccgagaatacagtaatggacaggcgggtgcgatagaacatttaaaagaaagcttggaacaatcaatcgaccaactccggagtcaacgtttattgagaaactcaggagggagaagtatttctgttacaagtttgagtgcaagtgaccttgatggtggcactgggtcagagctccatcattttccacctacctcacctctcaaggactatggggatccacagggtattaaacgaatgagatcaagaactggtgtccggtttgttcaagagactgatgatatgactcagcttcatggttttcatcagtctcttcgagacctcagcagtgaacaaattcgccttgga

SEQ ID NO: 4591 - DNA, 3851 bp, Homo sapiens
  source 1..3851: mol_type = genomic DNA
gcggtcagagggccgaggcctgggggcgagctggggtcgtgcagtacagcctctttccggcaaatcacgcgagatttcgttcacccgggctccacagggagtattttatacagaaatcttgtgaaaccactgcccaaccagagcaatgattgttcaaagagtggtattgaattctcgacctggaaaaaatggtaatccagtggcagagaatttccgaatggaagaagtctatttaccagataatattaatgaaggacaagtacaagttagaactctttatctttctgtggatccttacatgcgttgtagaatgaatgaagacactggcactgattatataacaccttggcagctatctcaagtcgttgatggaggaggtattggaattatagaagaaagcaaacacacaaatttgactaaaggcgattttgtgacttctttctattggccctggcaaaccaaggttattctggatggaaatagccttgaaaaggtagacccacaacttgtggatggacacctttcatattttcttggagctataggtatgcctggtttgacttccttgattgggatacaggaaaaaggtcatataactgctggatctaataagacaatggttgtcagtggggccgcaggtgcctgtggatctgtggctgggcagattggccatttcttaggttgttccagagtggtgggaatttgtggaacacatgagaaatgcatcctcttgacctcagaactgggctttgatgctgcaattaattataaaaaagacaatgtggcagaacagctccgtgaatcatgcccagctggagtggatgtttattttgacaatgttggtggtaacatcagtgatacagtgataagtcagatgaatgagaacagccacatcatcctgtgtggtcaaatttctcagtacaacaaagatgtgccttatcctcccccgctatcccctgctatagaggcaatccagaaagaaagaaacatcacaagggaaagatttctggtattaaattataaagacaaatttgagcctggcattctacagctgagtcagtggtttaaagaaggaaagctaaagattaaagagacggtaataaatgggttggaaaacatgggagctgcattccagtccatgatgacaggaggtaacattggaaagcagatagtttgcatttcagaagaaatctctttgtaattgctgtaaatgtcatcaaggcaatcatagatttcttttccattttgcatattttcaaagatatgttaaaaaatccttagactatacatagctcttgatttaaatgtgatcataggtgttatttttagttgcatagggtatttgatacaatcattaatggatcatacacaataggtttttaaaaattaataacttttagtaattacttttattaatttaaaatagaacgcttgagaggcactttgtaaagatttgttaaactggaaacgttttacatgatctgatacaaccattaatgaatcatacacaataggttttttaaaattaatattaataacttttattaatttaaaatagaatgcttaaaataaaatagaatgcttgagaggcactgagtaaagatttgttgaactggaaatgttttacatgattcttaaactgaaacttggtgtaaaaatagaattgagatggcctttttttcacattgtagactgaaaagagacttaatggtatgatgtgtacatagggactgggggcaggattgggggtttcggagcttgtgtaacagtttttgggataggagaccagcggttttgggttgggattagtatgggaagataaataacttaggttggttaagttgacaagatttactccagaggatcatctctttgtatttgccaaataatttactgtatagcctaaaaactccatatatattgagaaaagcatatgtttattttaggttagcaggcacatactgtcaagttgtaaagattgagagggcaaacagatgtaaacatcacttgtaggtgattaaaaagattgacagccgggcctgatgtctcaagcctgtaatcctagcactttgggaggcagaggcgggcagatcacttgaggtcaggagttcaagaccagcctggccaacacggtgaaaccccatctctctaaaaatacaaaaattagctgggcgtggtggcacacgcctgtaatcccagctactcaggaggctgaggctggagaatcatttgaacctgggagggggaggttgccgtgagctgagcttgcaccattgcactccagcctgggcgacaagagtgaaattccatctcaaaaaacaaaaacagattgacaacaaagacagtttcagaaaatgacaggactgggcaaattaacaaatgtttgtaaacatgaatgttcaggaactactgatgtacctcaaaagtttgttttattaattgtactcaaccctcgcagaacagtaaaactgaagattattgtttctgaatgttttggcttatgattgtctacacactgccaatatacttttgtatgcaacatttgtaataagtagattcaaactgtgttggtaatcagcctccccagttttcgtgagtggcccttttttgttacttttcctggaccatttcatcgcctgagggggtttcacttttctctgtatgttgctaactcccaaatctccatctgtatttctgacctctttcttgagcactggacctttacctccaagtaaatatcctcaactctggattgcatcttatactctgcttttttcttttcttttcttttttgagatggagtcttgctcagtcgcccggcgtgcagcggcacgatctcggctcactgcaacctccgcctcccgggttcaagcgattctcctgcctcagcctcccgagtagctaggattacaggcgcgtgccaccacgcccggctaatttttgtgtttttagtagagacgggttttcacggcgttacccaggatggtctcgatctcctgacctcgtgatccgcccaccttagcctcccaaagtgctgggattaaaggcgtgagccacggagtccggcctactctgcttttctaaagtggaattatcttcctctgaaatgtttctcctttattttaaatcaccattagtaatttgtgtacccaaacctgtcatcaaggcttatctttaaccttgaaaatgcctttttaaagagaactcctttaattcccacggttgagtctctcattcttccgcacgcaaatattttaaaataagtaatttcaagaagtcagtcaaactcacaaagctttaacaaggtggcatccagcttggaagtcaagtgttcaagcccgcagtcgggacatccaagagctctttacatcctaattacaacacggaacccagactcactgcataccccgtcccgtatataatgcaaaacttgattctgcaagttcctttctcgggcggtgaaacttcgaaggtcctctccatggagacctttgataaatgtttaagcagtgatcttttctttcgcgtttgcctccattgcaacgcctccgctgatgggaaaaactactccctccgctactgcggggtggcagtgacgtcaacgaattagctgacctgttttttcgggcttcgcggacataggagtcccgaaggccgagagtgagtgagtgagtgggagcggggcggctgcggctcctcctgtccggggcggagccctgcgtcgcgggcctggggaggccccgccagcacccttgacgtctgggtcccgagcagtgcggcagccacacgacactgaggcgagcgagtgggtgtgtgcgtggggggtcagccaaacttcctgtcccgcgctc

SEQ ID NO: 4592 - DNA, 361 bp, Homo sapiens
  source 1..361: mol_type = genomic DNA
tcacaactgtttggtgacctacttcactgacctaatggaaacagactgtaatcccatggagctaagcagtatgtcaggatttgaagaaggttcagagctgaacggttttgaaggaactgacatgaaagacatgaggctcgaagctgaagcagttgtaaatgatgttctctttgctgttaacaacatgtttgtctcgaaaagcctgcggtgtgcggatgatgtggcctatatcaatgtggaaacaaaggaaagaaacagatattgcctagaactcactgaagcagggctcaaggtggtaggctatgcttttgaccaggtagatgatcatttacagactccctaccatgaaacagtctactcc

SEQ ID NO: 4593 - DNA, 576 bp, Homo sapiens
  source 1..576: mol_type = genomic DNA
ctttctacctccttattcagagaaggaaggatcttctcatgcacagaggcaacaaatggcaactttctgagtcctcatctataaaatgagcataataacatcacctacttaattggatttggtgaggattcactgggtgagttcatgcaaagcgctgagaacaggaccccccgcccccgatttgtgtacatcaatggcagaatcatccagcgaatcagatcacttccgctgtcgtgaccgattgagtccatgggctgccagatcaacgcacaggggaactcgaagtcttcctacagtagaagttaccgagaaggtcaacactataacaagtactttacaggataccagtcggaacctgcgacaagtggaccagatgcttggacgataccgagaatacagtaatggacaggcgggtgcgatagaacatttaaaagaaagcttggaacaatcaatcgaccaactccggagtcaacgtttattgagaaactcaggagggagaagtatttctgttacaagtttgagtgcaagtgaccttgatggtggcactgggtcagagctccatcattttccacctac

SEQ ID NO: 4594 - DNA, 821 bp, Homo sapiens; identical to SEQ ID NO: 1137
  source 1..821: mol_type = genomic DNA

SEQ ID NO: 4595 - DNA, 3834 bp, Homo sapiens
  source 1..3834: mol_type = genomic DNA
ccgggcgcgcaggtgagcggcagccggggtggctgcgggcgaggggcggcccccgagaagggctaggggctcggggcgccggcgggccgtcaggccttccggatggggacgcgacgccatgcagctggctgggccgagaggggcggcaggctgcaggggccccgcgcccgtgttaagaggggtctgggggccggtctggccggcctggctctcccggctcccctcagacctcggcgccccggaaacgcacacttggggctccgccgtctccgctgggaggactggagcccttctcgagcatccccgcccgcacccgagcattgaccggtgcccattgtcagcaagttcttcggcccccgcctcattcaggtattgtttctgaggcagcttcttcgttgccgtttgcctggcggtttgcagagcgcttctcgcatacgctcgcttaatcctgggtgtgtcatagcaacgatcaggaaacttgggttttcgaagcatctgtgggcaaaactgcattccttgagaaatgctaaaggctcctgaccccgccggaacctgggtgaagaacttgggctgttctggcagtctgcgcaatcgtatttctgccttttgggaggtaactcctgcagaggcggagccggctgttaagttaagtcaacctcgaaaggcctgggtgcgggtgttctatggcccagaagccagatgtccttcgttagaatcccggcactgacacctattagccgcccagccactttgagcggccactgccctccccgagcccacgttgcctcctttgccgagtgtgagcggattaaaatcttatgtgcatggatttgttgggaagattaaatgatatgagtagggcacgaacctgaacagagtcctgaaacatacagctgtttaatcacagtgaattaagacgaccagtttaaggagtgaaatgtttactgtctcggcaactttcatgaatgccttggaaatacagcccaaaatattggtagatggagaaacatctggttcccctttccacaaccaccttttcgttttagaaccagggtactttgtatgcagttgcttggattgttgatttccctcattctttgtagactcatctcaagtattctcagtaacttagattcccttgctcttcattcagaaatatttgttaaggtccattaaatgaaagtcaccacagttgatcatgtgaacagtgtcaagaatcaggccgaaccttcaaggagtttatgttctaaaacggaagcatggtggtacctgcttgtggaggctgaggcggaaggatcgcttgagcccaggactttgaggctgcataattgcattgacgctatccatagagtgcctgcaatttcaaatatcagaaaggatcgtacgagctatgatcatgccactgcactccagcctgaaccacagagcaagaccctttctctcaataaagtggaagtttgttcatttattcagtaaatatttattgattgccttctgtgtgccaagcactgttctaggtactgggattacagcagtgaacagataaatctcttccttcctggaacttacattttattgaagggaggagacatacaataaatgagtgaataatatgctttgtggtgataagggctgttggaaaaacgaaagcaatgtaaagggagtggagatggggaagagagaagggacttgccatttttatatgagatgctcggtgctgattatcacaactgtttggtgacctacttcactgacctgtgaggattccttcccttcaggtactggattcttgatctttctgcatcatcaagaatggaaacagactgtaatcccatggagctaagcagtatgtcaggatttgaagaaggttcagagctgaacggttttgaaggaactgacatgaaagacatgaggctcgaagctgaagcagttgtaaatgatgttctctttgctgttaacaacatgtttgtctcgaaaagcctgcggtgtgcggatgatgtggcctatatcaatgtggaaacaaaggaaagaaacagatattgcctagaactcactgaagcagggctcaaggtggtaggctatgcttttgaccaggtagatgatcatttacagactccctaccatgaaacagtctactccttgttggatacactcagccccgcctaccgagaagcatttggaaacgcactgcttcaaagactggaagctttgaaaagagatggacagtcatgactacactttttcctttcagaggggctggtgctggtacagaatgttgatataaagcttaaaattcttgcatatggtcatagaaaatgcatctttggttttgtgtttttatcacttgcttccaacttaggcttttggctcagaagattattgaataatgatttgtcttagtttctgtttcagtaagggaattctgaggccgttgctatgataccatcattaagacattcacatgtcttcatataatatctcttcatttcaaatcctaatcactatttcatactattacagggctttgatgctgccagcactgtcttttacataggaaattctagatttgcacagtaatagaggaattagaagtacctaactatacactttgattcagcctgctaaatcaggggttcaatactagcttggacaaactttgtagtaattaattgctaccagccttattggaaacaaattatcaactagtttcccctgcacaaattttgaaattcactgcttcacttaatctatttatattactaataatggattaataaagatgaattaattatatattacttaactagtattaaatgaaaaacagggactgaaatagttctgtattccgtgtttgcaacagccagccaactaagcagaggataaaccgttagcaaatgaatgtaataattactcatttccaagatatctaagcacataagcaaatacaggaacagacttcattctttttcttaacaaaaaagcatcttcagtgtgtgatttaaaagaaagaagattctggtttcctagaaaacaatattttggcctgtgttgattcttattctgaatgtgtgtttacataatgtacagtatatattcagaaagtatttttgcttcaacgtttactttctatgatgtagtgctttggtattcctacagcaccccaccttccccaacagatgtacagtgttctgtctccattcgaaatctacaatgtaatatgagtgcattgtatgggtttgaaaccaaaggatgaatgaagcattcagagacttaatatttgaaaaaggaatagtcagtattttatattttattacaggtactgatatttataaatttaataaactgtaccatgctgctgcatgttttcaagtacatgttgaacagtaaggattggggagttgttttttaatggtcacctaaagcagctgctatagaaatgttgaactaaaattttgcatctggtcataccttcatgcatttatcatttgcagatatttttccatcattattaaaaaacaggaacttttaggctctgaagatcatgtggaccagagcaaattaaagttcagtttgtgtcacaattcattgccagacttcattggaatgctttgtttgatgatgtatgttcattctcagctttattttcagatgcttaactgggcaacgaagtctaacttcaggttgaactttctcatgtttaatctcaggctaaatgtaaatgatatttgtaaagtttgaataaaattctgtttactcattttgagttagtatgaaaaaaagtgattgtatgtttaagaattgaaattgttcattttgtgataaatgattaattcc

SEQ ID NO: 4596 - DNA, 5064 bp, Homo sapiens
  source 1..5064: mol_type = genomic DNA
gtccctaacggtcttcggaagcgaagcagtgtcaacagtccctggtaaacacaagtagtattacaagtcgggagctcttcaagtcttggatgagactgtagagcggtcttgtgcggcaatgtgctaccttaaaataaataaataaataaacccctgttatgtccggagtttgtttccacccggagaggaatggaagagcaccagagagcgcttagctttctggttggatgttttgggctctgaggtcagcttggagaagaaaaaaaagattaagatgccagtgaagagacttcgtgaggtagtttctcaaaatcatggagatcatttggttttgctgaaagatgagttgccctgtgttcctccggcattgtctgcaaataaacgtcttcctgttggaacggggactagtttgaatggaacatcacgtggttcatcagacttaacttctgctagaaattgttaccagcctctattagaaaatcccatggtgtcagaaagtgatttttctaaagacgttgcagtgcaagtgttgcctttggataaaatagaagagaacaacaagcaaaaagcaaatgacatcttcatttctcagtatacaatgggacagaaagatgctctaagaacagttttaaagcaaaaagctcaaagcatgcctgtttttaaggaagtaaaggtacatctgttagaagatgcaggcatagagaaggatgctgttactcaggagactagaatttcacccagtggaattgattcagctacaaccgtggctgcagcaactgctgctgccattgcaaccgcagctccgttgataaaggtgcagagtgatttggaagcaaaagtcaattctgttacagaattacttagtaaattacaggagactgataaacacctgcaacgtgttacagagcagcaaacaagcattcagaggaaacaagagaaattacattgtcatgatcacgaaaagcaaatgaatgtgtttatggagcagcacataaggcatcttgaaaagttacaacaacaacaaatagatattcagactcattttattagtgctgcactcaagactagtagttttcagcctgttagtatgccctcctccagagcagtggaaaagtattccgtaaaaccagaacaccctaatcttggtagctgtaatccatctttatataacacatttgcttccaaacaagcacctttaaaagaagttgaagatacgagttttgataaacagaaatctcctttggagacaccagcacctcgcagatttgctcctgtacctgtttcaagggatgatgaactatcaaagagggaaaatcttttggaagaaaaagaaaatatggaagtgtcgtgtcacagaggaaatgtaagactattggaacaaattttgaataataatgattctttgacaagaaaaagtgaatcatcaaacaccacctcactaactaggtcaaaaataggatggactcctgagaaaacaaacagatttccttcctgtgaagagctagaaacaactaaagtgactatgcagaagtctgatgatgttcttcatgaccttggccaaaaagagaaagaaacaaatagcatggtccagccaaaagaatctctgagtatgttgaagcttccagatcttccacagaattctgttaagcttcaaacaaccaatacaacaagatctgtattgaaagatgctgagaagattttgagaggagtacaaaacaataaaaaagtacttgaagaaaacctggaagctattattcgtgcaaaagatggagctgccatgtattcgcttatcaatgctttatctaccaacagagagatgtcagagaaaattaggatcagaaagacagtggatgaatggattaaaactatttctgcagaaattcaggatgaactgtcaagaacagattatgaacaaaaaagatttgatcagaagaatcagagaaccaagaaaggtcagaatatgactaaagatattagaaccaacacacaagataaaactgtcaacaaatctgtaattccaagaaaacattctcaaaagcaaatagaagagcattttagaaatctacctatgaggggcatgcctgcttcaagtttacagaaagagagaaaggaagggcttttgaaagcaaccacagtaatacaagatgaagattatatgttacaagtctatggaaagccagtttatcagggccatcgaagcactcttaaaaaaggaccatatctcagatttaattctccatctcctaagtccagaccacagagaccaaaagtaatagaacgagttaaaggcactaaggtaaagtcaataagaacacagactgacttctatgcaacaaaacctaagaagatggattctaaaatgaaacattctgttcctgtgttacctcatggcgatcagcaatatttgttcagcccaagtagagaaatgcctactttttcaggtacattggaaggtcatctgattcctatggcaattcttttaggacaaacccaaagtaatagtgataccatgccacctgctggagtgattgtcagcaagccacaccctgtaactgtgactacttctattcctccatcatctcgaaaagtagaaactggagtaaagaaacctaacatagccattgtagaaatgaagtcagaaaaaaaggatcctcctcagcttactgtgcaggtattacccagtgtagatattgacagcatttcaaatagtagtgctgatgtcctttcacctctgtctagccccaaagaagcatctcttcctcctgtgcaaacttggataaagactccagaaattatgaaggtagatgaagaagaggtgaagtttccaggaactaactttgatgaaataatcgatgtcatacaggaagaagaaaaatgtgatgaaattccagactctgaaccaattctggagtttaacagaagtgttaaagctgattctacaaaatataatggtcctccatttccgccagttgcttctacttttcagcccactgctgatattctggataaagtaattgagagaaaagaaacactggaaaatagcttaattcaatgggtagagcaagaaataatgtcaagaattatctctgggctctttccagtccagcaacagattgcacctagtatcagtgtttcagtcagtgagacaagtgaaccactgacttctgacattgtggaaggaacaagcagtggcgccctccagctttttgttgatgctggtgttcctgtgaactcaaatgtgattaaacattttgttaacgaagctcttgctgagaccattgctgtcatgctgggtgacagagaagcaaagaagcaaggtcctgttgctacaggtgtttctggggatgcttcaacaaatgaaacatatttgccggcaagagtgtgcaccccactgcctaccccacagcctacgcctccttgctcaccttcatcacctgctaaggagtgtgttttggtaaagactccagattcttctccctgtgattcggatcatgatatggcttttcctgtgaaagaaatatgtgctgaaaaaggagatgatatgcctgccatcatgcttgttaatactccaacagttacccctactactacacctcctccagcggcggcagtttttaccccaactttgtcagatatttccattgataaattgaaggtatcaagcccagagcttcccaagccatggggtgatggagacctgccactggaagaagagaaccctaactcacctcaagaagaacttcatccaagagctattgtaatgtctgtggctaaggatgaagaaccagagagtatggatttccctgctcagcctccacctccagagccagttccctttatgccatttcctgccggcaccaaggccccttccccctcacagatgccaggttctgattcatcaacactggagagcacattgagtgttactgtcactgaaactgaaactttagataaacccatctctgaaggagagattttatttagctgtggtcaaaaattggcccccaagattttagaagatataggactgtacctgacaaaccttaatgatagcttatccagcactctgcatgatgccgttgaaatggaggatgatcctcctagtgaagggcaagtgattaggatgtcccataaaaaatttcatgcagatgcaattctttcttttgctaaacaaaaccaggagtcagcagtttcccagcaagcagtctatcattcagaggacttggaaaacagtgtgggtgaacttagtgaaggacaaagaccccagctaacagcggcagcagagaacatcttaatgggacattctctctatatgcagccacctgtcactaatacacagtctttggatcaacaatgtgatcctaaaccattatctcggcaatttgacacagtttcaggtagtatttatgaagattcatgtgctagtcatggtccaatgagtttgggagaattggagttggagccaaattctaagctggttcttcccacaacacttctgacagcacaagaaaatgatgttaatttaccagtagccgctgaagatttttcccagtaccaactaaagcaaaatcaggatgttaagcaagttgaacacaaaccatcacaaagttacctacgtgttagaaataaatctgatattgcaccttcacagcaacaagtttcaccaggtgatatggatcggacacaaattgagcttaatccgtacctcacatgtgtattttcaggtgggaaagcagtgccactctccgcttcacagatgccccctgccaagatgtcagtgatgctgccgtcagtgaacctcgaggactgctctcagtctctgagtctcagcacaatgcaggaggacatggagtcttcgggggcagataccttctgaacgggaagagacagccagcacagtgtttatgccactggttttaaagtcattttaccttggcttaaaaccctctctcagactgtttggtttttgagcatattctgaaaaaaaaattccaatattttaaaataaaacaaaaagcataatttgggtatttaaagtttttaaataaaataagtataagtcat

SEQ ID NO: 4597 - DNA, 4485 bp, Homo sapiens
  source 1..4485: mol_type = genomic DNA
agtgcgcactacgcccttgctggcgccgggatcctccctctctcgctcctccctttctgggctgcaccgctcacgccttcctgttagtccgagctgggagaagttcactccgatcagctgatcccaactgacaacaggagaggaggaagcccgggaggcaacgaaggaggagggtggcggagatggagatgaggatggatctgccggtgtcctgaggaatagcctctgcccccactggcgccctgcggccccccgacgccgccttgctgcggccgagcttctcagtggtatcccctgaaatactgacttcaggtcgaattatattgaaaagctcctgaccactttctttcattaccaaaactttgtagctgatgtccaaccgatgaacccaccaccgtgaacccatcagacctctctcagatagccataaaagacccttccaagtcaattttgaccacatctttgcttgcactttatggaggatgaaaccatcaaaccaaatcaacgttgctgctaatacaagagtcttagaggcagcaaattaaaaatttgaacatttgtttgtgaagaactataacaggacatgaaaggtgttcttttttaaagtgttcagaaccctgtggaagtttcgtgcagtcttcagactcaaatcttcgtcttcacccccggggcaagctcagtgactattatatggtgggtgtgtttccttaccagcgtgagtatgagtgcccagacttccccagcagagaagggcctgaatccggggctgatgtgccaggaaagttacgcttgcagcgggactgatgaagctatctttgagtgtgatgagtgctgcagtctgcagtgtctccgctgcgaggaggagctccatcggcaggagcgcctgagaaaccatgagcggataagactcaaacctggccatgtcccttactgtgacctctgcaagggtctcagtgggcatttaccaggtgttaggcagagggcaatagtgaggtgccagacctgcaaaattaacttgtgcctggagtgccagaagaggactcattctgggggtaacaaaaggagacaccctgttactgtgtacaatgtcagtaatctccaggagtcactggaggcagaagagatggatgaggagaccaagaggaagaagatgactgagaaggttgtgagtttcctcctagtagacgaaaatgaagaaattcaggtaacaaatgaagaagactttattagaaaattggactgcaaacctgatcagcatctgaaagtggtttccatttttggaaatactggtgatggaaagtctcatactctcaaccacactttcttttatggtcgtgaagtctttaaaacctccccgacccaggagtcctgcactgtgggagtgtgggcagcctatgacccagttcacaaagtagcagtgatcgatacggaagggctcctgggggccaccgtgaatctaagccagagaacacggctgctgcttaaggtcctggccatctcagacctcgtcatctatcgaactcatgcagaccggctgcataacgacctcttcaaattccttggggatgcctcagaagcttatctgaagcacttcaccaaggagctcaaggccaccactgctcgctgtggcctggatgtccctttatccacactgggccctgcagttatcatcttccatgagaccgtgcacacccagctactgggctctgatcatccctcagaggtgccagagaagctcatccaggaccggttccggaagctgggccgtttccctgaagcctttagttccattcactacaagggaacgaggacttacaaccctcccacggacttttctgggcttcggcgtgctttggagcagctactagagaataacaccacccgttctccccggcacccgggagtcatcttcaaagccctgaaggcactaagtgaccgcttcagcggtgagatccccgatgaccagatggcgcacagctccttttttccagatgagtatttcacctgctcctccttgtgcctcagctgtggggttggatgtaagaaaagcatgaatcatgggaaggaaggagtgcctcatgaagccaagagccgctgcagatactcccaccagtatgacaaccgagtgtatacctgcaaggcctgctatgagagaggcgaggaagtcagtgtagtgcccaaaacatctgcttccactgactccccctggatgggtctcgcaaaatatgcctggtctgggtatgtgatcgaatgtcctaactgtggcgtggtctatcgtagtcggcagtactggtttggaaaccaagatcctgtggatacggtggtgcggacagagattgtgcatgtgtggcctggaactgatgggtttctgaaggacaacaacaatgctgcccagcgcctgttggacgggatgaacttcatggctcagtcggtgtccgagcttagccttggacccaccaaggctgtgacttcctggctgacagaccagatcgcccctgcctactggaggcccaactcccagattctgagctgcaacaagtgtgcgacgtcctttaaagataacgacactaagcatcactgccgagcctgtggggagggcttctgtgacagctgttcatcaaagactcggccagtgcctgagcggggctggggccctgcgccagtgcgggtctgtgacaactgctacgaagccaggaacgtccagttagctgttaccgaggcacaagtggacgatgaaggtggaacgctcattgctcggaaggtgggcgaggccgtgcagaacactctgggagccgtggtgacagccattgacataccactaggtctggtaaaggacgcggccaggcctgcgtactgggtgcctgaccacgaaatcctccactgccacaactgccggaaggagttcagcatcaagctctccaagcaccactgccgggcctgcggacagggcttctgtgatgagtgctcccatgaccgccgggctgttccttctcgtggctgggaccatcccgtccgagtctgcttcaactgcaataaaaagcccggtgacctttaaccccagccccctctccgagtccttcacaattccttaggttctcagggttagaaacagtcttgcgaggtaggccctcctcccagtcacctgctgtggtgtgtgtcctctcctctccgcatccagggccactttccctcagtgggggtgagcctggcggcaggcccgaaggtgtggacccctcagggcaggggaccttgcaacttatcgcaaaggggaatgaacctgaatccgttgcatttatttcagttaaaaataatgaatatatatgtgtatatctctctctcatatatacatatgaaaggcactcggggcgtatcgaggctgctgctggctgtgaagacttcgcacagtctcctccgcacagggtgaggtggcagtggcagcacgtcttcctcatgagccgagccaggtccatggccaccacgtggctggccccttcctctgctgctcttggagccttggaagcctctcctgtccttggctcttccctccatgcctgtcagctgcctggggagtgagcctccctggtccttcctgcctgaaacagcctgaagggaattctccctaggtctcctgggagtcgagtcccaattcttggcttaagcctgttttagtcagagaccacccaacttagcgtgcaggtcaccggagtgggtggagggtcagaggtcgggtcttcggccctgagaagtagaaatgcaggggccgtgctgtccctggtcccccagggaacagcaaggaaggaactgagccttctccagcagggcttcctgtcccgatgcttctgtctccactcggctttcccaaaaggcggcacccagctcctcaatcgaagcatctgcctcccacccctcggccccctcaagcccaccatctgcttctgagtgtcgcactaggattttcattgcttattttaaagtgtcttaatcctttgttcccagacacacaacccctctagctctcggaggggcgatcatgagaaaccttccagggaaactgagcacaggatgaactgttagttgtttttaaaagtctatataaatatttcaacagatcgtaaagaaaaaatttatctctttggtccttgcaagagaagtcaaaggaacttttgtttctcctcaagagcctggacatctctgtctgtcatgactggaaagggcccgttgtgctgaaatcctatcatcatggtggatttgatcttcagtggccaaacacgaattaaagtataattcttaactgaactggtgggtgggttgagctttagggaagtatatggcggtcattcctggtgcgcctatcggtgtgacatgagccctggagtgtgtcgtccctctcagccctgctcctcctgcctcctggggtccagtgactgggaccctactctagaactgtgtaccatccaattcgccatcataaaggaatcttcctgc

SEQ ID NO: 4598 - DNA, 1010 bp, Homo sapiens
  source 1..1010: mol_type = genomic DNA
ccaggaggggaaagggccaggaaagacaggctccagtgccgtaggatccaggcatgcactgtccgtgtttattgagcgcctgctgtatgctgggacctagcatgagaagcgctgtcatggggacccggaaaggcctctgccgcagacatggagaaactcagcgcgctgcaggagcagaagggcgagctgcgcaagcggctgtcctacaccacacacaagctcgagaagctcgagaccgagttcgactccacgcgccactacctggagatcgagctgcggcgcgcgcaggaggaactggagaaggtcacggagaagctgcgcaggattcagagcaactacatggcactgcagaggatcaaccaggagctggaggacaagctgtaccgcatgggccagcactatgaggaggagaagcgtgcgctgagccacgagattgttgccctcaacagccatctgctagaagccaaggtgaccatcgacaagctgtcagaggacaacgagctctataggaaggactgcaatctagcggcccagctgctgcagtgcagccagacctacggcagggtccacaaggtgtctgagctgccctcggatttccaggagcgcgtgagcctgcacatggagaagcacggctgcagcctgccatccccgctctgccacccggcctacgccgacagcgtccccacctgcgtcattgccaaggtgctggagaagccggaccccgccagcctgtcctcccgcctgtccgatgcctccgcccgcgacctggccttctgcgacggggtggagaaaccaggcccgcggcccccctacaagggagacatctactgcagtgacacagccctctactgcccggaggagcggcggcgagaccggcggcctagcgtggacgcgcccgtgaccgacgtgggcttcctgcgggcccagaactccactgacagcgcggccgaggaggaggaggaggccgaggcggcggccttcccggcgggcttccagcatgaggccttccc

SEQ ID NO: 4599 - DNA, 4079 bp, Homo sapiens
  source 1..4079: mol_type = genomic DNA
cacacaggcgatggccttggagacacccacgccgggtccacccagagagggccaaagccctgcttctcaggctgggactcagcaccctcctgcccaggccactgcccattcccagagctctccagagttcaagggctccctggcctccctctcagacagcttgggggtgtctgtcatggccaccgaccaggactcctactccaccagcagcacggaggaggagctggagcagttcagcagccccagcgtgaagaagaagccctccatgatcctgggcaaggctcggcaccggctgagctttgccagtttcagcagcatgttccacgctttcctctccaacaaccgcaagctgtacaagaaggtggtggagctggcgcaggacaagggctcgtactttggcagcctggtgcaggactacaaggtgtacagcctggagatgatggcgcgccagacctccagcacggagatgctgcaggagattcgcaccatgatgacccagctcaagagctacctgctgcagagcaccgagctcaaggccctggtggaccccgccctgcactccgaggaggagctcgaagcaattgtagagtctgccttgtacaaatgtgtcctgaagcccctgaaggaagccatcaactcatgcctgcatcagatccacagcaaggatggttcgctgcagcagctcaaggagaaccagttagtgatcctggccaccaccaccactgacctaggtgtgaccaccagcgtgccggaggtgcccatgatggagaagatcctgcagaagttcaccagcatgcacaaggcctactcacctgagaagaagatctccatcctgctcaagacctgcaaactcatctacgactccatggccctcggcaacccagggaagccctatggggcggatgacttcctgcctgtgctcatgtatgtgctggcccgcagcaacctcacggagatgcttctcaatgtggagtacatgatggagctcatggaccccgccctgcagctgggggagggttcctactatctgaccaccacctacggggccctggagcacatcaagagctacgacaagatcacggtgacccggcagctgagtgtggaggtgcaggactccatccaccgctgggagcgccggcgtactctcaacaaggcccgggcctcccgctcctccgtacaggtgaggcctgagagcgggaggggcccggtggggccatgtcccagacaccatccctgctgcctgctggctaaggagccgtgacatcacctggctgctccagccgcccagccctgccttaggggagcagtgagactccccacaccagaggaagggcccccagcccctgctgccagtgtgtgtccaggacttgggtgcgtctagaaacatatcagcaggcattggtgttctccctgggcaagcaggaagggtgcaggaggaatgagacacacccatcattccttagcccctcctaggacccagcaccctgcaggggctggagatggggacttgtcatcccagtccctgctttaaggagcccacaggctcatctacagccttgctccttagtccctggacaaatgcagcagctgccaagggtctgcgtaacccccaccaacccagtggcccacccctccccatacctctctctatacagactcagtattcaaaccagtcccgcccctccccaactccatcaccccacccacccccaggctgcatcaaatccagctgcccccagttccccaaacatgcccagcccagttcactggctgctcaaccgctgccctcactggtcaatctccccttcttcactggctgtcactgcccatcctttaagacgactcagtttctccaacagcccctcctctgagaagccttccctgatacacacacacaccgtttcacacaggctgggtggggtgccctcctctgggcttcctgcggcctccccttttacagtgcatatcacatcctatcatcctctgcatatgaagctgtcacctctgggagggcacagcccatggttcacatgcctcaggggcgccaagcccagggcctgggacagagcaggactgggtgtgtaaaaaagggtgagagttggactagtgagccaggcacatccagagctgtgagcagctatgcagactcactcctctgacacccagagcagaccagtcctgagccacactcctggctttcaagatggtgcatctataataagcagagcccaggcctgggagacaggaggcttgagttctggccccagccctgtactagcttgctgtgtgaccctcagcaatccctgccccactctgggactcagttttcctgcccacacaggctgactatggctaatcaatttaataactgactctctggggagaaaacaaaagctctgattttagcttctgtccatttccatggtgtgagtcctccatggccaacttcaacttggcatcactgaatgtggagttggaaagaagtgtatgcagtcggctctccctggcgggtgtgagccagctccagcacacctctgttcccatcccctcccaacaccccggactcccacagactgtagggacatggacactcttggtccaagcctggcccaggcatcccgtacttcctgcttctaccttaggggttcctgatgctgagccaggcagagtatggatgaaacggaccacccactgtttgggagacggaagcttcggaggggggtcccctcagcaccacatctgggatctggggagggcaccaccctctgccccctcccagtgcctcctccgcacaccatgccttggggggtgggcacccttccctggggaggggaagcccagagctggacagtcactagcaggtggatagtgccctgggaggcctaatggaggacaaggagccctgaggcagccactaagacggagggagtgggccgggcttttcccctcctggaagaaatgggcggtccccgtgaagctcttgacaggagcccggcctcgcctaagccctagccaccagttgccatcacggtctccgccgagccgggatcctcagccgcttcccgcgcaggcctgctgttcccaatccggccacaagggggcagccccgcgcgcagcctctctgcctgcagccctgagccccggggaaggcgaggccgctccgggccggagcttccagcgcctgctcgcccatttatgggaggcgggcgctatccccactttacagccggggctcgacgaatcaaggccacacaggcagtgggagcaaaggcaaagcccggcaggtgtggggctgggtccctaggggtggaggacggcgggcgggcgccctgctcgtgctgcgagtgcccagccccagcccgcaggcgtcgcctcgccttgcccgccctgctcatgccgggccttccccacccgactgcgcccagcctccttcacccggtcccctcccgctttaccaatccctgccccacgcagctcctcagagccccagggctcttgcagccctaaggggctggactgtgttgcccgcccgcactatgggatgcccgggcgggctcgcacctcccttcttatctgtgctgccctccgtgcccagcattgcgcctggggtgcagggaactcacctggagggagggagggagggaatgaatgaatgaatgaatgatggggagcctgtggaccagcagccaggggacgcgccggctcctctttgcagggactccgagacgcgccttaattcatctcccagaactgtcggcccagctgggaagccaggcagggagggggacgggccccccgcaggctcgcggcagagacgggaaaggcgcaggtgccggactcgcagacagcttggcgcccgccacccgctatccatccagggaggggcctgggccgggagagggcgcctgaggagacagggccccgccgtgaccacaggcccctcgcgtctccgcaggacttcatctgcgtgtcgtacctggagcccgagcagcaggcgcggacgctggcgtcgcgggcggacacccaggcccaggcgctgtgcgcgcagtgcgcggagaagttcgcggtggagcggccgc

SEQ ID NO: 4600 - DNA, 2731 bp, Homo sapiens
  source 1..2731: mol_type = genomic DNA
gtgcgtccgcgccccagtgtcgggtctgcgtggatcggtccttccaggacaccgtcgccttcccggccgcgtcggagtccggcggcgacctgcctctgaaacatggcaggctcggatgctgagtgggtaaccattgccaataaccttctttttaagtgtcatatacatctgagaatacatgaacttcaagactgtgatgctaatgtttttattgctctttatcagtctattttgggagaaaaggtaccagacctcatagttattcctaggagtcaagaagatgatgcacacaatgtacaagcagtaattgattcactggccttggactacttgcaggtcagcttgtctcacataacaggagaaaatatagtgaaaggagataaagaatctattaagaatctcctggaaatatttgatggtttgttggagtatcttacagaacgcatcagtgaaacatctcatgagaaaagtgaaactgaacagtattttaaagaatctgatcgaggagaacgtttggaagagccagaaagtactaaagaatctaaatcatcatggaaaagagtttcttttgggaggtgctccttgtcttctgagatgttgggcccctcttgggatggagatgaagcagaatccactggtgaaatcattagacttggagacacagcacacaccttttctctaagaagtaatggtgctcaatgtcctaatgaaatgctgtctaaaaaagccttagcctcaccaagttctaaatcacatgaagatatgttgtaccctcctagtgttttgtccaagagtaggacatcctttgttgaagacacggaaaccctttctgtgagtgggattccaaatgctaggaagctaggggagcctatccgagcagctattcctttacatccaccctaccacccttcagagcctcgagcaccctgccccataggaaaagaatacttgcattcaagtcactgctccccagccgtaaattctactggagagcatacggaattttctggggatctagatgatggacttttcttaatttccaagttgcctaaaggcagcaaatgggaagtatatccagctcaggtccaagggcctaggacaaggaagcctcccaaaggaaaaagaaatgaaaacagagctacagcctcatcctgcaattcacctttcccccagaggccaagaaagagattaacagaacaagaattacatgatgtatcagaaaaactctctcagcggctttctgaactagattggatgttaaaaagtgctctgggtgatcggattaaagaaaagactgaccataaagaagaaaatactggaaatgaggaggtagaggatggaactgaggagacactgtctcagcacagtgatggcatcgtggagtatgggccaaagaagtcaaggccaggactttccatgcgtagaaagccaccctacagatcccattcgctctctccatctccagttaacaaacacaaacagttccacttggagagaaaaaggcagcgcaagccaagagaaacagatgtccgccaattccaagcacaggcgtttactgaagcatttgaaagggaactaagaagacataaagttcaagagaatattggacctctaagaatacatgagaaggaggaggaaacagaaaaaatatacagaggagaagctgttcgtaaaggaactccagaatgtagtcagccctggaagatttactctagaaaaaccacaacgcagagtctaagaggtggcctcccaaagccaaataaagcagttccaatgaaagtaagtgaacacagtctcctgccccttatgctggagcagtttccgtttctttatgtttctggcccaacactaagcaaaatgtggaaacagcaaattgcacaggttgaacagcttaagaaagaagcatgtagagaaaatcgatcaaagaagaaactccaagatgaaatagaagaagccctaagaaggcatgacctccttactacccttgtcaagaaagaatatgaacataacaagagactgcaagacttcaaggactgcattcgtaggcaaaggttgacccaatcaaagataaaagaaaatcgacagcaaatcgttcgtgctcgaaaatattatgatgattatagagttcagttgtgtgcaaaaatgatgagaatgaggacccgggaagaaatgatatttaagaaactgtttgaagaaggtttaaacattcaaaagcaaagattacgagacctaagaaactatgccaaagaaaagcgagatgaacaaaggagacgccaccaggatgaactggactccatggagaactactataaggaccagttttcattgctggcagaagccatatcacaggaacatcaagaacttaaagccagagagaaatctcaggcccagacattacataaggtgaagagggagctgagatctaagatggagaaggaaattcagcagctgcaggacatgataacacagaatgatgatgatgttttcttccgggaactggaagctgagcgcttcagatctcggcttcagctggcttcctttcagtacagtaaaagtccctccctatgaggccagacttgataatagtaggtgaaggttctggaggcctttaccaggacagagctagaatcgagccagtaaacagtctaagccagaaaaataattttcaaatgctttacctgtattttcattccagtactttttatgattttttaaataaaaattgttttct

SEQ ID NO: 4601 - DNA, 6683 bp, Homo sapiens
  source 1..6683: mol_type = genomic DNA
cccgcgcgcgaggccgccggcggccgctctgccgtgggctcggcccgggctgccacgagcgtgcgggcctcgccgggcatgtcctaggcggcggccccgcccagcgctcggccgggcgggcgggcgggcgcgagggcagggaccgagccgggccgagctggggaacaagccggggaccaagccggggaccaagccggggactaaggcgagccggagaccgagcccgaacagcagtcccgcagcgtggacaagcagcatgccgtcatcaactacgaccaggacagggacgagcactgggtgaaggacctgggcagcctcaatgggacgtttgtgaatgacatgcgcatcccggaccagaagtacgtcacgctgaagctcaacgatgtcatccgcttcggctacgattccaacatgtatgtgctggagcgtgtgcagcaccgagtcccggaggaggcactcaagcatgaaaagtacaccagccagctgcaggtgagcgtgaagggtttggcgcccaagaggagcgaggcactgccggaacacacaccatactgcgaggcctcgaaccccaggccggagaagggggaccggagaccaggaacagaggcagcctcttaccgcacacccctgtatgggcagccctcctggtggggtgaggacgatggtagcacgctgcctgacgcccagcgccagggagagccctacccagagcgccccaagggaccagtgcagcaggacggggagctccacggcttccgcgcccctgctgagcctcagggctgctcgttccggcgggagcccagctacttcgagatccccacgaaggagaccccgcagccgtcgcagccccccgaggtgccggcacacgagatgcccacgaaggatgcagaggcaggtgggggcggagcggcccctgtggtgcagagccacgcctccttcaccatcgagtttgatgactgcagccctggcaagatgaagatcaaggaccatatcaccaagttttccctgcgccagcggcggcccccgggcaaggaggccacacctggcgagatggtgtcggctgagaccaaggtggccgactggctggtgcagaatgacccgagcctgctgcaccgggttggccctggggatgaccgccacagcaccaagagcgacctgcctgtccacacccgcaccctgaagggccacaagcacgaggacggcacgcagagtgactcagaggaccccctggccaaggcggcctcggccgctggggtgcccttggaggccagcggggagcaggtgcggctgcagaggcagatcaagcgggacccccaggagctactacataaccagcaggcctttgtcatcgagttcttcgacgaggacacaccccgaaagaagcgctcccagtccttcacgcacagcccgtccggggaccccaaggccgacaagcgccgtggcccaacgccggccgatagggaccgccccagtgtcccagccccagtccaggcagggggccgcagctcggggccacagagggccggctcgctcaagcgggagaagacagaggaacggctgggcagcccctcgcccgcctcccgaacccctgcccgccccttcggaagcgtggggcgccgctcccgcctggcccaggacttcatggcccagtgtctgcgggagagctccccggccgcccggcccagccccgagaaggttcctccggtgctgcccgctcccctgacaccccatgggaccagccccgtgggccccccgaccccaccgcccgcccccacggacccccagctgaccaaggcacggaaacaggaggaggacgacagcctcagtgacgcagggacatacaccatcgagaccgaggcgcaggacacggaggtggaggaggcccggaagatgatcgaccaggtctttggggtgttggagtcccctgaactctccagggcatcttcggccacctttcgcccagtcatcagaggggacagagatgagtctgatgacgggggcgtggcccagcggatggcgctactgcaggagtttgcctcccggccactgggtgcggccccccaggcggagcaccagggcctcccggtgccgggctcccctgggggtcagaagtgggtgtcccgctgggccagcctggctgacagctactcagacccgggcctcacagaggatggcctgggacgtagaggcggggagccggaggggtccctgcctgtgcgcatgcggcgacggctccctcagctgcccagtgagagggctgacagccctgcgggcccagagagcagcaggaggagtgggcctgggccaccggagctggacagtgagcagcccagccgcctcttcggccaggaggagttggatcctgacagcctcagcgatgccagtgggtcggacgggggccgaggccccgagccaggggtggagccacaggacagcagacgcaggagcccccaggaggggcccacgtggagcaggggtcggcgctcaccaagggcccccggggagccaactcccgcctctttcttcattggggaccagaatggggacgctgtgttatctaggaaaccgcttgcggctccaggggatggggagggcctagggcagacagcccagcccagccccccagcacgggatggcgtctatgtcagtgccaatgggagaatggtcatccagctacggcctggacggtccccagaacccgacggccctgccccagcctttctccggcaagagagcttcactaaggagccagccagtggtcccccagcgcccggcaagcccccccacatctccagccacccgcttctacaggacctggccgctacccgggccgcacgcatggacttccactcccaggacacccacctgatcttgaaggagacggagacggccctggcggccctggaggcccgactcctctctaattctgtggatgccgagtgtgaggggggcagcaccccgaggccgccggaggacgccctgtctggggactcggacgtggacacagccagcaccgtcagcctgcgtagtggcaagagcgggcccagccccacaaccccccagcctctgcgggcacagaaggagatgtcgccatccccgccagctgcacaggacccgggaggcaccgccctggtcagtgcccgtgagcagtcctcagagaggcagcatcacccacttggcccgacggacatgggccgtggagagccggtacggcgctcagccataaggcgtggccacaggccccgagggtccctggattggcccagtgaggagcgtggccctgtcctcgcccacctacccagctcagatgtgatggcctccaaccacgaaacccctgaggccaccggggcaggacggctaggttctcgccggaaaccagcggccccaccgccatccccagctgcccgggaggagcagagccgtagctcagccagctcccagaaggggccgcaggccttgacccgctccaacagcctgtccacccctcgccccacacgggcctcccggctgaggcgggcccggctgggggacgcttcagacactgaggctgcggatggtgagcgggggtccctgggcaaccctgagcccgtgggccggccagctgctgagcaggccaagaagctgtcacgcctggacatcctggccatgccccggaagcgggccggctccttcacagggactagtgaccccgaggcagcccctgcccgcaccagcttctctggccgcagtgtggagttgtgctgtgccagccgcaagcccaccatggccgaagcacgggctgtctccaggaaggctgccaacacagccaccaccacgggtccccgccagcccttcagcagggcccgctcaggcagtgcccgatacacctccaacacgaggcgccggcagcagggctcggattacacgtccacctctgaggaggagtacggctcccgccacggctcccccaaacacacacgctcccacacctcaacagccactcagaccccgagggctggcagctccagccgggctcgttcccgggcccccggcccccgggacacggacgacgatgaggaggagcctgacccttatggtttcatcgtgcagacggcagagattgcggagattgccaggctgagccagacgctggtgaaggacgtggccatcctagcccaggagatccacgatgtggctggggacggtgacacactgggctcctcggagcctgcccacagcgcctccctcagcaacatgcccagcacccccgcctcgaccatctctgcccgggaggagctggtgcagcgcatccccgaggccagcctcaacttccagaaggtgccgcccggctcgctgaactctcgggactttgaccagaacatgaacgacagctgtgaggacgccctggccaacaagacgcggcctcggaaccgagaggaggtgatcttcgataacctgatgctgaacccggtgtcccagctgtcgcaggccatccgtgagaacacagagcaccttgccgagaagatgaagatcctctttcagaacacagggagagcttgggaggacctggaagccaggatcaacgccgagaacgaggtgcccatcctgaagacatctaacaaggaaatcagctccatcctgaaggaactgaggcgggtgcagaaacagctggaagttatcaatgccatcgtggaccccagtgggagcctggacctgctcacaggaaacaggagcttggccagctctgcacagccggggctggggaagggccgcgtggctgcccagagcccaccctcacccgcctcagccgaggccctgctgccagccctgcccctgaggaatttcccacagcgggccagctgtgggcctcccagcctcccggaccccaccttcctccctgatgccgagaggttcctgatctaggccccagacctggccaggccagcctccctgtgcgtgtgcgtctctgccttccgtccgccgcacacccgcctgcctggccgcaggtggttctccctgaagacccccacatgtgccatatccctgtgggcgggtgcctcccacgcccttgccccctcgtcagctcccagccagcaccctactcaccctgtccagccccatggccacccccacccctgcctcgccccctacaggcctctgggcccagctcctggccaggctgctgccaaggtcaagccctcaagggcattaccccgcctcctcttcatcactgttatttttgtctttagctttaaaggaaagagttgttggtgccattgcaggtgccccctccaggcctgactggctccgccaggcactaacctgccataaccctttgtgctggcctgcggccaggcagaggaagagaggtcgactgtggggtcatttggtgccaaacatggaggtgggcaggctcacctgttcctgggactgtctgagatggcagggcacttgccctggtggctcccacctgaccccaggccttttataggcaggagccccactgcttccagcctctggtgccaacacagttgccaaacccattgagcttggggctgccctgtggaggcctcctgggtatggaccaggggcttgttgagagctgagccatgcacacaggtgcagacaccccccaactcccatgcacacggctagtccaggcgcctccacgctgcaccgtgaggactgcagggcatgtccccgtgaggggctatgggcctctgtaggtgggcttccaaggtcctgggtgcagccgggtgcatggcagcccttctggcgggggtgagcgcacgaccaaagtcactggaagccgggtttccggaagctcgcagcttggcctgcaccacacgccctccccttttggcttcacgccatcaggcctcaagtgggcatgggggcagggacgggcccaggaactgttgttttctcaggattctttcagctgggaacatggcaggtgagcagagcttggtgcctctgccgtggcccctgctggggcagcccgtgttgccggagcctctaagccaaagagcccgttggccgtggttggtgggggtggacgtgggggtgtcccacctggaccagactggcgtgggtgagctccacaccctgcctggcaatggtatgagagtcggacctggacagggccagctgctgggggagcggcactggggactggaggctggaagcgggtggtgtgtgtcccctgtttacttttagctgagctggggttgggtgtacgggttctgttcctctgagcctgcggcccacctgatgtttacgtgtgtgtgtgagggggggcgggggtggcaggtgtccccccctggtccccgccccaagagcctgctgtctgtatggaggaggtgctagcccggtccaccgggctgctgcccacccctgcatgccccagttgcccaccccgcctgcccctggacatgaagtggtcacgcttcatccacggctccttcccacccctcggcagtggctgtgcaatgttttaagttcacaagttcctgctcctccccacactgagctcctttgttcctccccctccagcctttgcctgggaactggtccttgtttgccgggcttctcggagggttcactgtacattcgttctcaggtggtcttgtggctgtctttcggaaaatggttattttatatgatttgtcatggaatttgttctaataaatcattcttctatcaca

SEQ ID NO: 4602 - DNA, 756 bp, Homo sapiens
  source 1..756: mol_type = genomic DNA
gccacagtcggattcgctgccgcagcagccgccacccccaggagccgccgggaccctcgcgtcgtcgccgccgcggcccagatccccacaccatgccgtcggagaagaccttcaagcagcggcgcaccttcgaacaaagagtagaagatgtccgacttattcgagagcagcatccaaccaaaatcccggtgataatagaacgatacaagggtgagaagcagcttcctgttctggataaaacaaagttccttgtacctgaccatgtcaacatgagtgagctcatcaagataattagaaggcgcttacagctcaatgctaatcaggccttcttcctgttggtgaacggacacagcatggtcagcgtctccacaccaatctcagaggtgtatgagagtgagaaagatgaagatggattcctgtacatggtctgtgcctcccaggagacgttcgggatgaaattgtcagtgtaaaaccagaaaaaatgcatctcttctagaattttttaaacccttaccaaggaaaaaaaaagggatgttaccaactgagatcgatcagttcatctaatcacagatcatcaaacagtagtgttcccacctaggagtgttaggaagttgtgtttgtgtttcaagcagaaaaactgagctccaagtgagcacattcagctttggaaactatattatttaatgtaggctagcttgttttcaaattttaaaagtttaaaaataaaatactttgcattctaaaaaaaaaaaaaaa

SEQ ID NO: 4603 - DNA, 6166 bp, Homo sapiens
  source 1..6166: mol_type = genomic DNA
gcggccgcgcggcggggccccgggaggcgggtcgctgagcggggcgcgcggccccgaggatgcgggagcgggagcgggagcagcgctggcgtcaatgctcccttcctcgggccattggagactccgttgctttttaatggcggcagcggctgctgggtgagcagctggaggccggacagtgttcgtcccatccggagaggatcgctttctcctggcgtcaccagcgctgggttggtgggggtagcttttccctctttgctcctccattcttgaagaaagaagaagatgccactgccatttgggttgaaactgaaacgcacccggcgctacacggtgtccagcaagagttgcctggttgcccggatccaactgcttaataacgagtttgtggagttcaccctgtccgtggagagcactggccaggaaagcctcgaggccgtggcccagaggctggagctgcgggaggtcacttacttcagcctctggtactacaacaagcaaaatcagcgccggtgggtagatttggaaaaacctttgaagaagcagctggataaatatgcattggaacctaccgtctattttggagtggtgttttatgtgccttcagtttctcagctgcagcaggagattaccaggtatcagtattatctgcaactgaagaaagatatcttggaaggaagtattccttgtaccttagaacaagcaattcagctagcaggcttagctgttcaagcggattttggtgactttgatcagtatgaatcccaggactttcttcagaaatttgccttgtttcctgtgggatggttacaagatgaaaaagtattggaagaagcaacccaaaaagtggccttactacatcagaaatacagagggctcacagctcctgatgctgaaatgctgtacatgcaggaggtagagagaatggatggctatggagaagagagctaccctgctaaggatagccaaggaagtgacatatccattggagcgtgtcttgaaggtatctttgtgaaacacaagaatggaaggcatcctgtggtatttaggtggcatgacattgccaacatgtcccacaacaagtccttttttgcattagagctggcaaataaagaggagaccattcaatttcaaactgaagacatggaaacagcaaaatacatttggagactctgtgttgcgcgacacaagttttacagactaaaccagtgtaacctgcaaactcagactgtcacagtgaacccaatcaggaggaggtcttcttcaaggatgtctctgcctaaaccccagccctacgtgatgcctcccccaccgcagttgcactataatggacattatacagaaccatatgcttcttcccaagataacctctttgtgcccaaccagaacggatactactgtcactctcagacaagcttggatagagcccagattgacctcaacggtcggatccgtaatggcagtgtctacagtgcacacagcaccaactccttaaataatcctcagccctacttgcagccctcgccgatgtcgtccaaccctagcatcaccgggagtgacgtcatgaggcctgactacctcccgtcccatcggcacagcgccgtgatacccccgtcctaccgccccaccccagactatgagactgtgatgaagcagctcaacaggggcctggtgcatgcggaacggcagagccactcgctgcgaaacctcaacatcggcagctcgtacgcctacagcaggcccgcggcgctggtctacagccagcccgagatccgcgagcacgcacagctcccctcgccagcggccgcacactgcccgttcagcctgagctacagcttccacagcccgtctccctacccctaccctgccgagcggcggcccgtggtgggcgcggtcagcgtgccggagctgaccaatgcgcagctgcaggcgcaggactacccgtctcccaacatcatgcggacgcaggtgtaccggccacccccaccctacccgccccccaggcccgccaacagcacgccagacctgtcccgccacctttacatcagcagcagcaaccccgacctcatcacgcggcgcgtgcaccactcggtgcaaacgttccaggaggacagcctgcccgtggcgcactcgctgcaggaggtcagcgagcccctcaccgccgcgcgccacgcgcagctgcacaaacggaacagcatcgaggtggccgggctcagccacggcctggagggcctgcggctcaaggagcgcaccctatccgcgtcggcggcagaggtggcgccgcgagccgtctcggtgggctcccagcccagcgttttcaccgagaggacacagcgagaagggccggaggaggcggagggcttgaggtacggccataagaagtccctgtcggacgccaccatgctaatccacagcagcgaggaggaggaggacgaggacttcgaggaggagagcggggcccgggcgcctcctgcacgtgcgcgcgagcctcggcccggcctggcccaggacccacctggctgccctcgcgtcctgctcgccgggcccctgcacatcctggagcccaaggcccacgtcccagacgcggagaagaggatgatggacagcagccccgtccgcacgaccgcagaggcccagcggccctggagagacgggctgctgatgccctccatgtcggagtccgacctcaccacgtcaggccgctaccgagcccggagggactctctgaagaaaaggccggtgtcggaccttctctctgggaagaagaacatcgtggaagggctcccgcctctagggggaatgaaaaagactcgagtagatgcaaaaaaaattggtcctcttaaactggctgccctaaatggactctccctatctcgagtgcctctgcctgatgaaggaaaggaagtggctaccagagcaacgaatgatgaaaggtgtaaaattctggaacaacgattagaacaaggaatggtattcacagaatatgaaagaattcttaagaaacggctagttgatggggagtgctcaacagcacgactccctgaaaatgcagaaagaaatcgattccaagatgttcttccttatgatgatgtgagagtggagttggtcccaactaaagaaaacaacactggttacatcaacgcatcacatattaaggtctctgtcagtggaatcgaatgggattatattgccacacagggaccattacagaatacctgtcaagatttttggcagatggtatgggaacagggaattgcaattatagcaatggtgacagcagaagaggagggtggaagggagaagagctttaggtactggccacgacttggttccaggcacaacactgtcacctatggaaggtttaagatcacgacccggttccgcacagactctggctgctatgccaccacaggcctgaagatgaagcacctccttactgggcaagagaggaccgtctggcacctccaatacacagactggcctgaacatggctgtccagaagacctcaagggatttttatcatatcttgaagagatccagtctgttcgacgccatacaaatagcacaagtgatccccaaagccccaaccctccgttgttggtccactgcagtgctggggtaggaaggactggcgtggtgattttgtcggagatcatgatcgcctgcctggaacacaatgaggtgctggacatcccgagagtgctggacatgctgaggcaacagagaatgatgctggtgcagactctctgccagtacacatttgtgtacagagtcctcatccagttcctgaaaagctccaggctcatctaagctcccacaatttcttacggggccagtcatgtgaagcgtttacagcttaaaaaaaaagcgcttgcctaactcatactttcccgttgacacttgatccacgcagcgtggcactgggacgtaagtggcgcagtctgaatggcggcacgctgaaggaaacgtgcgaagcacaggctgaagaggggtttctaacctgggaaaggtgctcaaggaggacttggtttcaagggccttgccctgccccggtctgtccggtttgcagtacttgcacacattttggagattgtattttctagacaattctctattttactgaagctatgctgggcaattctggcaatcattaaagtgcatagatttctatcttaaactaatttttgataatggagtttttattttatgacaaatatttagggatttttctagtgagaaacaactttgtgtaaggatgatccacagatatgagttgctcctatataactttgtatttaaaaatcatgttattatcttttgttattttttaaaaaccttgggtacttaataatggtttagttgccaaactgaaaactatactgagaatctgtgttattttgaaacatcaaaaggatttttctatccagaacattttttatcctaaaaattctatatagttgtaccttctgtttttcaaatgagagctcaattcatttagatactgaaatgagtcagttaatgtaaagttgaggatgaaggcacattatttaaaatgtaagagaataagcattattttttcagtattattcatagatctaaatgaatttgattttattggttgaaaatgaagtgaaaaacaattgcctagggtggttttaagcacttttttgttaaaaacaaatctgagttttaatatatgtgttgctttgtagatgacacaataacaatgggcgctgagaagcgttttgggagagattaaggactaagagtatgtaagatgactaggacaagagtaggtggagtgtgatggtaaatgcaggatgccttcgtctttacaaaaatgcagtattatctatactcagactgaggtgctgggatggcgagcaggggaccccacagcactgtccccagggaattcaagtcctgtgaccgccagtgacttactccgtttccttggggcttttcccacctcaacctgtattgtttctttttcataaataaattcagcattatagtatcattaaaagaagccttaaagaggcgtatttttccttttggttgaaggaagggaatagttaataatagttttcacctcttctcccaaaaagtacagtccaaatttgtgcacagagattgctgtggtattcaagaggtacttgcattttagctccttaataattccctggccagtgttagctgtttagtgccccctcacccatcccatttaggcacatcccaatagacagagccaggctgagttacagggggagagtgtcatctctggccccgattaagatggccttgtcacagtgaccgctgagtaggcatggatgagtgggatatttagctgaggaaccctttcccttttccttctttttggggtctcttcttacagtgaacttccaaaatgtcaaatctagggctgtttcccaaattacactattctaggcatcattttgattcccatgtcactccttaactcacttccttgagcactacatgtatgttgtcagccacgagacaggacttcctaaatagtgtgtgcaccagcctaactctgccttacccagaaaccaaccacctaagaggaaaactcagaagatattaatgaaaactaattgaaagtacgcacacttctcatgtaggaacaaaattaaaattttacatttttattttacaaaattaaaaaattacattttgtaggaacaaaatgtaaattttgtaaatacaaaattctttttaaagtcctgtttaaagaacagtagaactaagtgaaaatattcagaacgagctccttagaagaaaggaataagaactttttactggaactattttccatctctagaaaaagtgcttcttcccctccccctccctctccatggtacgtttttgtgaaaatgcttttctgtcaggtttaaacaaacagtttgacatagctcgttgacaagaacatattgtaaaacaaatctaattaaagagtaatatgtggtctatttgtgttcctgttgtaataatttgataagtaaacttctgagggcaaaattactgtttaatattactcttaaaatgttgcatgtttggcgtcattcctaagagccatgtaattttaaacttttaattgcagttagtgaatatgaaaggatttctgaataaaaatctatccaca

SEQ ID NO: 4604 - DNA, 3069 bp, Homo sapiens
  source 1..3069: mol_type = genomic DNA
gcgggcaggggcggcgagtgcgcgggcgctcgccgccgcccttctcggcgggcagcgcgcgaggaccaggccgaggaggaagtggcggcggcggcggcgggctccccgcccgaggaggaagatgcagacctttctgaaagggaagagagttggctactggctgagcgagaagaaaatcaagaagctgaatttccaggccttcgccgagctgtgcaggaagcgagggatggaggttgtgcagctgaaccttagccggccgatcgaggagcagggccccctggacgtcatcatccacaagctgactgacgtcatccttgaagccgaccagaatgatagccagtccctggagctggtgcacaggttccaggagtacatcgatgcccaccctgagaccatcgtcctggacccgctccctgccatcagaaccctgcttgaccgctccaagtcctatgagctcatccggaagattgaggcctacatggaagacgacaggatctgctcgccacccttcatggagctcacgagcctgtgcggggatgacaccatgcggctgctggagaagaacggcttgactttcccattcatttgcaaaaccagagtggctcatggcaccaactctcacgagatggctatcgtgttcaaccaggagggcctgaacgccatccagccaccctgcgtggtccagaatttcatcaaccacaacgccgtcctgtacaaggtgttcgtggttggcgagtcctacaccgtggtccagaggccctcactcaagaacttctccgcaggcacatcagaccgtgagtccatcttcttcaacagccacaacgtgtcaaagccggagtcgtcatcggtcctgacggagctggacaagatcgagggcgtgttcgagcggccgagcgacgaggtcatccgggagctctcccgggccctgcggcaggcactgggcgtgtcactcttcggcatcgacatcatcatcaacaaccagacagggcagcacgccgtcattgacatcaatgccttcccaggctacgagggcgtgagcgagttcttcacagacctcctgaaccacatcgccactgtcctgcagggccagagcacagccatggcagccacaggggacgtggccctgctgaggcacagcaagcttctggccgagccggcgggcggcctggtgggcgagcggacatgcagcgccagccccggctgctgcggcagcatgatgggccaggacgcgccctggaaggctgaggccgacgcgggcggcaccgccaagctgccgcaccagagactcggctgcaacgccggcgtgtcgcccagcttccagcagcattgtgtggcctccctggccaccaaggcctcctcccagtagccacggagccgggacccagaggggcagcgcagggcgcagagcacacccgctgggccagcagctcccaacggcgatgctactactaagaatccccagtgatctgattcttctgttttttaatttttaacctgattctctgatgtcatgatctaaatgaggggtagtgggggatggaagagagtaccaggtggtccaccgttggggagtggggccgtccgcctgctctctactgtgcagacctcctaactgagtttacacacgcttgtgtttgcaacactaggtctggatgggaggtgaggggtgtgcgtatggctgccatgccagtgtctgtgcacatccctgtctgttggtctccatggccactgtggaccgggacccttgggggaagcctgcccatgtcgggctgtgggaggctgatcggtgcatgtgagagtggcttcccttctgcctgactccccactccctgacctgccccttccttgtttttcctcctactggtctccaccaaggctttgttagcccccaccctgcctggtgtgcagctaacccctccctccccacagccagaggaggccacagacccctcaggggagttccgcgctggggtctgggctgtgctccctcactaaagggaaggaaaggaagctgggcgtcctctgggccccccaacacacgtcccatttagccctgcacagcggtctccttcccctaagccagcactgctgctccctggagcccgggaaggaggctgcctggctggaggcccgagccgatggcgcctgtgctgaggatttgtgctgtgatttgggcaaatcattccaggtctttgggcctccacccccttgtctctagtggacatttgagatcagagagcaccacagggctggctttgtgccctaacccctgggatgcagcctgcctttccataaagtcacctaggtgaggataggcgcgggagcctcggcatgacaccatggagatcggggccctcttcccagtgggttcactccttttcacacctgctgggtccctcctcacccagcaggcctggtccacctctcattgcaagccccaagcactgagccagcaggtgccagggagccacccgccccccatcgcttctgcacacctcagactcaccccatcaccttggcagcaaagcactggctctgccgtctgacccctgatccaggcagccccctctgcagagaaaagggttggggagaagcctctgcagtcctggaagatgtggggtgctgggtgagaggcatcagcccccacaagtatgtttttgtgtcttaagatagcagtttactttgaaaaagtgaaaaaggcttccgggctgtcctctgcccagtgagatggaggacgctagagaaagtgctgagtgtcccgagagaggcccccgagccagtgcatggaggtccttcggcctggctcagctgggctgcaggatgcccactttgaggagggaggcacagggcttgggcgaggggcagaggccatcagaactgcccggcttttttggaaactgaggacccaacaactaaccacgtttacacgacttgagttttgaaccccgattaatgtctgtacgtcacctttcctagttctgaccctgagccctggggaacaggaaagcgtggctggcctcttgcactgctttgtctccaaaataaactactgaaatcaaaccgcatttc

SEQ ID NO: 4605 - DNA, 2635 bp, Homo sapiens; identical to SEQ ID NO: 4582
  source 1..2635: mol_type = genomic DNA

SEQ ID NO: 4606 - DNA, 2529 bp, Homo sapiens
  source 1..2529: mol_type = genomic DNA
atgacgtcagatcgcccccgcccgccgcgcagcttccccgagcgagaccaaaacaggtggaatccgggctggagccggagctccggcggcgcgggtggcggcacgtccctccaggtgggtggctctctgggtctggcgactcagcgctcctcagccttgccccctggtgcccgctcgcgactgtcatcgccccatcacttctcgttgcagacagtaccacaggcacctggagtaccggcatcggtcgctgtggcccccgagtgtccgtcagagcctaggggagcctgccctcccgcgcctcgtcggggcccggccaggcaccttggccgccggcgcacggacgcgggcacgagcactagatcacggctgctggacctcggcacgttgacaagatttctctggggtaccgcggaggattactttgaatttcggtggtcgcctgtggtctggcatatttagaacttaagtctattatttcgggcaccatgactttgaggcttttagaagactggtgcagggggatggacatgaaccctcggaaagcgctattgattgccggcatctcccagagctgcagtgtggcagaaatcgaggaggctctgcaggctggtttagctcccttgggggagtacagactgcttggaaggatgttcaggagggatgagaacaggaaagtagccttagtagggcttactgcggagactagtcacgccctggtccctaaggagataccgggaaaagggggtatctggagagtgatctttaagccccctgacccagataatacatttttaagcagattaaatgaatttttagcgggagagggcatgacagtgggtgagttgagcagagctcttggacatgaaaatggctccttagacccagagcagggcatgatcccggaaatgtgggcccctatgttggcacaggcattagaggctcttcagcctgccctgcaatgcttgaagtataaaaagctgagagtgttctcgggcagggagtctccagaaccaggagaagaagaatttggacgctggatgtttcatactactcagatgataaaggcgtggcaggtgccagatgtagagaagagaaggcgattgctagagagccttcgaggcccagcacttgatgttattcgtgtcctcaagataaacaatcctttaattactgtcgatgaatgtctgcaggctcttgaggaggtatttggggttacagataatcctagggagttgcaggtcaaatatctaaccacttaccagaaggatgaggaaaagttgtcggcttatgtactaaggctggagcctttgttacagaagctggtacagagaggagcaattgagagagatgctgtgaatcaggcccgcctagaccaagtcattgctggggcagtccacaaaacaattcgcagagagcttaatctgccagaggatggcccagcccctggtttcttgcagttattggtactaataaaggattatgaggcagctgaggaggaggaggcccttctccaggcaatattggaaggtaatttcacctgagtctcagggaaccacgaagggatatggcaatgagtagagcatgaaggtagaacagtctatatactcttgtgacacatacaatccctaccttgtgctgccaagtaactcatttttgtgcaattctcagtataagccctttgtcgtttctgtgcctatttaaagtctcctaaaggtgtaattgactaggaaggatgtagttctacactgccatttacctatttaaattcatccttgtgaatatctttgttgttgttgttgagacagagtctcgctctgtcacccaggctggagtgcagtggcgtgatcttggctcactgcatcctccgccttccaggtttaagctattctcctgcctcagttgcccgagtagctgggactacaggcatgtgccaccacgcccagctaagttttgcattatcagtagagacggggtttcaccatgttggccaggctagtttcgaactcctgacctcaagtgatccacctgcttcggcctctgaaagtgctgggattacaggcgtgagacactgcgcccagcctcatccctgtgaatttcttattgtacacaagttctttcactatctgtgtgcagtgctctgaggggacagacaaggcttgggtgtatatgccaaccagatctcattgaagtatcagcttgtttggtactaggtgcaagtgtagcatgtcacatgtgaccatgttggatcattgacaatttttaggtatgtactgacctacatttatgatgaagatcctgagcggaggttaagatattaagttattttccatatgaatcagaattatattgattctgtgcaatcaaaacaaaaggcagaatagaatgctgagattggttaagtttgcaatgaccatcttgaaccacagatttctgctatgtgtcatcaaaacatctagttctgagtaacattttcacgattgttataaaattataggtgtgaacttctaaaataaaggaatgctaataaaa

SEQ ID NO: 4607 - DNA, 2776 bp, Homo sapiens
  source 1..2776: mol_type = genomic DNA
ggcagcaccatgaactaagcaggacacctggaggggaagaactgtggggacctggaggcctccaacgactccttcctgcttcctggacaggactatggctgtgcagggatcccagagaagacttctgggctccctcaactccacccccacagccatcccccagctggggctggctgccaaccagacaggagcccggtgcctggaggtgtccatctctgacgggctcttcctcagcctggggctggtgagcttggtggagaacgcgctggtggtggccaccatcgccaagaaccggaacctgcactcacccatgtactgcttcatctgctgcctggccttgtcggacctgctggtgagcgggagcaacgtgctggagacggccgtcatcctcctgctggaggccggtgcactggtggcccgggctgcggtgctgcagcagctggacaatgtcattgacgtgatcacctgcagctccatgctgtccagcctctgcttcctgggcgccatcgccgtggaccgctacatctccatcttctacgcactgcgctaccacagcatcgtgaccctgccgcgggcgcggcgagccgttgcggccatctgggtggccagtgtcgtcttcagcacgctcttcatcgcctactacgaccacgtggccgtcctgctgtgcctcgtggtcttcttcctggctatgctggtgctcatggccgtgctgtacgtccacatgctggcccgggcctgccagcacgcccagggcatcgcccggctccacaagaggcagcgcccggtccaccagggctttggccttaaaggcgctgtcaccctcaccatcctgctgggcattttcttcctctgctggggccccttcttcctgcatctcacactcatcgtcctctgccccgagcaccccacgtgcggctgcatcttcaagaacttcaacctctttctcgccctcatcatctgcaatgccatcatcgaccccctcatctacgccttccacagccaggagctccgcaggacgctcaaggaggtgctgacatgctcctgctctcaggaccgtgccctcgtcagctgggatgtgaagtctctgggtggaagtgtgtgccaagagctactcccacagcagccccaggagaaggggctttgtgaccagaaagcttcatccacagccttgcagcggctcctgcaaaaggagttctgggaagtcatcagtgatgagcatggcatcgaccccagcggcaactacgtgggcgactcggacttgcagctggagcggatcagcgtctactacaacgaggcctcttctcacaagtacgtgcctcgagccattctggtggacctggaacccggaaccatggacagtgtccgctcaggggcctttggacatctcttcaggcctgacaatttcatctttggtcagagtggggccggcaacaactgggccaagggtcactacacggagggggcggagctggtggattcggtcctggatgtggtgcggaaggagtgtgaaaactgcgactgcctgcagggcttccagctgacccactcgctggggggcggcacgggctccggcatgggcacgttgctcatcagcaaggtgcgtgaggagtatcccgaccgcatcatgaacaccttcagcgtcgtgccctcacccaaggtgtcagacacggtggtggagccctacaacgccacgctgtccatccaccagctggtggagaacacggatgagacctactgcatcgacaacgaggcgctctacgacatctgcttccgcaccctcaagctggccacgcccacctacggggacctcaaccacctggtatcggccaccatgagcggagtcaccacctccttgcgcttcccgggccagctcaacgctgacctgcgcaagctggccgtcaacatggtgcccttcccgcgcctgcacttcttcatgcccggcttcgcccccctcacagcccggggcagccagcagtaccgggccctgaccgtgcccgagctcacccagcagatgttcgatgccaagaacatgatggccgcctgcgacccgcgccacggccgctacctgacggtggccaccgtgttccggggccgcatgtccatgaaggaggtggacgagcagatgctggccatccagagcaagaacagcagctacttcgtggagtggatccccaacaacgtgaaggtggccgtgtgtgacatcccgccccgcggcctcaagatgtcctccaccttcatcgggaacagcacggccatccaggagctgttcaagcgcatctccgagcagttcacggccatgttccggcgcaaggccttcctgcactggtacacgggcgagggcatggacgagatggagttcaccgaggccgagagcaacatgaacgacctggtgtccgagtaccagcagtaccaggacgccacggccgaggaagagggcgagatgtacgaagacgacgaggaggagtcggaggcccagggccccaagtgaagctgctcgcagctggagtgagaggcaggtggcggccggggccgaagccagcagtgtctaaacccccggagccatcttgctgccgacaccctgctttcccctcgccctagggctcccttgccgccctcctgcagtatttatggcctcgtcctccccacctaggccacgtgtgagctgctcctgtctctgtcttattgcagctccaggcctgacgttttacggttttgttttttactggtttgtgtttatattttcggggatacttaataaatctattgctgtcagata

SEQ ID NO: 4608 - DNA, 545 bp, Homo sapiens
  source 1..545: mol_type = genomic DNA
atcctttctacctccttattcagagaaggaaggatcttctcatgcacagaggcaacaaatggcaactttctgagtcctcatctataaaatgagcataataacatcacctacttaattggatttggtgaggattcactgggtgagttcatgcaaagcgctgagaacaggaccccccgcccccagtgaggagatgacacctagactgaagtagcagcagtaatgagctgacagcctcacatctacttttggtgtgccgtgaataagccatatgatcttaggtggtttggggaaagtgtaggggcaaccaaagatcatcggcttgactaggccctttgccctgaacctcatgaagaaatgataggaggcagacatatgtgcctaaaaagagcgttgagctcagagaagagcaactcggagttttgggggtgtgctttgatttgtgtacatcaatggcagaatcatccagcgaatcagatcacttccgctgtcgtgaccgattgagtccatgggctgccagatcaacgcacaggggaactcgaagtctt

SEQ ID NO: 4609 - DNA, 534 bp, Homo sapiens
  source 1..534: mol_type = genomic DNA
acacaccgcccagcgctcgcacgacgggcccctttcctgggcgtctactggcggggcccccgccccggttcccgggcggcacgatgaccgacacccggcggcgggtgaaggtgtacacgctcaacgaggaccggcagtgggacgaccggggcaccgggcatgtgtcgtctggctacgtggagcggctgaagggcatgtccctgcttgtcagggctgagagcgacggttctctacttttagagtcgaaaataaatcctaacactgcataccagaaacaacaggacactctgattgtgtggtctgaagcagaaaattatgacttggcccttagctttcaagaaaaagctggatgtgatgaaatttgggagaaaatatgtcaggttcaaggaaaggacccttccgtggacatcactcaggaccttgtggatgaatctgaagaggagcgttttgatgatatgtcatcgccaggcttagaattgccatcttgtgaattaagtcgccttgaagaaattgcagaacttgtggcatcatctt

SEQ ID NO: 4610 - DNA, 896 bp, Homo sapiens
  source 1..896: mol_type = genomic DNA
cggcgaggaaaaaaggcagttttgaagcatttagtggcaaaaggggtaggagacggctgctgaagtgtctactacattcaggggacctggaaggcttccagatatccgcaatgaacaatgaaaagaaattgtgaaagaaggcgcttccctcaagccggaactaatgaactcctgggtcacgtggtgcgcacgcgccaaaggcacacgataaaggaaaacgcgggcttatcgtggcctttaaaatccggcttgccaagacttccgccctcgatcaagatggtggttggacggccttcctaacctttacggggcctggcggtgctgacgcctgagctggtaggggtggagcaggtaggaaacagcaaatgcagaagctgctgcgcggaagtcggccatggactggaaagaagttcttcgtcggcgcctagcgacgcccaacacctgtccaaacaaaaaaaaaagtgaacaagaattaaaagatgaagaaatggatttatttacaaaatattactccgaatggaaaggaggtagaaaaaacacaaatgaattctataagaccattccccggttttattataggctgcctgctgaagatgaagtcttactacagaaattaagagaggaatcaagagctgtctttctacaaagaaaaagcagagaactgttagataatgaagaattacagaacttatggtttttgctggacaaacaccagacaccacctatgattggagaggaagcgatgatcaattacgaaaactttttgaaggttggtgaaaaggctggagcaaagtgcaagcaatttttcacagcaaaagtctttgctaaactccttcatacagattcatatggaagaatttccatcatgcagttctttaattatgtcatgagaaaag

SEQ ID NO: 4611 - DNA, 770 bp, Homo sapiens
  source 1..770: mol_type = genomic DNA
ctacgcctaggagggcccctgggtgttcacccacccccccggggggccccatcctgggccagggtccgcttcctcgagggaaggggcgaattcctggaaggtctccttccgggcgcagttgcaatggattgccttgggggtgctgaaccctgctgggggtacagagacgtttccgaaactcagcggctcggtcgcccccaaaggccaggcggaacacacgcccacaccgcggctcccttcccgaagctccccgcccgaggaggaagatgcagacctttctgaaagggaagagagttggctactggctgagcgagaagaaaatcaagaagctgaatttccaggccttcgccgagctgtgcaggaagcgagggatggaggttgtgcagctgaaccttagccggccgatcgaggagcagggccccctggacgtcatcatccacaagctgactgacgtcatccttgaagccgaccagaatgatagccagtccctggagctggtgcacaggttccaggagtacatcgatgcccaccctgagaccatcgtcctggacccgctccctgccatcagaaccctgcttgaccgctccaagtcctatgagctcatccggaagattgaggcctacatggaagacgacaggatctgctcgccacccttcatggagctcacgagcctgtgcggggatgacaccatgcggctgctggagaagaacggcttgactttcccattcatttgcaaaaccagagtggctcatggcaccaactctcacgag

SEQ ID NO: 4612 - DNA, 999 bp, Homo sapiens
  source 1..999: mol_type = genomic DNA
tttcccgtccctgcgcgggaagtggctggacagcaccgccaccacccgcgctgtcgtgggcctcctcgccggctccgtgtaggtcatcctgtgttccagaggcatcgttgttcgagcagaggaatctcgtgaaggaaagtgggccgagtggattgtacagcctctacaatatgccgaaaaatgccgggtctaagttgtagattttatcaacacaaatttcctgaggtggaagatgtagtgatggtgaatgtcagatccattgctgaaatgggggcttatgtcagcttgctggaatacaacaacattgaaggcatgattcttcttagtgaattatccagaaggcgtatccgttctatcaacaaactcatccgaattggcaggaatgagtgtgtggttgtcattagggtggacaaagaaaaaggatatattgatttgtcaaaaagaagagtttctccagaggaagcaatcaaatgtgaagacaaattcacaaaatccaaaactgtttatagcattcttcgtcatgttgctgaggtgttagaatacaccaaggatgagcagctggaaagcctattccagaggactgcctgggtctttgatgacaagtacaagagacctggatatggtgcctatgatgcatttaagcatgcagtctcagacccatctattttggatagtttagatttgaatgaagatgaacgggaagtactcattaataatattaataggcgcttgaccccacaggctgtcaaaattcgagcagatattgaagtggcttgttatggttatgaaggcattgatgctgtaaaagaagccctaagagcaggtttgaattgttctacagaaaacatgcccattaagattaatctaatagctcctcctcggtatgtaatgactacgacaaccctggagagaacagaaggcctttctgtcctcagtcaagctatggctgttatcaaagagaagattgaggaaaagaggggtgtgttcaatgttcaaatg

SEQ ID NO: 4613 - DNA, 3338 bp, Homo sapiens
  source 1..3338: mol_type = genomic DNA
aagaacaaattcacgttttgtgaaggtggtcctgatgtcggctaccatcagctgtaaagagtttgcagactactttgctgttcctgttcaaaacaagatgaatcctgcatatatttttgaagtggaaggcaagccccattcagttgaagagtattatcttaatgatttggagcacattcatcatagcaagctctctcctcatctcctggaggaaccggtgataactaaggatatatatgaagttgctgtctctctcattcagatgtttgatgacttggatatgaaggagagtgggaacaaggcttggtcgggggcccagtttgtgttggagcgaagcagtgtgttggtgtttttgccaggtctgggtgaaataaattatatgcatgaacttctcacaagcctggttcataaaaggttgcaggtctatccactccattcaagtgtggctttagaagaacagaataatgtctttttaagtccagtccctgggtacagaaagattattctgtccaccaatattgcagagagttctgtcacagttccagatgtcaaatatgttatagatttttgtttgactagaactttggtctgtgatgaagatacaaattatcagagtctgcgattgagttgggcttctaaaaccagctgtaatcagagaaaaggccgtgctggacgagtgtctagagggtactgttaccggctggtacacaaggatttctgggacaactccatccctgatcatgttgttcctgagatgttgcgttgtccattaggaagcacgatcttgaaagtgaaattacttgacatgggtgagccgagagctctgctggccactgccctttccccgcctggtctgagtgacattgagcgcaccatccttctactaaaggaggttggagcacttgcagtgagtgggcagagagaagatgaaaacccccatgatggtgaattgaccttcttaggaagagttttagcccaacttcctgtaaatcagcaacttggtaaactcatagtccttggacatgtatttggatgtctagatgaatgtcttattatagcggcagctctttctttgaagaatttttttgcaatgcctttccggcagcatctcgatggatataggaacaaagtgaatttctctggcagtagcaagagtgactgtattgcacttgttgaggcatttaaaacatggaaggcttgcagacagacaggggagctgcggtacccgaaggatgaacttaattggggacggttaaattacattcaaatcaagagaattagagaggtggctgaattatatgaagaattgaagactagaatctcacagttcaacatgcatgttgattctcggcgacctgtcatggaccaagagtatatatataagcagcgattcatcctacaggttgtattggcaggtgctttctatccaaattactttacttttggacagccggatgaggagatggcggtgagggagctggctggcaaggaccccaagacaactgtcgtgttgaaacacattcctccctatggatttctttactataaacaactacagtctctctttagacagtgtggtcaagtcaaatccattgtatttgatggtgcaaaagcctttgtggaattctcacgaaatccaacagagagatttaaaacccttcctgcagtatatatggcaattaagatgtctcaactaaaagtttcacttgaactcagcgttcattctgcagaggaaattgaagggaaggtgcaaggcatgaacgtctcaaagctcaggaacacaagggtgaatgtggacttccagaagcagacggtagatcctatgcaagtctcctttaacacatcagacaggtcccagacagttacagatctccttctaactattgatgtcacagaggtggttgaagtgggacacttttggggatacaggattgatgaaaacaactcagagattctgaaaaagcttactgctgaaatcaaccaactgacgctggtgcccttgcccactcacccacatccagacttggtctgtctggcaccttttgctgattttgataaacaacgctactttagagctcaagtcctttatgtttctggaaattctgctgaggtattctttgtagattatggcaataagtctcatgtagatctacatcttttgatggagattccctgtcaatttcttgaacttcctttccaggctttggaatttaagatttgcaaaatgagaccatcagcaaagtctcttgtttgtggcaagcactggagtgacggggccagccagtggttcgcctctctggtgagcggctgcaccctccttgtgaaggtcttctctgtggtgcacagcgtcctgcacgtggatgtgtaccagtactcaggggtccaggatgccatcaacataagagacgtcctcatccagcagggctatgccgagctcacggaggagtcctacgagtccaaggttaatattctcagggctgctattaacaagctagtctgtgatggaccaaatggatgcaagtgtcttgggccagagagagttgcgcagcttcaagacattgcccgtcagaagcttttaggtttgttctgtcagtcaaaaccaagggagaagattgttcccaagtggcatgaaaagccctacgagtggaatcaggttgatccaaagctggtcatggagcaggccgaccgtgagagcagcagagggaagaacacctttctctaccagctccacaaactggttgtgctcggcacctgagcatgtccacaggtggcctccagcacacccctcaggaagctgtggaggctggattccaggctccctccgcagactgactttcctctgtgtctgggtgttacagtctgtgcccactgcatcctaaaggccttttctttcttcttttctctttgggtgatagtcagagagtggtgtttttgttcaggtgggaaggattggaaactctagtcttttctagaaacagaaaatcactgtattaaatattttggaaagattgttctgaaagaagtctgtttggataaagagctgtattttgctttaaatttattaaggtaaatataagtagttaatcttagatgtaaggttccagaatgtgcttacatattctgttctgttacagtgatttaaaccagtagtataggaaaaaacttaaaaaaacaaaaaaaccatgtagtattttctgatttttttttccatgagggaaaatatctaatttttataagactaagttgagttatacttcttggttcacattttggaaatcagagattacagattacatggccatagcttatctgtgttaaaacaataaaagcattaaatg

SEQ ID NO: 4614 - DNA, 649 bp, Homo sapiens
  source 1..649: mol_type = genomic DNA
gcggcgccgggcttcccacggacggggccccgcggggttgcccggccgtgcccgctgtgcccggctctgcccggcgcggccgcggagcgcacgcctcctgcctgctgaccctctcgtttggtttctcgcaggcctctgccgcagacatggagaaactcagcgcgctgcaggagcagaagggcgagctgcgcaagcggctgtcctacaccacacacaagctcgagaagctcgagaccgagttcgactccacgcgccactacctggagatcgagctgcggcgcgcgcaggaggaactggagaaggtcacggagaagctgcgcaggattcagagcaactacatggcactgcagaggatcaaccaggagctggaggacaagctgtaccgcatgggccagcactatgaggaggagaagcgtgcgctgagccacgagattgttgccctcaacagccatctgctagaagccaaggtgaccatcgacaagctgtcagaggacaacgagctctataggaaggactgcaatctagcggcccagctgctgcagtgcagccagacctacggcagggtccacaaggtgtctgagctgccctcggatttccaggagcgcgtgagcctgcacatggagaagcacggctgcagcctgccatcccc

SEQ ID NO: 4615 - DNA, 878 bp, Homo sapiens
  source 1..878: mol_type = genomic DNA
cggccgctccttggtcgcggtcactccaggctgcctcgctgcgccgctggcggtgggcgtggcgctgccggcggctaggcgcggacgccggaggaggtgtccccgggtttaggggtgttcggccaggggcggggctgccgggcccgggcgactgccggagctgcggaagtcgtggaagcgtcggcgacgcatcgcgcgatggcgcgggcgggacagtgcttgtgaaactgaacacaacaaaagtatggatatgggaaaccaacatccttctattagtaggcttcaggaaatccaaaaggaagtaaaaagtgtagaacagcaagttatcggcttcagtggtctgtcagatgacaagaattacaagaaactggagaggattctaacaaaacagctttttgaaatagactctgtagatactgaaggaaaaggagatattcagcaagctaggaagcgggcagcacaggagacagaacgtcttctcaaagagttggagcagaatgcaaaccacccacaccggattgaaatacagaacatttttgaggaagcccagtccctcgtgagagagaaaattgtgccattttataatggaggcaactgcgtaactgatgagtttgaagaaggcatccaagatatcattctgaggctgacacatgttaaaactggaggaaaaatctccttgcggaaagcaaggtatcacactttaaccaaaatctgtgcggtgcaagagataatcgaagactgcatgaaaaagcagccttccctgccgctttccgaggatgcacatccttccgttgccaaaatcaacttcgtgatgtgtgaggtgaacaaggcccgaggggtcctgattgcacttctgatgggtgtgaacaacaatgaga

SEQ ID NO: 4616 - DNA, 4803 bp, Homo sapiens
  source 1..4803: mol_type = genomic DNA
tggaggggagaaagaggaagggctgcggccgcggaaggctggggtcggtgaccggccggttatctctggctcggtggtgacttagggtctgggtctccgcagacgatttgtgtttgggcaaggcattcgtctaccgacacacccacagcctacagtgagggagtgtgggtgaggggatttctctcccacttccgactctccctagagtctcaggatgggggctgaggaccgaggcgtgggagtgcgatttgacaatggagtgatgaaggctttccttaaagtttcccatgtctcaatggactcctgaatataacgagctctacaccttaaaagtggatatgaagagtgagattccttctgatgcaccaaagacacaggagagtctgaaagggatccttttgcatccagagcccattggggcagccaaaagttttcctgcaggagttgagatgattaatagtaaagtggggaatgaattctctcacctgtgtgatgattctcaaaagcaagagaaggaaatgaatggtaaccagcaagaacaagaaaaaagtctcgttgtgaggaaaaaacgcaaaagccagcaggctggcccttcgtatgtgcagaattgtgttaaagaaaaccagggaatattaggactgaggcaacacctagggacaccaagtgatgaagataatgattcctcttttagtgattgtctttcttctccttcatctagtctgcattttggagattctgatactgtgacttcagatgaggataaagaagtctctgtaagacattcccagaccattttgaatgctaaaagtagaagccatagtgcacggtctcataagtggcctcggactgagacagaatctgtatcgggattgttaatgaaaagaccctgtttacatggcagttcgttacggagacttccatgcagaaagagatttgtaaaaaataattcctcacagaggacacagaaacaaaaagagaggatattaatgcagaggaagaaacgagaagtgttagctcgaagaaaatatgccttgctacctagttctagtagttccagtgagaatgacctcagcagtgaatcctcttctagctcatcaactgaaggagaagaagatttgtttgtttctgccagtgaaaaccaccaaaacaatccagctgttccctcaggaagtattgatgaagatgttgtggtgatagaagcttcctccactccccaggttactgccaatgaagaaattaatgttacctcaactgacagtgaagtggagattgtaacagttggagaaagctatcggtctcgttcaacccttggacactccagatctcattggagccagggttccagttctcatgcaagtcggccacaggagccacggaaccgcagtaggatttctactgttatacagcccttgaggcagaatgcagcagaagttgtggaccttaccgttgatgaagatgaacctactgtagtaccaaccacttctgcaagaatggaatcacaagctactagcgcttccattaacaattcaaatccatctacctctgagcaggcctctgatactgcttcagctgtcaccagtagccaaccttccacagtgtcagagacttcagctactcttacaagcaatagtaccactggcacttctataggagatgactcaaggagaactacatctagtgctgtaacggaaactggccctcctgcaatgccaaggttaccttcctgctgtccccagcactcaccatgtggagggtcgtcacagaaccaccatgcattaggacatcctcatacaagttgctttcagcagcatggtcaccattttcaacatcatcaccaccaccaccatactccccacccagctgtcccagtttctccttcctttagtgatcctgcttgccctgtggaaagacctccacaagtacaagcaccttgtggagcaaatagtagttctggtaccagctatcatgaacagcaggcattgccagtggacctgagcaacagtggtatcagaagtcatggaagtggcagttttcatggagcatctgcatttgacccctgctgccctgtttcttcctcccgagctgcaatctttggccatcaggccgctgctgctgccccaagtcaacctttatcatcaatagatggctatggatcaagcatggttgcgcagccccagccccagccccctccacagccctctctctcatcatgtcgacattacatgccacccccttatgcctctttgacaaggccacttcatcatcaagcttctgcctgcccgcattctcatggaaacccccctcctcagactcagcctccgcctcaagtggattatgttattcctcatcctgtacatgctttccattctcaaatatcttctcatgcaacatctcatcctgtggcacccccaccaccaactcacttagccagtacagctgcaccaatccctcagcatcttcctcctacacaccagccaatttcgcaccatattccagccacagcacctccagcacagagactgcatcctcatgaagtgatgcagaggatggaagttcaaaggaggaggatgatgcagcatccaacgcgggcacatgaacgccccccaccccatccacataggatgcacccaaactatggtcatgggcatcatattcatgtgcctcagactatgtcctcacatcctcgacaggctccagagaggtctgcctgggaactgggaattgaagctggagtgactgcagctacttatacacctggtgcattgcatcctcacttggcccattatcacgcacctcctcgacttcatcacttacaattaggagctcttcctttaatggttcctgatatggcaggctatcctcacatccgttacatttcatcaggattggatggaacatcattcagaggtcctttcaggggcaattttgaggaactgattcatttggaagaaagattaggcaatgtcaatcgtggagcatcccaggggacaattgaaagatgtacatatccacataaatacaaaaaggtaacaactgattggttctcacagaggaaactgcactgcaaacaagatggggaagaagggactgaggaagacacagaggaaaaatgtactatctgtttgtctattttagaggaaggtgaagatgtgagacgtcttccatgtatgcaccttttccaccaagtgtgtgttgaccaatggttgattaccaataagaagtgccccatatgcagagtggacattgaggcccagctgccaagtgaaagttgacaccatgtttcagaactcttgccctccctctcattcccatccttcctggtactgcagtcaaccaaagatggcatgacttacctgcgcagatttggaagcattgaacttagagtgctggctctgctatatggtacaactaatgctagacctacagtttatgtatacagttgattttgatgtatttataaaagcttttttttctagatttgacatttttctgtatcattttactgtatttttgcatggttccttgtattgcatttctttgcacatattatgggcttgtgaccctaaacttgcaggcaaggttagctgctttagtaagtagaattttgtggtctttttgttttttacatagtaccaagccttgataattatgaattttttatccattactaacctttaatttaatcaatcatgtactttagtttaatgtataaagatcctctagaaaatgataatattgtgtattaagacattccttaattaggacaaaatggctgctgtatatttactatatggagttctgagttaaataccatccttaatactgggaacagaatacaacccatataaatcagatgcaggtggtagtcacatcaccagagtgatcagtataaattttcttggtgtatccttttcctttcaacacagtgcagataagagttgaatattgatatcatacatttagactgctgttctgattgcatttatctttttcctacatcatttagaattttatttccctgattcagtttttgctgctgtgaaacagctctgatgaacactaaatattaatttcaattagctagattgtacatacttgcagatttaacaaaattttagggaaattgaaaaagacatgtagaatttgttgtcttctgctaagcacgaaaagttaagatatctgcttacattgattttgtagacacattaagtcaagatttggaatttaagtcactggcaggtatctgtgcattcatagaacttataaaggtcccaggatcacttttaagggatttttattagtttaaaggtaaataaagtcagctgaatctacatgtctcttgttttatttctctctaaacttgaaaacagtaaatctgcagatactgtgaggcacaaattatactgtcaacctactgttgctatggttatatactcccacttcatacattaccaagagtcgatcactgatttaaaatttttaatttctatagttaagatttactgcataatatagaatataaagttaagttaacatactaacatttctcctttggaggaagttttaatctacttcaggatgcatattattatcaagatactttcatatacaggatagcctaattttatttgtttaaatatgcttaatatgccccagattgcaaatgcatccagtcagtaatatcactgtctgtatgtggaggacatgttcccatggatcatatgtgaagatgtcaataagcttgcattaagccacctgctttgtaagtggattgattaataaataacttatatttctattgtc

SEQ ID NO: 4617 - DNA, 1595 bp, Homo sapiens
  source 1..1595: mol_type = genomic DNA
ctccccagggccaggcgtcccgcgcacctggtactcggccagcagctccttggacaggcgactgcccgagccccccatcgccccgccgcgcgcacagctccgccaactcgcctcgagacgcagacaactttctcacttccgcccttgggccgcgtcactgcccggtccccgcggcaaccgctcctggggccaccacccccgggcccgccccctcctaaaagctgccaggcgttcccagccgggtttggcaggcgagctgccggctccaagcggtcctaggctatttactgaggacccactggatgtcaagcattgtgcatagttttcttcgattgttgcaacatcccttgcgagtttctggagcagcagagctgaaggaacccaaacttggactgaagtgactctactaaggtcagctctatggctcttccacatgattcaaacgaaacttcctatttgctgcctcccaacaatgaggactggggcaggcaaaccattcctgactttgtttatgggcagaaggatctcatggcagaagggattcagtggccaaggaatgcacctggcatcccagatgctctgccacaatctccctttgatgctgcactctgctctgcctggaagcagcgggtggagctggggctgtttcgctaccgtctacgggagctacagacccaaatcctccctggtgctgtgggtttcgtggctcagctgaatgtggagcgtggtgtgcagaggaggcccccgcagaccatcaagagtgtgaggcaggcatttgaccctgtacagttcaacttcaacaagatccggcccggagaagtcctcttccgtttgcaccgggagcctgatctccctgggactctgctgcaagaagacatcctggtggtgatcaacgtcagccccctggagtggggccacgtgctgctggtgcctgagcctgcccgccagctcccccagcgcctgctgccgggtgcactgagggcagggattgaggctgtgctgctgagcttacacccgggcttccgtgtcggcttcaacagcctgggaggcttggcctcggtgaaccacctccacctgcatggctattacctggcccacagactgcccgtggagcaggcgccaagcgagcccctggaccctggaggccatttgcatctgctccaggacctcccagctcctggcttcctcttttacactcgtgggccagggcctgacttggagtccttgataagcagggtatgtcgggccactgattatctgactgaccatgagattgctcataacttgtttgtcacccggggagctccgccgggaaagacatcaccttcctcagccctcacaggggtccgagtaattctgtgggcccggaagtccagctttgggataaaggacggtgaagctttcaatgttgccctctgtgagctggctgggcacctccctgtcaaaacatcccaggacttcagcagcctgacagaggcagctgctgtggccctcattcaggactgtcggctgcccccatcccaggcagaagacgtacaggcagcactggtggccctgatgtcccaggaagagcaataatacttctggatgtattt

SEQ ID NO: 4618 - DNA, 8456 bp, Homo sapiens
  source 1..8456: mol_type = genomic DNA
gcgaggaagaagaggacgacgacgacgaggaagaggaggtttctgaggtggagtctttcattttggatcaggatgatttggaaaatccaatgctggaaacagcttccaagttgctcttatcaggtactgctgatggtgcagacctcaggacagtagatccagaaacacaggctagactggaagctttactagaagctgcaggaataggaaaattgtccacggctgatggtaaagcctttgcagatcctgaagtacttcggaggttgacatcgtctgttagttgtgcgttggatgaagctgctgctgcacttacccgtatgagagctgaaagcacagcaaatgcagggcagtcggacaaccgcagtttggcagaagcctgttcagaaggagatgtaaatgctgtgcgaaagttactcattgaagggcgaagtgtaaatgaacacacagaggaaggggagagcctcctttgtttagcttgttctgctggatactatgagcttgcacaggttttgttggcaatgcatgcaaatgtggaagataggggaatcaaaggtgacattacacctttaatggctgctgctaatggaggacatgtcaaaattgtgaagttgctgctagctcataaagcagatgttaatgcacagtcttcaacaggcaatacagcacttacatatgcttgtgctggaggctatgtagatgttgtaaaggtgctcttggaatccggtgctagtattgaggaccataatgaaaatggtcatacccctcttatggaagctggaagtgctggacatgtggaagtagccagattgctgctagaaaatggggctggcattaatacgcattctaatgaatttaaagagagtgcccttaccttagcttgttacaaaggacacttagagatggtgcgatttcttttggaagcaggcgcggatcaagagcataaaacagatgaaatgcacactgctctgatggaggcttgcatggatggccatgttgaagtagctaggttacttcttgacagcggtgcccaagtgaacatgcctgctgattcatttgagtcaccattaactttggctgcatgtggtgggcatgtggaacttgcggctttacttattgaaagaggagctagcctggaagaggtcaatgatgaaggttatacaccattgatggaagcagctcgagaaggacatgaagaaatggtggcattacttcttggtcaaggagcaaatatcaatgcacagacagaagaaactcaagaaactgccttgactctggcttgctgtggaggctttctggaagtggcagactttctaattaaggcaggagccgatatagaactagggtgttctacccctttaatggaagctgctcaagagggtcatttggagttagttaaatacttattagctgcaggagctaacgttcatgcaacaacagcaacaggggatacagcactaacatatgcctgtgaaaatggtcatactgatgtagcagatgtcttacttcaggcaggcgcagatctggaacatgaatctgaaggtggaagaactcctttaatgaaagctgcaagagctggtcatgtttgtactgttcagttcttaattagtaaaggagcgaatgtgaatagaaccacagctaataatgaccatactgtactgtccctggcttgtgcagggggtcatctggcagtggtggaactacttttggctcatggggcagatcctactcaccgtttgaaagatggctcaactatgttgatagaagcagcaaaaggtggccatacaagtgttgtttgctatctcttggattatcctaataacttgctttcagcccctccaccagatgtcactcagttaactcccccatcccacgatttaaatagggctcctcgtgtaccagttcaagcactgcccatggttgttccacctcaggagcctgacaaaccacctgccaatgttgccaccactcttcccatcaggaataaagctgcttctaaacaaaagtccagcagccatttgccagcaaacagccaggatgtacagggttacatcaccaatcagtctccagagagcattgtagaagaggctcagggaaagttaacagaactggaacagaggataaaagaagccatagaaaagaatgcacagctgcagtccttggaactggctcatgctgaccaacttaccaaggagaagatcgaggagctcaacaaaacaagggaggaacaaattcagaagaaacaaaagattttggaggaactacagaaagtagaacgagagttacaactgaaaactcagcagcagctaaaaaagcagtatctagaggttaaagctcaaagaattcaacttcagcaacagcagcaacagtcttgccaacacctgggattactaactcctgttggagttggagagcagctttctgagggagactatgcacggttacagcaagtggatcctgttttacttaaagatgaaccccagcagactgctgctcagatgggttttgcgccaatccagcctctggcgatgcctcaagctttgcctctggcggcaggtcccttgcctccagggtccatcgcaaatcttacagaactgcaaggagtgatagttggacagccagtactgggccaagcacagttggcagggctggggcaaggaattctgacagaaacacaacaagggttaatggtagccagccctgctcagaccctcaatgacacgctggatgacatcatggcagtcagtggaagagcatctgcaatgtcaaacactcctacccacagtattgctgcatccatttcccaacctcagactccaactccaagtcctatcatctctccttcagccatgcttcctatctaccctgccattgatattgatgcacagactgagagtaatcatgacacggcactaacacttgcctgtgctggtggccacgaggaactggtacaaacactgctagagagaggagctagtatagagcaccgagacaagaaaggttttactccactcatcttggctgccacagctggtcatgttggtgttgtggaaatattgctggacaatggtgcagacattgaagcccagtctgaaagaaccaaggacacaccactctccttggcttgttctgggggaagacaggaggtggtggagctattgttagctcgaggggcaaataaagagcacaggaatgtttctgattacacacctctaagtctggctgcttctggtggctatgtgaacatcatcaaaatattactaaatgcaggagctgagattaactctagaactggtagcaaattgggcatctctcctctgatgttagcagctatgaatgggcatacagctgctgttaagctcctgttagacatgggctctgacataaatgctcagatagaaaccaatcggaacactgcccttactttagcctgcttccaaggaagaactgaagtggttagtcttctgcttgatagaaaagcaaatgttgaacacagagctaagactggtctcacaccactaatggaagctgcctctggtggatatgcggaggtgggccgagttcttttggataaaggtgctgatgttaatgcccctccagttccctcctcaagagatacagctttaaccatagcagcagataaagggcattacaaattctgtgagcttcttattggcaggggagctcatattgatgtacgtaacaagaaggggaacactccattgtggctagcagcaaatggtggacacctcgatgtggttcagttactggtgcaagcaggtgcagatgtggatgcagcagataaccgcaagataactcctcttatggcagcatttagaaagggtcatgtgaaggtggtgcgctacttagtcaaagaagtcaatcagtttccatcagattctgaatgtatgagatacatagcaaccatcactgataaggagatgctgaagaagtgtcatctttgtatggagtcaatagtacaagccaaagatagacaggctgctgaagcaaacaaaaacgccagcattttgttagaggagttagacttggaaaagttaagggaagaaagtcggaggctggctttggctgcgaaaagagaaaaaagaaaagagaagagaaggaagaaaaaggaagaacaaagaaggaaactagaagaaattgaagccaaaaataaagagaactttgaactccaagctgctcaagaaaaagaaaagcttaaagttgaagatgagcctgaagtcttgacagaacctccaagtgccacaaccactactaccataggtatatctgcaacctggacaactttggcaggttctcatggtaaaagaaataataccataactacaaccagttcaaagaggaaaaacaggaaaaataaaattactccagaaaacgttcaaattatatttgatgatccactaccaatttcatacagtcagccagagaaggtgaatggagagtccaagagcagcagtaccagcgagagtggggacagtgataacatgaggatttccagctgcagcgatgaaagtagtaacagcaacagcagtcgtaagagtgacaatcattcaccagctgtggtcactaccactgtgagcagcaaaaagcagccatcagttcttgttacatttccaaaggaagagagaaaatctgtttctggcaaggcttcaataaaattgtcagaaactatcagtgaagggaccagtaattctctatctacttgtacaaaatctggtccatctcccctttcttctccaaatgggaagttaacagtagcaagtcctaagcgtgggcaaaagagggaagaaggatggaaagaagttgtaagaaggtcaaagaaagtatctgttccatcaactgtgatatccagagtgattggaagaggaggctgtaatatcaatgctattcgggagtttactggtgcacacatagatattgataaacagaaagacaagactggagaccggataatcactataaggggtggcactgaatcaacaagacaagcaactcaattgattaatgctttgatcaaggatccagacaaagaaattgatgaacttattccaaagaatcgtttgaaaagctcctcagcaaattccaaaatagggtcatcagcacctaccaccactgctgctaacacttccttaatgggaattaaaatgacaactgtagctctgtcatcaacatctcaaactgccacagcactcactgtgcctgcaatttcttctgcatccactcacaaaaccattaagaacccagtgaataatgtgaggcctggttttccagtttctcttccattagcatatcctcctccacagtttgcacatgctttgcttgctgctcagactttccagcagatccgtccaccaaggttgcccatgacccactttggaggtacttttccaccagctcaatccacttggggtccgtttcctgtcaggcctttgagccctgccagagctactaactcgcctaagcctcacatggtgcctcgccatagcaatcagaatagcagtggttctcaggtgaattcagcaggttctttaacttcaagcccaacaactacaaccagttcatcagcttcaacggtgcctggtacatctacaaatggcagtccaagttcaccttctgtccgaaggcagctttttgtcacagttgtgaagacatccaatgccaccacaacaacagtcacaaccacggcaagcaacaacaacactgcacccacaaatgccacatatcctatgcctactgccaaagaacactatccagtatcatccccatcttccccatcaccaccagcccagccaggaggggtttctagaaacagccctttggattgtggatcagcatctccaaataaagtggcatcttcctccgaacaggaagcaggtagtccaccagtagtagaaacaacaaacactagacctccaaacagcagcagttcttctgggagttcatcagctcattctaatcagcaacaacctccgggatctgtttctcaggaaccaagaccacctcttcagcagtctcaggttcctcccccggaagttagaatgactgttcctcctttagcaacaagttctgctccagtggcggtgccttctactgccccagtgacttaccctatgcctcagacaccaatgggatgcccccagcctactcctaaaatggaaacccctgctattagaccaccccctcatggcacaactgcccctcacaagaattcagcttcagtgcaaaattcatctgttgcagtcctcagtgtcaatcacattaaaagacctcacagtgttccctcttctgtccagctaccttcgaccttaagtacacaaagtgcttgtcagaattcagtacatccagcaaataagcctattgctcccaatttcagtgcccccttaccatttgggccctttagcacattgtttgaaaacagccctacttctgctcatgccttctggggaggatctgttgtttcatctcagtcaacaccagaatctatgctatcaggaaaatcctcatatttgccaaattcagatcctttacatcagtctgatacttccaaagctccaggttttagaccaccattacagagacctgctccaagtccctcaggtattgtcaatatggactcgccatatggttctgtaacaccttcttcaacacatttgggaaactttgcttcaaacatttcaggaggtcagatgtacggacctggggcaccccttggaggagcacccgcagctgctaactttaacagacaacatttttccccgcttagtttgttgactccgtgttcatcagcatcaaatgattcttctgcacagtcagtatcctcgggagttcgtgcaccatctcctgccccatcatcagtaccgttagggtcagaaaagcccagcaatgtgtctcaggacaggaaagttccagtccctattgggactgaacgttctgcacgtatcaggcaaactggaacgtcagctccatctgttattgggagcaatttgtctacatcagtaggacatagtggcatctggtcctttgaagggattggtggcaatcaagacaaagtagactggtgtaaccctgggatgggaaatcctatgatccacagaccgatgtctgacccaggagtattttcacaacatcaagcaatggagcgagatagtacaggaattgtaactccttctggtacattccatcagcatgttcctgcaggctacatggactttcctaaagttgggggtatgcctttttctgtgtatgggaatgcaatgattcctccagtagcacctatccctgatggtgctggaggacccatatttaatggccctcatgctgcagacccttcttggaactcactgataaagatggtttccagctccacggaaaataatggccctcaaacggtgtggactggaccctgggcacctcacatgaacagtgtgcatatgaaccagcttggctgatgaggatcagcttgttagcctgcagattccttttcatttggaggaaatcacaagtggccgaaaaaaaaaattatgctcccaaatcattctactgatgtgcttgactgaagtgtgtaggctttttgcagaagatcttactaactgacctattttctgtgaacatttgtgactgcccattccccatcatcatccgttttaccttagttagcatttttcttatcatttttctttttttctttccctcttcccctttggacataactttctgttgaagctgttctttggctggttggttttagtactgtaaactgcttctgagcaaacacggaaatttagcaaaattatgtaaacttgatcctgaagttttagaatggcaaataaatgtacaattgtttacataacagaaaaggctaagcagaaagtaaatttcaatatgtcagtatagaggctctactttatgtagacttaaattaatgtgagatatgtaccttcatattcagaaatctggatgtttccttcatacattaaactattaataagcataacttttctactggtgtaatttaagtataaagtaaaataatgggcattatcattggatgtttccccacattggcttttaaaatacccatcttgctttctttttggtttatttgtagcaaggcacatatagaagaagaaatttctggcttttccatgttgttttattaccttttctcacttttaaaactaatacagacttatctcctcactcctttttctctccttacctttaccactaataccagtaaaattatctttctgatagtgaaaaggttctgtcaagattttcactgtaatggctgctacagagatggaccatcttcatcatcaccagtggtttcttctaattataaaatgtttaaactttctgagaatttaaaaagccaccactgttcccagtcagcatatacaagctcttaatattctgtttattaaataattcaatgtact

SEQ ID NO: 4619 - DNA, 550 bp, Homo sapiens
  source 1..550: mol_type = genomic DNA
aagtcgcgaggtgcatccgcttcggctgcagtaggtggtggcggcggcagccctgggtggggtcccataggggcatctgagaagtcactggagctagcgtttccgggaaacctggagactcgctgagtggcgggggtcgtcggctgcccctctgcccagcaagggcttttctagatgttatcatcaggcaatcgctgcacctgtcgcagcccccaagccacctcttccagaagtaaccataaccttgcttccttcttaggctatttactgaggacccactggatgtcaagcattgtgcatagttttcttcgattgttgcaacatcccttgcgagagtttcactcctgttgcccaggctggagtgcaatggcatgatctcagctcaccgcaacctccgcctcctgagttcaagcagttctcctgcctcagcctcctgaatagctcggattacagtttctggagcagcagagctgaaggaacccaaacttggactgaagtgactctactaaggtcagctctatggctcttccacatgattcaaacgaaactt

SEQ ID NO: 4620 - DNA, 581 bp, Homo sapiens
  source 1..581: mol_type = genomic DNA
agcaaaaataaaggacgcgaccgccgcagcctctgcggagccgggctcgggtcgccggagccgcgccccaccccgccagctccagagccacgtacggactaatggctgaaggataaatcaacatggcaactatgattccaccagtgaagctgaaatggcttgaacacttgaacagctcctggattacagaggacagtgaatctattgctacaagagagggagttgctgttctgtattctaaactggttagcaataaggaagtagtacctttgccccaacaagttttatgcctcaaaggaccacagttgccagactttgaacgtgagtctctttcaagtgatgagcaggaccactatttggatgcccttcttagcagccagctagcattggcaaagatggtatgttcagattccccatttgccggggcacttagaaaacgactgcttgtactccagcgtgtcttttatgcactttctaataaataccatgacaaaggcaaggtgaagcagcagcagcattctccggagagcagttctggttcagcagatgtccattctgttagtgaacgcccccggtcaagc

SEQ ID NO: 4621 - DNA, 411 bp, Homo sapiens
  source 1..411: mol_type = genomic DNA
tgcgggaggagaggtttgggaggcgcgggagatgtccaccctgggctggtggcgccgccgggcgccgggcgccatgagggtgcgctaggcggctgttcgtgcccgaggctgcgcagcactgaggtgagctttgccttcttgatcttccgtccttcttggagacgactggcgagaggaagagggactaggtccaaacgctaggtggctgggtccaggtccctgagtactgacggtcacaggctgccgcgtctttcctgttgactcatgtttggttcctccagtgaaaattttacttagagaaatgctgcctccaaagcacttgtctgccaccaaacctaagaagtcctgggccccaaatctgtatgagctagacagtgacttgactaaggagccggatgtcatcataggaga

SEQ ID NO: 4622 - DNA, 1083 bp, Homo sapiens
  source 1..1083: mol_type = genomic DNA
cggcgtgaggaccccggcggcgccgcagtcccgcgagccatggcccagtccggcggggaggctcggcccgggcccaagacggcggtgcagatccgcgtcgccatccaggaggccgaggacgtggacgagttggaggacgaggaggagggggcggagactcggggcgccggggacccggcccggtacctcagccccggctggggcagcgcgagcgaggaggagccgagccgcgggcacagaactgcccagctcccgtggcttgagtctcagcaagtgttcagtctgaagcccttcctgctgcccactggcatagagttgaccccagaaaatccctggggttcttcggtgagctgacagagcccagtgggcaggcacccagagcaggaggagatgtagccaagaacaggatccacactatcccctgtttggacccaggctcgcatggcagcagccatcacccgatgtgaatgttctcagctcctggagcctacaggagaaaacccagattcctcaatctgctcattaagatgtgacacccactcacatcatctcctcagcccattgcctcaacagttcacgctgtcaacagttcacgctcccgtgattccagctagttccctgagcatagggggctattttgtgtctacatgcctctgcacccccacctctaggtcctctgattgactgatttctagtcagcctttaaaacttcgctgcctcttctccaccacccccaatccccaccccagagctggctgtgtttcctttcttctctgttgctgtagtactctgtacattttatgcctagcaccttccacaattgtgattctatcattgtgtctccctcacaggaataggagctcggtgaattcaaggaccatgcttgcttcgttcattgtatcttcagcacctagcacagcacccagcacataggacatgtttgttgactgaatgcgtatctctatcatcacactcactcaatggtgttgagatatttgtgtttccccttccctagacagtgagatccttgaaggcagctgccttatcttattcctttttgtatttccatacctagcctaatac

SEQ ID NO: 4623 - DNA, 850 bp, Homo sapiens
  source 1..850: mol_type = genomic DNA
catgacctcgctgtggccccggcagcggctgcggggaaagtcgcgaggtgcatccgcttcggctgcagctatttactgaggacccactggatgtcaagcattgtgcatagttttcttcgattgttgcaacatcccttgcgagtttctggagcagcagagctgaaggaacccaaacttggactgaagtgactctactaaggtcagctctatggctcttccacatgattcaaacgaaacttcctatttgctgcctcccaacaatgaggactggggcaggcaaaccattcctgactttgtttatgggcagaaggatctcatggcagaagggattcagtggccaaggaatgcacctggcatcccagatgctctgccacaatctccctttgatgctgcactctgctctgcctggaagcagcgggtggagctggggctgtttcgctaccgtctacgggagctacagacccaaatcctccctggtgctgtgggtttcgtggctcagctgaatgtggagcgtggtgtgcagaggaggcccccgcagaccatcaagagtgtgaggcaggcatttgaccctgtacagttcaacttcaacaagatccggcccggagaagtcctcttccgtttgcaccgggagcctgatctccctgggactctgctgcaagaagacatcctggtggtgatcaacgtcagccccctggagtggggccacgtgctgctggtgcctgagcctgcccgccagctcccccagcgcctgctgccgggtgcactgagggcagggattgaggctgtgctgctgagcttacacccgggcttccgtgtcggcttcaacagcctgggaggcttggcctcggtg

SEQ ID NO: 4624 - DNA, 5278 bp, Homo sapiens
  source 1..5278: mol_type = genomic DNA
ctgaggcgcagatcgctggctctcgacgcattactctttacgccttacatttctgtcttccttcctgggtcagtgattcccggaccctggaagagaagagggtggctaatgattaaggctttccttaaagtttcccatgtctcaatggactcctgaatataacgagctctacaccttaaaagtggatatgaagagtgagattccttctgatgcaccaaagacacaggagagtctgaaagggatccttttgcatccagagcccattggggcagccaaaagttttcctgcaggagttgagatgattaatagtaaagtggggaatgaattctctcacctgtgtgatgattctcaaaagcaagagaaggaaatgaatggtaaccagcaagaacaagaaaaaagtctcgttgtgaggaaaaaacgcaaaagccagcaggctggcccttcgtatgtgcagaattgtgttaaagaaaaccagggaatattaggactgaggcaacacctagggacaccaagtgatgaagataatgattcctcttttagtgattgtctttcttctccttcatctagtctgcattttggagattctgatactgtgacttcagatgaggataaagaagtctctgtaagacattcccagaccattttgaatgctaaaagtagaagccatagtgcacggtctcataagtggcctcggactgagacagaatctgtatcgggattgttaatgaaaagaccctgtttacatggcagttcgttacggagacttccatgcagaaagagatttgtaaaaaataattcctcacagaggacacagaaacaaaaagagaggatattaatgcagaggaagaaacgagaagtgttagctcgaagaaaatatgccttgctacctagttctagtagttccagtgagaatgacctcagcagtgaatcctcttctagctcatcaactgaaggagaagaagatttgtttgtttctgccagtgaaaaccaccaaaacaatccagctgttccctcaggaagtattgatgaagatgttgtggtgatagaagcttcctccactccccaggttactgccaatgaagaaattaatgttacctcaactgacagtgaagtggagattgtaacagttggagaaagctatcggtctcgttcaacccttggacactccagatctcattggagccagggttccagttctcatgcaagtcggccacaggagccacggaaccgcagtaggatttctactgttatacagcccttgaggcagaatgcagcagaagttgtggaccttaccgttgatgaagatgaacctactgtagtaccaaccacttctgcaagaatggaatcacaagctactagcgcttccattaacaattcaaatccatctacctctgagcaggcctctgatactgcttcagctgtcaccagtagccaaccttccacagtgtcagagacttcagctactcttacaagcaatagtaccactggcacttctataggagatgactcaaggagaactacatctagtgctgtaacggaaactggccctcctgcaatgccaaggttaccttcctgctgtccccagcactcaccatgtggagggtcgtcacagaaccaccatgcattaggacatcctcatacaagttgctttcagcagcatggtcaccattttcaacatcatcaccaccaccaccatactccccacccagctgtcccagtttctccttcctttagtgatcctgcttgccctgtggaaagacctccacaagtacaagcaccttgtggagcaaatagtagttctggtaccagctatcatgaacagcaggcattgccagtggacctgagcaacagtggtatcagaagtcatggaagtggcagttttcatggagcatctgcatttgacccctgctgccctgtttcttcctcccgagctgcaatctttggccatcaggccgctgctgctgccccaagtcaacctttatcatcaatagatggctatggatcaagcatggttgcgcagccccagccccagccccctccacagccctctctctcatcatgtcgacattacatgccacccccttatgcctctttgacaaggccacttcatcatcaagcttctgcctgcccgcattctcatggaaacccccctcctcagactcagcctccgcctcaagtggattatgttattcctcatcctgtacatgctttccattctcaaatatcttctcatgcaacatctcatcctgtggcacccccaccaccaactcacttagccagtacagctgcaccaatccctcagcatcttcctcctacacaccagccaatttcgcaccatattccagccacagcacctccagcacagagactgcatcctcatgaagtgatgcagaggatggaagttcaaaggaggaggatgatgcagcatccaactggtctttttgtgttctgtgtttccaggcgggcacatgaacgccccccaccccatccacataggatgcacccaaactatggtcatgggcatcatattcatgtgcctcagactatgtcctcacatcctcgacaggctccagagaggtctgcctgggaactgggaattgaagctggagtgactgcagctacttatacacctggtgcattgcatcctcacttggcccattatcacgcacctcctcgacttcatcacttacaattaggagctcttcctttaatggttcctgatatggcaggctatcctcacatccgttacatttcatcaggattggatggaacatcattcagaggtcctttcaggggcaattttgaggaactgattcatttggaagaaagattaggcaatgtcaatcgtggagcatcccaggggacaattgaaagatgtacatatccacataaatacaaaaagaggaaactgcactgcaaacaagatggggaagaagggactgaggaagacacagaggaaaaatgtactatctgtttgtctattttagaggaaggtgaagatgtgagacgtcttccatgtatgcaccttttccaccaagtgtgtgttgaccaatggttgattaccaataagaagtgccccatatgcagagtggacattgaggcccagctgccaagtgaaagttgacaccatgtttcagaactcttgccctccctctcattcccatccttcctggtactgcagtcaaccaaagatggcatgacttacctgcgcagatttggaagcattgaacttagagtgctggctctgctatatggtacaactaatgctagacctacagtttatgtatacagttgattttgatgtatttataaaagcttttttttctagatttgacatttttctgtatcattttactgtatttttgcatggttccttgtattgcatttctttgcacatattatgggcttgtgaccctaaacttgcaggcaaggttagctgctttagtaagtagaattttgtggtctttttgttttttacatagtaccaagccttgataattatgaattttttatccattactaacctttaatttaatcaatcatgtactttagtttaatgtataaagatcctctagaaaatgataatattgtgtattaagacattccttaattaggacaaaatggctgctgtatatttactatatggagttctgagttaaataccatccttaatactgggaacagaatacaacccatataaatcagatgcaggtggtagtcacatcaccagagtgatcagtataaattttcttggtgtatccttttcctttcaacacagtgcagataagagttgaatattgatatcatacatttagactgctgttctgattgcatttatctttttcctacatcatttagaattttatttccctgattcagtttttgctgctgtgaaacagctctgatgaacactaaatattaatttcaattagctagattgtacatacttgcagatttaacaaaattttagggaaattgaaaaagacatgtagaatttgttgtcttctgctaagcacgaaaagttaagatatctgcttacattgattttgtagacacattaagtcaagatttggaatttaagtcactggcaggtatctgtgcattcatagaacttataaaggtcccaggatcacttttaagggatttttattagtttaaaggtaaataaagtcagctgaatctacatgtctcttgttttatttctctctaaacttgaaaacagtaaatctgcagatactgtgaggcacaaattatactgtcaacctactgttgctatggttatatactcccacttcatacattaccaagagtcgatcactgatttaaaatttttaatttctatagttaagatttactgcataatatagaatataaagttaagttaacatactaacatttctcctttggaggaagttttaatctacttcaggatgcatattattatcaagatactttcatatacaggatagcctaattttatttgtttaaatatgcttaatatgccccagattgcaaatgcatccagtcagtaatatcactgtctgtatgtggaggacatgttcccatggatcatatgtgaagatgtcaataagcttgcattaagccacctgctttgtaagtggattgattaataaataacttatatttctattgtctttgtgtttcataattagtttttataaaaacagtttacattaaacatcttggaattcaacaatagtgatctcactcaaattgacatttgcataatttgacatttatattcattcagttatgactacttgcccttttcttcatattagtaaatgttacactgtagtagttgtcaatgttaacaggcttcaacatagtatgtgtgcagatggacgatggatttaaagagcataccttatgattaaaccgaggttatagaaggtcaggggagagtgaaggagtcagtgacctatgtctgccatcttactggggaaaagagcaagtagcctgtcttcctttaagtaagtagcctgtaatggatgtactactttgccactggaataccccgggtctgtgccaagggactgaagaagtgtaagatggggagaactgtatgtcatggagtcctcttgacgttcccccagatacaagtaaagcacaggtggatttctctatttttgaatactacatcagatttagatgcacgactacctgttgacttgttttataattgctactgatttttttaatgtaggcaaagctttgttactttgaaatttatttaataaaagtatttgtgacataa

SEQ ID NO: 4625 - DNA, 3548 bp, Homo sapiens
  source 1..3548: mol_type = genomic DNA
ggcccaccgccgcccaggcaaggccgccctgccttgggcgcagcgctgccatggctgggggccgtggggcccccgggcgcggccgggacgagcctccggagagctacccgcaacgacaggaccacgagctacaggccctggaggccatttacggcgcggacttccaagacctgcggccggacgcttgcggaccggtcaaagagccccctgaaatcaatttagttttgtaccctcaaggcctaactggtgaagaagtatatgtaaaagtggatttgagggttaaatgcccacctacctatccagatgtagttcctgaaatagagttaaaaaatgccaaaggtctatcaaatgaaagtgtcaatttgttaaaatctcgcctagaagaactggccaagaaacactgtggggaggtgatgatctttgaactggcttaccacgtgcagtcatttctcagcgagcataacaagccccctcccaagtcttttcatgaagaaatgctggaaaggcgggctcaggaggagcagcagaggctgttggaggccaagcggaaagaagagcaggagcaacgtgaaatcctgcatgagattcagagaaggaaagaagagataaaagaagagaaaaaaaggaaagaaatggctaagcaggaacgtttggaaattgctagtttgtcaaaccaagatcatacctctaagaaggacccaggaggacacagaacggctgccattctacatggaggctctcctgactttgtaggaaatggtaaacatcgggcaaactcctcaggaaggtctaggcgagaacgtcagtattctgtatgtaatagtgaagattctcctggctcttgtgaaattctgtatttcaatatggggagtcctgatcagctcatggtgcacaaagggaaatgtattggcagtgatgaacaacttggaaaattagtctacaatgctttggaaacagccactggtggctttgtcttgttgtatgagtgggtccttcagtggcagaaaaaaatgggtccattccttaccagtcaagaaaaagagaagattgataagtgcaaaaagcagattcaaggaacagaaacagaattcaactcactggtaaaattgagccatccaaatgtagtacgctaccttgcaatgaatctcaaagagcaagacgactccatcgtggtggacattttagtggagcacattagtggggtctctcttgctgcacacctgagccactcaggccccatccctgtgcatcagcttcgcaggtacacagctcagctcctgtcaggccttgattatctgcacagcaattctgtggtgcataaggtcctgagtgcatctaatgtcttggtggatgcagaaggcaccgtcaagattacggactatagcatttctaagcgcctcgcagacatttgcaaggaggatgtgtttgagcaaacccgagttcgttttagtgacaatgctctgccttataaaacggggaagaaaggagatgtttggcgtcttggccttctgctgctgtccctcagccaaggacaggaatgtggagagtaccctgtgaccatccctagtgacttaccagctgactttcaagattttctaaagaaatgtgtgtgcttggatgacaaggaaagatggagtccccagcagttgttgaaacacagctttataaatccccagccaaaaatgcctctagtggaacaaagtcctgaagattctgaaggacaagattatgttgagactgttattcctagcaaccggctacccagtgctgccttctttagtgagacacagagacagttttcccgatacttcattgagtttgaagaattacaacttcttggtaaaggagcttttggagctgtcatcaaggtgtggtacagagtcattcccagtcccctttagagctccttctctgttccatttccacaaagactcatggactttacttttattttgggagtggggagggaagtgaatatggctgttggatactatgctcatcctcaccttcctggagttaaaggttttatttaagttacgctggacacagttgagaattgtcccactcctctttccttgcttcatgtggagcattaacatgaaacacacatggttataacagcacttcaagtggaatcaagacctccacagaaagaacatttttgtgtgctttggttcagaaagaacattgttctttttttctcctgtttgctgttagagttgctgtagataaaaaggttctaaggttagaagagagatggacttcaaactgggagatggccccagcaggtctcgatggcttttattttccagctattattgggacaggaaagtagcgatgtattattaaggtacactgttgttgggtcttcctttcttcgttctagtctatttgggtgacttttattattatctgccccttgtagaaagaggtttcagctgtttttatataatagaagtatttctttgtaaattaggagacccagattattgtattaagtccatatacagtacatgtcatctttcacatatgaaggtaacccaccatcaactgagtatattgtctgttaaggattctgagagtatcattaggaagcattactgttactgtagaaaaacttttacactaaaaaaggaattaaattagttttcctgtggtaaaagacagacaagcaagacagatgtcctgatcagaaagatcataattatgtctaagaggaggggatgattgaagcgtatactgtccctttaacacaatatcattttgatcaaatcctttaacttcattctattttaaattcttgaacgtagaatagtaacaaatttcatctctttacaagtacttaataatgataggcaagctcatataacaaaaacatctgagtaacttaagcccccacggtttccagtagtttctccctgtgagaatccacagccctcacctcctacctctgtgcttctgtgtcagagtagggcagcctgcccagtgatctggcattcattagcagttggacccattactgtttctgcaccttttcacttcagtaaatgaattcctaggggtttccagtatagcaagctttactcccaacccagttcgtatatgatgtgtactgagacaggagatcgaaaggcaatgccaagatccccacctcccgccctacactgtcctcttccctattaatgtggcagtaaaagaacacagggctatcattttttggagcacctgccatatttcagattgtgtgccaggtgatttacaaaccttgtctttaaatctcaggacattcttacgagatgggtatgatcctcattccctagatgagggaactgaagctcagagaaggttatgtcctttgcctgagataagggagataaaaccagcattcagacccacctctgttgtactacaaagtgtgtgttcttgtcactatttccatacaaaaaaagataatctgaaactcaattttgtagtacttccttcttattcccaggacttcacttagacttttattagtttaattgaaacttgtgagccaaacaagagaa

SEQ ID NO: 4626 - DNA, 541 bp, Homo sapiens
  source 1..541: mol_type = genomic DNA
agcagatgctggagctgctggtgctggagcagtttctgagcgcgctgccagccgacacgcaggcctgggtgtgcagccgtcagccgctaagctgggaggaggcggtggccctgctggaagagttctgggctttccttaaagtttcccatgtctcaatggactcctgaatataacgagctctacaccttaaaagtggatatgaagagtgagattccttctgatgcaccaaagacacaggagagtctgaaagggatccttttgcatccagagcccattggggcagccaaaagttttcctgcaggagttgagatgattaatagtaaagtggggaatgaattctctcacctgtgtgatgattctcaaaagcaagagaaggaaatgaatggtaaccagcaagaacaagaaaaaagtctcgttgtgaggaaaaaacgcaaaagccagcaggctggcccttcgtatgtgcagaattgtgttaaagaaaaccagggaatattaggactgaggcaacacctagggacaccaagtgatgaagataatgatt

SEQ ID NO: 4627 - DNA, 2023 bp, Homo sapiens
  source 1..2023: mol_type = genomic DNA
tttttgtgggccgggtgggtttcctaatctggtttcgtctgcctggttcatctgtgtgcgatggctccggactcggatcccttccctgaagggccgctcttaaagctgctacccttagacgctagagaccggggcacccagcgctgccgcctgggcccggccgccctccacgccctgggcgcgcgcttgggctcggcagtgaagatctcgctacccgacggcggctcctgcctctgcactgcctggcctcggcgggacggagcggacggctttgtgcagctggacccgctgtgcgcgagccccggggcggcggtcggggcgtcgagatcccggaggagtctcagcctgaatcgcctcctcctagtgccctgtccgcccctgcggcgcgtcgccgtgtggccggtgttgcgagagcgggcaggcgcgcccggtgcccggaatacagccgcggtgctggaggcggcacaggagctgctgagaaaccgaccgatctccctgggccacgtggtggtcgctccgccaggcgctcctggcctggtggctgccttgcacatcgtcggcgggacgcccagtcccgatcccgctgggctggtcacccctcgtacccgcgtcagccttggcggggagcctccgtcggaagcccagccgcagcccgaggtgcccctgggaggtctttcggaggcggccgactcgctgcgggagctcctccgcctcccgctccgctacccgcgcgccctgaccgcgctgggcttagcggtgcctcgcggggtgctcctggcggggccccccggagtgggcaagacccagctggtgcgggccgtggcgcgcgaggcgggcgcggagctgctggcagtcagcgccccggcgctgcagggttcccggcctggggagaccgaggagaacgtgcggcgggtcttccagcgcgcccgggaactggccagccgcggacccagcctcctcttcctggacgagatggacgccttgtgtccccagcggggcagtcgagcacccgagagccgcgtagtggcccaggtgttgacgctgctggacggcgccagtggggaccgcgaggtcgtggttgtgggagccactaaccggccggacgctctagacccagcgctgcgtaggcccgggagatttgaccgagaggtggtcattgggactcccacacttaaacaaagaaaggaaattctgcaagtgattacctcgaagatgcccatctccagtcatgttgatttgggccttcttgcagaaatgacagttggctatgttggtgccgacctgacagcactctgtagggaggctgccatgcatgccctccttcatagtgagaagaaccaggacaatcctgtgattgatgaaatagacttccttgaagcttttaaaaatattcagccctcatcgtttcgaagcgtcattggattaatggatatcaagcctgttgactgggaggagattggtggccttgaagatgtaaaactgaagttaaaacagagcattgagtggcctctgaaattcccttgggaatttgttagaatgggcctgacacaaccaaagggagttctcctctatgggccccctggatgtgctaaaaccactctggtgagggccctggccacaagctgtcactgctctttcgtttcagtgagtggagctgatctgttttcaccgtttgttggagattcagaaaaagtgttgtctcagatatttcgacaagcaagagcaagcactccagcaattttgtttttggatgaaattgattcaatcttgggagctcgctcagccagcaagacaggatgtgatgttcaagaacgagttctttctgttctcctgaatgaattagatggtgttggacttaagacaatagagagaagaggaagtaaatcaagtcaacagggtaaatacaaggagctgaaaaaatgaagaggtatttattagccagaatgcacctaaaatccaggccaacattaaatataatgcatatatgctatagctttacctatgctgaattcatctcatagaa

SEQ ID NO: 4628 - DNA, 5115 bp, Homo sapiens
  source 1..5115: mol_type = genomic DNA
acttctagggcattagacaagttgcccacagtcccaagttagtagcccaagttagtagccgagctaactcctcgagtaggtctctgtgaagcccagaggtcatgcttgtaactgctgtgctgaggccaactttgtgcggttgtttgcctatttactggggactcccatatcccaaaagcattgtcgatgcctctggtaaggtggcctccactgctgcctggtcttcaacttctgggacatgtgtatatctccttacgatccacaggtccctgagtactgacggtcacaggctgccgcgtctttcctgttgactcatgtttggttcctccagtgaaaattttacttagagaaatgctgcctccaaagcacttgtctgccaccaaacctaagaagtcctgggccccaaatctgtatgagctagacagtgacttgactaaggagccggatgtcatcataggagaaggtccaactgactctgagttttttcatcagaggtttcggaacctaatctatgtggaatttgttgggcctcggaagaccctgatcaaactccgaaacctctgcctcgattggttgcagccggagacccgcaccaaggaggagatcatcgagctcttggtccttgagcagtacctgaccatcatccctgaaaagctcaagccttgggtgcgagcaaaaaagccggagaactgtgagaagctcgtcactctgctggagaattacaaggagatgtaccaaccagaagacgacaacaacagtgacgtgaccagcgacgacgacatgacccggaacagaagagagtcctcaccacctcactcagtccattctttcagtgaccgggactgggaccggaggggcagaagcagagacatggagccacgagaccgctggtcccacaccaggaacccaagaagcaggatgcctccgcgggatctttcccttcctgtggtggcgaaaacaagctttgaaatggacagagaggacgacagggactccagggcttatgagtcccgatctcaggatgctgaatcataccaaaatgtggtggacctcgctgaggacaggaaacctcacaacacaatccaggacaacatggaaaactacaggaagctgctctccctcgtgcagcttgctgaagacgatggccactcccacatgacgcagggccactcatcaagatccaagagaagtgcctacccaagcaccagtcgaggtctaaaaactatgcctgaagccaaaaaatcaacccaccggcgggggatttgtgaagatgaatcttcccacggagtgataatggaaaaattcatcaaggatgtgtcacgcagttccaaatcgggaagagcaagggagtcaagcgaccggtcacagagattccccagaatgtcagatgataactggaaggacatttcattgaacaagagggagtcagtgatccagcagcgggtttatgaagggaatgcatttaggggaggctttaggtttaattcaacccttgtttccagaaagagagttcttgaaagaaagaggcgctatcattttgacacagatgggaagggctcgattcacgatcaaaaaggctgtcccaggaagaagccctttgaatgtggtagtgagatgagaaaagccatgagcgtgagcagcctgagcagcctcagctccccctcctttaccgagtcacagccaattgattttggggcaatgccatatgtatgtgatgagtgtgggaggtcgttcagtgtcatctcagaatttgttgagcaccagatcatgcatactagagagaacctctatgagtatggtgagtcctttatccacagtgtggctgtcagtgaagttcagaaaagtcaggttggagggaaacgttttgaatgtaaggactgtggagagaccttcaataagagtgccgccttggctgaacatcggaagattcatgctagaggttatcttgtggaatgtaagaatcaggaatgtgaggaagccttcatgcctagccccacctttagtgagcttcagaaaatatatggcaaagacaaattctacgagtgcagggtgtgtaaggaaaccttccttcatagttctgccctgattgagcaccagaaaatccactttggggatgacaaagataatgagcgtgaacatgaacgtgaacgtgaacgtgagcgcggggaaacctttaggcccagcccagcccttaatgagtttcagaaaatgtatggtaaagagaaaatgtacgaatgtaaggtgtgtggggagactttccttcatagctcatccctgaaagaacatcagaaaatccatactagagggaacccatttgaaaacaagggtaaagtgtgtgaggaaacctttattcctggtcagtcccttaaaaggcgtcagaaaacttacaataaggagaagctctgtgactttacagatggccgggatgccttcatgcaaagctcagagctcagtgagcatcagaaaattcattctcgaaagaacctctttgaaggcagagggtatgagaaatctgtcattcatagtgggccattcactgaatctcagaagagtcatactataacaagacctcttgaaagtgatgaggacgaaaaggcgttcaccattagctctaacccctatgaaaaccagaagattcccactaaggaaaatgtctatgaggcaaaatcatatgagaggtctgttattcatagcttagcctctgtggaagctcagaaaagtcacagtgtagcagggcccagtaaaccaaaagtaatggcagagtctaccattcagagcttcgatgctatcaaccatcagagagttcgtgctggagggaacacctctgaaggaagggaatacagtaggtctgttatccatagcttagtggcttccaaacctccaagaagtcacaatggaaatgaattggtggaatctaatgagaagggagaatcctccatttatatctcagaccttaatgataagcgacagaagattcctgccagagagaacccttgtgaagggggcagtaagaatcgcaactatgaagactctgtcatacagagtgtattccgtgccaaacctcagaaaagtgttcctggagagggatctggtgagtttaagaaggatggcgaattctctgttcccagctcaaatgtccgtgaataccagaaggctcgtgctaaaaagaaatacattgagcataggagcaatgagacctctgtaattcactctctgccttttggtgaacaaacatttcgccctcgagggatgctctatgaatgtcaggagtgtggggagtgctttgctcatagctctgacctcactgagcaccagaagattcatgatagggagaagccctctggaagcagaaactatgaatggtctgtcattcgcagcttggcccctactgaccctcaaacaagttacgcccaagagcagtatgctaaagagcaagcgcggaacaaatgtaaggacttcagacaattttttgctaccagcgaagacctcaacacaaaccagaaaatctatgaccaagagaagtctcatggcgaggagtctcaaggcgagaatactgatggggaggagacccacagcgaggagacccatggtcaggagacaattgaagaccctgtcattcaaggctcagacatggaagaccctcagaaggatgaccctgatgacaaaatctatgaatgtgaggactgtggcctgggctttgtggatctcacagacctcacagaccatcagaaagtccacagcaggaagtgcctggttgacagtcgggagtacacacattctgtaattcacacccattccatcagcgagtatcagagagattacactggagagcagctgtatgaatgtccaaagtgtggggaatcttttattcatagctcattccttttcgagcatcagagaatccatgaacaagaccagttgtattccatgaaggggtgtgatgatggttttattgccctcttgcccatgaagccacggaggaatcgtgctgcagagaggaatcctgctcttgctgggtcggccattcgatgccttttgtgtggacaaggcttcattcatagctctgcccttaatgagcatatgagacttcatagggaagatgatttactggagcagagccagatggctgaggaagctatcattccaggcttagccctcactgagtttcagagaagtcagaccgaagagagactctttgaatgtgcagtctgtggagaatctttcgtcaacccagcagaacttgcagatcacgtaactgttcataagaatgagccctatgagtacgggtcctcctatactcacacctcatttcttactgagcccctcaaaggagctataccattctatgaatgcaaggattgtggtaagtcctttattcatagcacagtcctcactaaacataaggagcttcatctggaagaagaagaagaagatgaagcagcagcagctgcagcagcagcagcccaggaagttgaagccaatgtccatgttccacaagtagttctgaggattcagggcttaaacgtagaggctgctgagccagaagtggaggctgccgagccagaagtggaggctgctgagccagaagtggaggctgctgagccaaacggagaggctgaagggccagatggagaggctgcagagcccattggagaggctggacagccaaatggagaggccgagcagccaaatggggatgctgatgagccagatggtgcaggtattgaagacccagaagaaagagctgaagagccagagggaaaagctgaagagccagagggagatgccgacgagcctgacggtgtgggaattgaagacccagaagaaggtgaagatcaagagattcaggtagaagaaccatactatgactgccatgaatgcacagaaaccttcacttccagcacagcattcagtgaacacctgaaaactcatgccagcatgatcatatttgagcctgcaaatgcctttggggagtgctcaggctacatcgaacgtgccagcaccagcacaggtggtgccaatcaagctgatgagaagtacttcaaatgtgacgtctgtgggcagctcttcaatgaccgcctgtccctcgccagacaccagaatacccacactggc

SEQ ID NO: 4629 - DNA, 577 bp, Homo sapiens
  source 1..577: mol_type = genomic DNA
ctgcggagccgggctcgggtcgccggagccgcgccccaccccgccagctccagagccacgtacgatggagtctccctctgtcgccaggctggagtgcagtcttgtgatctcggctcactgcaacctccacctcccgggttcgagcgattctcctgcctctgcctcccaagtagctgggactacaggcgcgcaccaccactactggctaatttttgtatttttattaaagacggggtttcaccatgttggcaaggatggtctccatctcttgacctcgtgatcctcccacctcgacctccaaaagtgctgggattacaggcgtgagccaccgtgcctggcctgaataatatcatcttaaacttttgggacttgccttaccagtcatcagaacatttatacatttataagcctattgtaatcaagtcactgttgtaagaatagacaagtggaccagaatagagaatccagaaatagatcctgttagtggaaaagactaatggctgaaggataaatcaacatggcaactatgattccaccagtgaagctgaaatggcttgaacacttgaacagctcctgg

SEQ ID NO: 4630 - DNA, 4741 bp, Homo sapiens
  source 1..4741: mol_type = genomic DNA
gtttgggaggcgcgggagatgtccaccctgggctggtggcgccgccgggcgccgggcgccatgagggtgcgctaggcggctgttcgtgcccgaggctgcgcagcactgaggtgagctttgccttcttgatcttccgtccttcttggagacgactggcgagaggaagagggactaggtccaaacgctaggtggctgggtccagccggagacccgcaccaaggaggagatcatcgagctcttggtccttgagcagtacctgaccatcatccctgaaaagctcaagccttgggtgcgagcaaaaaagccggagaactgtgagaagctcgtcactctgctggagaattacaaggagatgtaccaaccagaagacgacaacaacagtgacgtgaccagcgacgacgacatgacccggaacagaagagagtcctcaccacctcactcagtccattctttcagtgaccgggactgggaccggaggggcagaagcagagacatggagccacgagaccgctggtcccacaccaggaacccaagaagcaggatgcctccgcgggatctttcccttcctgtggtggcgaaaacaagctttgaaatggacagagaggacgacagggactccagggcttatgagtcccgatctcaggatgctgaatcataccaaaatgtggtggacctcgctgaggacaggaaacctcacaacacaatccaggacaacatggaaaactacaggaagctgctctccctcgtgcagcttgctgaagacgatggccactcccacatgacgcagggccactcatcaagatccaagagaagtgcctacccaagcaccagtcgaggtctaaaaactatgcctgaagccaaaaaatcaacccaccggcgggggatttgtgaagatgaatcttcccacggagtgataatggaaaaattcatcaaggatgtgtcacgcagttccaaatcgggaagagcaagggagtcaagcgaccggtcacagagattccccagaatgtcagatgataactggaaggacatttcattgaacaagagggagtcagtgatccagcagcgggtttatgaagggaatgcatttaggggaggctttaggtttaattcaacccttgtttccagaaagagagttcttgaaagaaagaggcgctatcattttgacacagatgggaagggctcgattcacgatcaaaaaggctgtcccaggaagaagccctttgaatgtggtagtgagatgagaaaagccatgagcgtgagcagcctgagcagcctcagctccccctcctttaccgagtcacagccaattgattttggggcaatgccatatgtatgtgatgagtgtgggaggtcgttcagtgtcatctcagaatttgttgagcaccagatcatgcatactagagagaacctctatgagtatggtgagtcctttatccacagtgtggctgtcagtgaagttcagaaaagtcaggttggagggaaacgttttgaatgtaaggactgtggagagaccttcaataagagtgccgccttggctgaacatcggaagattcatgctagaggttatcttgtggaatgtaagaatcaggaatgtgaggaagccttcatgcctagccccacctttagtgagcttcagaaaatatatggcaaagacaaattctacgagtgcagggtgtgtaaggaaaccttccttcatagttctgccctgattgagcaccagaaaatccactttggggatgacaaagataatgagcgtgaacatgaacgtgaacgtgaacgtgagcgcggggaaacctttaggcccagcccagcccttaatgagtttcagaaaatgtatggtaaagagaaaatgtacgaatgtaaggtgtgtggggagactttccttcatagctcatccctgaaagaacatcagaaaatccatactagagggaacccatttgaaaacaagggtaaagtgtgtgaggaaacctttattcctggtcagtcccttaaaaggcgtcagaaaacttacaataaggagaagctctgtgactttacagatggccgggatgccttcatgcaaagctcagagctcagtgagcatcagaaaattcattctcgaaagaacctctttgaaggcagagggtatgagaaatctgtcattcatagtgggccattcactgaatctcagaagagtcatactataacaagacctcttgaaagtgatgaggacgaaaaggcgttcaccattagctctaacccctatgaaaaccagaagattcccactaaggaaaatgtctatgaggcaaaatcatatgagaggtctgttattcatagcttagcctctgtggaagctcagaaaagtcacagtgtagcagggcccagtaaaccaaaagtaatggcagagtctaccattcagagcttcgatgctatcaaccatcagagagttcgtgctggagggaacacctctgaaggaagggaatacagtaggtctgttatccatagcttagtggcttccaaacctccaagaagtcacaatggaaatgaattggtggaatctaatgagaagggagaatcctccatttatatctcagaccttaatgataagcgacagaagattcctgccagagagaacccttgtgaagggggcagtaagaatcgcaactatgaagactctgtcatacagagtgtattccgtgccaaacctcagaaaagtgttcctggagagggatctggtgagtttaagaaggatggcgaattctctgttcccagctcaaatgtccgtgaataccagaaggctcgtgctaaaaagaaatacattgagcataggagcaatgagacctctgtaattcactctctgccttttggtgaacaaacatttcgccctcgagggatgctctatgaatgtcaggagtgtggggagtgctttgctcatagctctgacctcactgagcaccagaagattcatgatagggagaagccctctggaagcagaaactatgaatggtctgtcattcgcagcttggcccctactgaccctcaaacaagttacgcccaagagcagtatgctaaagagcaagcgcggaacaaatgtaaggacttcagacaattttttgctaccagcgaagacctcaacacaaaccagaaaatctatgaccaagagaagtctcatggcgaggagtctcaaggcgagaatactgatggggaggagacccacagcgaggagacccatggtcaggagacaattgaagaccctgtcattcaaggctcagacatggaagaccctcagaaggatgaccctgatgacaaaatctatgaatgtgaggactgtggcctgggctttgtggatctcacagacctcacagaccatcagaaagtccacagcaggaagtgcctggttgacagtcgggagtacacacattctgtaattcacacccattccatcagcgagtatcagagagattacactggagagcagctgtatgaatgtccaaagtgtggggaatcttttattcatagctcattccttttcgagcatcagagaatccatgaacaagaccagttgtattccatgaaggggtgtgatgatggttttattgccctcttgcccatgaagccacggaggaatcgtgctgcagagaggaatcctgctcttgctgggtcggccattcgatgccttttgtgtggacaaggcttcattcatagctctgcccttaatgagcatatgagacttcatagggaagatgatttactggagcagagccagatggctgaggaagctatcattccaggcttagccctcactgagtttcagagaagtcagaccgaagagagactctttgaatgtgcagtctgtggagaatctttcgtcaacccagcagaacttgcagatcacgtaactgttcataagaatgagccctatgagtacgggtcctcctatactcacacctcatttcttactgagcccctcaaaggagctataccattctatgaatgcaaggattgtggtaagtcctttattcatagcacagtcctcactaaacataaggagcttcatctggaagaagaagaagaagatgaagcagcagcagctgcagcagcagcagcccaggaagttgaagccaatgtccatgttccacaagtagttctgaggattcagggcttaaacgtagaggctgctgagccagaagtggaggctgccgagccagaagtggaggctgctgagccagaagtggaggctgctgagccaaacggagaggctgaagggccagatggagaggctgcagagcccattggagaggctggacagccaaatggagaggccgagcagccaaatggggatgctgatgagccagatggtgcaggtattgaagacccagaagaaagagctgaagagccagagggaaaagctgaagagccagagggagatgccgacgagcctgacggtgtgggaattgaagacccagaagaaggtgaagatcaagagattcaggtagaagaaccatactatgactgccatgaatgcacagaaaccttcacttccagcacagcattcagtgaacacctgaaaactcatgccagcatgatcatatttgagcctgcaaatgcctttggggagtgctcaggctacatcgaacgtgccagcaccagcacaggtggtgccaatcaagctgatgagaagtacttcaaatgtgacgtctgtgggcagctcttcaatgaccgcctgtccctcgccagacaccagaatacccacactggctga

SEQ ID NO: 4631 - DNA, 647 bp, Homo sapiens
  source 1..647: mol_type = genomic DNA
caaaaataaaggacgcgaccgccgcagcctctgcggagccgggctcgggtcgccggagccgcgccccaccccgccagctccagagccacgtacgaaatggggtttcaccgtgttagccaggatggtctcaatctcctgacctcgtgatccgcccacctcggcctcccaaagtactgggattacaggactaatggctgaaggataaatcaacatggcaactatgattccaccagtgaagctgaaatggcttgaacacttgaacagctcctggattacagaggacagtgaatctattgctacaagagagggagttgctgttctgtattctaaactggttagcaataaggaagtagtacctttgccccaacaagttttatgcctcaaaggaccacagttgccagactttgaacgtgagtctctttcaagtgatgagcaggaccactatttggatgcccttcttagcagccagctagcattggcaaagatggtatgttcagattccccatttgccggggcacttagaaaacgactgcttgtactccagcgtgtcttttatgcactttctaataaataccatgacaaaggcaaggtgaagcagcagcagcattctccggagagcagttctggttcagcagatgtccattctg

SEQ ID NO: 4632 - DNA, 4789 bp, Homo sapiens
  source 1..4789: mol_type = genomic DNA
ggctaagcaggaacgtttggaaattgctagtttgtcaaaccaagatcatacctctaagaaggacccaggaggacacagaacggctgccattctacatggaggctctcctgactttgtaggaaatggtaaacatcgggcaaactcctcaggaaggtctaggcgagaacgtcagtattctgtatgtaatagtgaagattctcctggctcttgtgaaattctgtatttcaatatggggagtcctgatcagctcatggtgcacaaagggaaatgtattggcagtgatgaacaacttggaaaattagtctacaatgctttggaaacagccactggtggctttgtcttgttgtatgagtgggtccttcagtggcagaaaaaaatgggtccattccttaccagtcaagaaaaagagaagattgataagtgcaaaaagcagattcaaggaacagaaacagaattcaactcactggtaaaattgagccatccaaatgtagtacgctaccttgcaatgaatctcaaagagcaagacgactccatcgtggtggacattttagtggagcacattagtggggtctctcttgctgcacacctgagccactcaggccccatccctgtgcatcagcttcgcaggtacacagctcagctcctgtcaggccttgattatctgcacagcaattctgtggtgcataaggtcctgagtgcatctaatgtcttggtggatgcagaaggcaccgtcaagattacggactatagcatttctaagcgcctcgcagacatttgcaaggaggatgtgtttgagcaaacccgagttcgttttagtgacaatgctctgccttataaaacggggaagaaaggagatgtttggcgtcttggccttctgctgctgtccctcagccaaggacaggaatgtggagagtaccctgtgaccatccctagtgacttaccagctgactttcaagattttctaaagaaatgtgtgtgcttggatgacaaggaaagatggagtccccagcagttgttgaaacacagctttataaatccccagccaaaaatgcctctagtggaacaaagtcctgaagattctgaaggacaagattatgttgagactgttattcctagcaaccggctacccagtgctgccttctttagtgagacacagagacagttttcccgatacttcattgagtttgaagaattacaacttcttggtaaaggagcttttggagctgtcatcaaggtgcagaacaagttggacggctgctgctacgcagtgaagcgcatccccatcaacccggccagccggcagttccgcaggatcaagggcgaagtgacactgctgtcacggctgcaccatgagaacattgtgcgctactacaacgcctggatcgagcggcacgagcggccggcgggaccggggacgccgcccccggactccgggcccctggccaaggatgaccgagctgcacgcgggcagccggcgagcgacacagacggcctggacagcgtagaggccgccgcgccgccacccatcctcagcagctcggtggagtggagcacttcgggcgagcgctcggccagtgcccgtttccccgccaccggcccgggctccagcgatgacgaggacgacgacgaggacgagcacggtggcgtcttctcccagtccttcctgcctgcttcagattctgaaagtgatattatctttgacaatgaagatgagaacagtaaaagtcagaatcagatggagtactgtgagaagagcactttacgagacaccattgaccagggactgtatcgagacaccgtcagactctggaggctttttcgagagattctggatggattagcttatatccatgagaaaggaatgattcaccgggatttgaagcctgtcaacatttttttggattctgatgaccatgtgaaaataggtgattttggtttggcgacagaccatctagccttttctgctgacagcaaacaagacgatcagacaggagacttgattaagtcagacccttcaggtcacttaactgggatggttggcactgctctctatgtaagcccagaggtccaaggaagcaccaaatctgcatacaaccagaaagtggatctcttcagcctgggaattatcttctttgagatgtcctatcaccccatggtcacggcttcagaaaggatctttgttctcaaccaactcagagatcccacttcgcctaagtttccagaagactttgacgatggagagcatgcaaagcagaaatcagtcatctcctggctgttgaaccacgatccagcaaaacggcccacagccacagaactgctcaagagtgagctgctgcccccaccccagatggaggagtcagagctgcatgaagtgctgcaccacacgctgaccaacgtggatgggaaggcctaccgcaccatgatggcccagatcttctcgcagcgcatctcccctgccatcgattacacctatgacagcgacatactgaagggcaacttctcaatccgtacagccaagatgcagcagcatgtgtgtgaaaccatcatccgcatctttaaaagacatggagctgttcagttgtgtactccactactgcttccccgaaacagacaaatatatgagcacaacgaagctgccctattcatggaccacagcgggatgctggtgatgcttccttttgacctgcggatcccttttgcaagatatgtggcaagaaataatatattgaatttaaaacgatactgcatagaacgtgtgttcaggccgcgcaagttagatcgatttcatcccaaagaacttctggagtgtgcatttgatattgtcacttctaccaccaacagctttctgcccactgctgaaattatctacactatctatgaaatcatccaagagtttccagcacttcaggaaagaaattacagtatttatttgaaccataccatgttattgaaagcaatactcttacactgtgggatcccagaagataaactcagtcaagtctacattattctgtatgatgctgtgacagagaagctgacgaggagagaagtggaagctaaattttgtaatctgtctttgtcttctaatagtctgtgtcgactctacaagtttattgaacagaagggagatttgcaagatcttatgccaacaataaattcattaataaaacagaaaacaggtattgcacagttggtgaagtatggcttaaaagacctagaggaggttgttggactgttgaagaaactcggcatcaagttacaggtcttgatcaatttgggcttggtttacaaggtgcagcagcacaatggaatcatcttccagtttgtggctttcatcaaacgaaggcaaagggctgtacctgaaatcctcgcagctggaggcagatatgacctgctgattccccagtttagagggccacaagctctggggccagttcccactgccattggggtcagcatagctatagacaagatatctgctgctgtcctcaacatggaggaatctgttacaataagctcttgtgacctcctggttgtaagtgttggccagatgtctatgtccagggccatcaacctaacccagaaactctggacagcaggcatcacagcagaaatcatgtacgactggtcacagtcccaagaggaattacaagagtactgcagacatcatgaaatcacctatgtggcccttgtctcggataaagaaggaagccatgtcaaggttaagtctttcgagaaggaaaggcagacagagaagcgtgtgctggagactgaacttgtggaccatgtactgcagaaactgaggactaaagtcactgatgaaaggaatggcagagaagcttccgataatcttgcagtgcaaaatctgaaggggtcattttctaatgcttcaggtttgtttgaaatccatggagcaacagtggttcccattgtgagtgtgctagccccggagaagctgtcagccagcactaggaggcgctatgaaactcaggtacaaactcgacttcagacctcccttgccaacttacatcagaaaagcagtgaaattgaaattctggctgtggatctacccaaagaaacaatattacagtttttatcattagagtgggatgctgatgaacaggcatttaacacaactgtgaagcagctgctgtcacgcctgccaaagcaaagatacctcaaattagtctgtgatgaaatttataacatcaaagtagaaaaaaaggtgtctgtgctatttctgtacagctatagagatgactactacagaatcttattttaaccctaaagaactgtcgttaacctcattcaaacagacagaggcttatactggaataatggaatgttgtacattcatcataatttaaaattaaattctaagaagaggctgggtgcagtggctcacacctttaatcccagcactttgggaagccaaggcaggaagactgcttgaaaccaggagtttgagaccagcctgagcaacaaagcaagaccccatctctataaaaactaaaaaaattagttgggcatggtggcacatgcctgtagtcccagctactccagaggctgagatggatcatctgagcctcaggaggttgaggctgcagtgagctgtgactgcgccactgcactccagtctgggacaacagagcaagaccctgtcttaaaaaaaaaaagaaaaaaaaaatttttttctaagaagctgtcctacaaagttgagctttgttagtttttcatgtgtaatatattataaatttatcttttgggatataataaatgctttcatata

SEQ ID NO: 4633 - DNA, 5052 bp, Homo sapiens
  source 1..5052: mol_type = genomic DNA
gtttgggaggcgcgggagatgtccaccctgggctggtggcgccgccgggcgccgggcgccatgagggtgcgctaggcggctgttcgtgcccgaggctgcgcagcactgaggtgagctttgccttcttgatcttccgtccttcttggagacgactggcgagaggaagagggactaggtccaaacgctaggtggctgggtccaggtccctgagtactgacggtcacaggctgccgcgtctttcctgttgactcatgtttggttcctccagtgaaaattttacttagagaaatgctgcctccaaagcacttgtctgccaccaaacctaagaagtcctgggccccaaatctgtatgagctagacagtgacttgactaaggagccggatgtcatcataggagaaggtccaactgactctgagttttttcatcagaggtttcggaacctaatctatgtggaatttgttgggcctcggaagaccctgatcaaactccgaaacctctgcctcgattggttgcagccggagacccgcaccaaggaggagatcatcgagctcttggtccttgagcagtacctgaccatcatccctgaaaagctcaagccttgggtgcgagcaaaaaagccggagaactgtgagaagctcgtcactctgctggagaattacaaggagatgtaccaaccagaagacgacaacaacagtgacgtgaccagcgacgacgacatgacccggaacagaagagagtcctcaccacctcactcagtccattctttcagtgaccgggactgggaccggaggggcagaagcagagacatggagccacgagaccgctggtcccacaccaggaacccaagaagcaggatgcctccgcgggatctttcccttcctgtggtggcgaaaacaagctttgaaatggacagagaggacgacagggactccagggcttatgagtcccgatctcaggatgctgaatcataccaaaatgtggtggacctcgctgaggacaggaaacctcacaacacaatccaggacaacatggaaaactacaggaagctgctctccctcgtgcagcttgctgaagacgatggccactcccacatgacgcagggccactcatcaagatccaagagaagtgcctacccaagcaccagtcgaggtctaaaaactatgcctgaagccaaaaaatcaacccaccggcgggggatttgtgaagatgaatcttcccacggagtgataatggaaaaattcatcaaggatgtgtcacgcagttccaaatcgggaagagcaagggagtcaagcgaccggtcacagagattccccagaatgtcagatgataactggaaggacatttcattgaacaagagggagtcagtgatccagcagcgggtttatgaagggaatgcatttaggggaggctttaggtttaattcaacccttgtttccagaaagagagttcttgaaagaaagaggcgctatcattttgacacagatgggaagggctcgattcacgatcaaaaaggctgtcccaggaagaagccctttgaatgtggtagtgagatgagaaaagccatgagcgtgagcagcctgagcagcctcagctccccctcctttaccgagtcacagccaattgattttggggcaatgccatatgtatgtgatgagtgtgggaggtcgttcagtgtcatctcagaatttgttgagcaccagatcatgcatactagagagaacctctatgagtatggtgagtcctttatccacagtgtggctgtcagtgaagttcagaaaagtcaggttggagggaaacgttttgaatgtaaggactgtggagagaccttcaataagagtgccgccttggctgaacatcggaagattcatgctagaggttatcttgtggaatgtaagaatcaggaatgtgaggaagccttcatgcctagccccacctttagtgagcttcagaaaatatatggcaaagacaaattctacgagtgcagggtgtgtaaggaaaccttccttcatagttctgccctgattgagcaccagaaaatccactttggggatgacaaagataatgagcgtgaacatgaacgtgaacgtgaacgtgagcgcggggaaacctttaggcccagcccagcccttaatgagtttcagaaaatgtatggtaaagagaaaatgtacgaatgtaaggtgtgtggggagactttccttcatagctcatccctgaaagaacatcagaaaatccatactagagggaacccatttgaaaacaagggtaaagtgtgtgaggaaacctttattcctggtcagtcccttaaaaggcgtcagaaaacttacaataaggagaagctctgtgactttacagatggccgggatgccttcatgcaaagctcagagctcagtgagcatcagaaaattcattctcgaaagaacctctttgaaggcagagggtatgagaaatctgtcattcatagtgggccattcactgaatctcagaagagtcatactataacaagacctcttgaaagtgatgaggacgaaaaggcgttcaccattagctctaacccctatgaaaaccagaagattcccactaaggaaaatgtctatgaggcaaaatcatatgagaggtctgttattcatagcttagcctctgtggaagctcagaaaagtcacagtgtagcagggcccagtaaaccaaaagtaatggcagagtctaccattcagagcttcgatgctatcaaccatcagagagttcgtgctggagggaacacctctgaaggaagggaatacagtaggtctgttatccatagcttagtggcttccaaacctccaagaagtcacaatggaaatgaattggtggaatctaatgagaagggagaatcctccatttatatctcagaccttaatgataagcgacagaagattcctgccagagagaacccttgtgaagggggcagtaagaatcgcaactatgaagactctgtcatacagagtgtattccgtgccaaacctcagaaaagtgttcctggagagggatctggtgagtttaagaaggatggcgaattctctgttcccagctcaaatgtccgtgaataccagaaggctcgtgctaaaaagaaatacattgagcataggagcaatgagacctctgtaattcactctctgccttttggtgaacaaacatttcgccctcgagggatgctctatgaatgtcaggagtgtggggagtgctttgctcatagctctgacctcactgagcaccagaagattcatgatagggagaagccctctggaagcagaaactatgaatggtctgtcattcgcagcttggcccctactgaccctcaaacaagttacgcccaagagcagtatgctaaagagcaagcgcggaacaaatgtaaggacttcagacaattttttgctaccagcgaagacctcaacacaaaccagaaaatctatgaccaagagaagtctcatggcgaggagtctcaaggcgagaatactgatggggaggagacccacagcgaggagacccatggtcaggagacaattgaagaccctgtcattcaaggctcagacatggaagaccctcagaaggatgaccctgatgacaaaatctatgaatgtgaggactgtggcctgggctttgtggatctcacagacctcacagaccatcagaaagtccacagcaggaagtgcctggttgacagtcgggagtacacacattctgtaattcacacccattccatcagcgagtatcagagagattacactggagagcagctgtatgaatgtccaaagtgtggggaatcttttattcatagctcattccttttcgagcatcagagaatccatgaacaagaccagttgtattccatgaaggggtgtgatgatggttttattgccctcttgcccatgaagccacggaggaatcgtgctgcagagaggaatcctgctcttgctgggtcggccattcgatgccttttgtgtggacaaggcttcattcatagctctgcccttaatgagcatatgagacttcatagggaagatgatttactggagcagagccagatggctgaggaagctatcattccaggcttagccctcactgagtttcagagaagtcagaccgaagagagactctttgaatgtgcagtctgtggagaatctttcgtcaacccagcagaacttgcagatcacgtaactgttcataagaatgagccctatgagtacgggtcctcctatactcacacctcatttcttactgagcccctcaaaggagctataccattctatgaatgcaaggattgtggtaagtcctttattcatagcacagtcctcactaaacataaggagcttcatctggaagaagaagaagaagatgaagcagcagcagctgcagcagcagcagcccaggaagttgaagccaatgtccatgttccacaagtagttctgaggattcagggcttaaacgtagaggctgctgagccagaagtggaggctgccgagccagaagtggaggctgctgagccagaagtggaggctgctgagccaaacggagaggctgaagggccagatggagaggctgcagagcccattggagaggctggacagccaaatggagaggccgagcagccaaatggggatgctgatgagccagatggtgcaggtattgaagacccagaagaaagagctgaagagccagagggaaaagctgaagagccagagggagatgccgacgagcctgacggtgtgggaattgaagacccagaagaaggtgaagatcaagagattcaggtagaagaaccatactatgactgccatgaatgcacagaaaccttcacttccagcacagcattcagtgaacacctgaaaactcatgccagcatgatcatatttgagcctgcaaatgcctttggggagtgctcaggctacatcgaacgtgccagcaccagcacaggtggtgccaatcaagctgatgagaagtacttcaaatgtgacgtctgtgggcagctcttcaatgaccgcctgtccctcgccagacaccagaatacccacactggc

SEQ ID NO: 4634 - DNA, 4536 bp, Homo sapiens
  source 1..4536: mol_type = genomic DNA
atgtctcaatggactcctgaatataacgagctctacaccttaaaagtggatatgaagagtgagattccttctgatgcaccaaagacacaggagagtctgaaagggatccttttgcatccagagcccattggggcagccaaaagttttcctgcaggagttgagatgattaatagtaaagtggggaatgaattctctcacctgtgtgatgattctcaaaagcaagagaaggaaatgaatggtaaccagcaagaacaagaaaaaagtctcgttgtgaggaaaaaacgcaaaagccagcaggctggcccttcgtatgtgcagaattgtgttaaagaaaaccagggaatattaggactgaggcaacacctagggacaccaagtgatgaagataatgattcctcttttagtgattgtctttcttctccttcatctagtctgcattttggagattctgatactgtgacttcagatgaggataaagaagtctctgtaagacattcccagaccattttgaatgctaaaagtagaagccatagtgcacggtctcataagtggcctcggactgagacagaatctgtatcgggattgttaatgaaaagaccctgtttacatggcagttcgttacggagacttccatgcagaaagagatttgtaaaaaataattcctcacagaggacacagaaacaaaaagagaggatattaatgcagaggaagaaacgagaagtgttagctcgaagaaaatatgccttgctacctagttctagtagttccagtgagaatgacctcagcagtgaatcctcttctagctcatcaactgaaggagaagaagatttgtttgtttctgccagtgaaaaccaccaaaacaatccagctgttccctcaggaagtattgatgaagatgttgtggtgatagaagcttcctccactccccaggttactgccaatgaagaaattaatgttacctcaactgacagtgaagtggagattgtaacagttggagaaagctatcggtctcgttcaacccttggacactccagatctcattggagccagggttccagttctcatgcaagtcggccacaggagccacggaaccgcagtaggatttctactgttatacagcccttgaggcagaatgcagcagaagttgtggaccttaccgttgatgaagatgaacctactgtagtaccaaccacttctgcaagaatggaatcacaagctactagcgcttccattaacaattcaaatccatctacctctgagcaggcctctgatactgcttcagctgtcaccagtagccaaccttccacagtgtcagagacttcagctactcttacaagcaatagtaccactggcacttctataggagatgactcaaggagaactacatctagtgctgtaacggaaactggccctcctgcaatgccaaggttaccttcctgctgtccccagcactcaccatgtggagggtcgtcacagaaccaccatgcattaggacatcctcatacaagttgctttcagcagcatggtcaccattttcaacatcatcaccaccaccaccatactccccacccagctgtcccagtttctccttcctttagtgatcctgcttgccctgtggaaagacctccacaagtacaagcaccttgtggagcaaatagtagttctggtaccagctatcatgaacagcaggcattgccagtggacctgagcaacagtggtatcagaagtcatggaagtggcagttttcatggagcatctgcatttgacccctgctgccctgtttcttcctcccgagctgcaatctttggccatcaggccgctgctgctgccccaagtcaacctttatcatcaatagatggctatggatcaagcatggttgcgcagccccagccccagccccctccacagccctctctctcatcatgtcgacattacatgccacccccttatgcctctttgacaaggccacttcatcatcaagcttctgcctgcccgcattctcatggaaacccccctcctcagactcagcctccgcctcaagtggattatgttattcctcatcctgtacatgctttccattctcaaatatcttctcatgcaacatctcatcctgtggcacccccaccaccaactcacttagccagtacagctgcaccaatccctcagcatcttcctcctacacaccagccaatttcgcaccatattccagccacagcacctccagcacagagactgcatcctcatgaagtgatgcagaggatggaagttcaaaggaggaggatgatgcagcatccaactggtctttttgtgttctgtgtttccaggcgggcacatgaacgccccccaccccatccacataggatgcacccaaactatggtcatgggcatcatattcatgtgcctcagactatgtcctcacatcctcgacaggctccagagaggtctgcctgggaactgggaattgaagctggagtgactgcagctacttatacacctggtgcattgcatcctcacttggcccattatcacgcacctcctcgacttcatcacttacaattaggagctcttcctttaatggttcctgatatggcaggctatcctcacatccgttacatttcatcaggattggatggaacatcattcagaggtcctttcaggggcaattttgaggaactgattcatttggaagaaagattaggcaatgtcaatcgtggagcatcccaggggacaattgaaagatgtacatatccacataaatacaaaaaggtaacaactgattggttctcacagaggaaactgcactgcaaacaagatggggaagaagggactgaggaagacacagaggaaaaatgtactatctgtttgtctattttagaggaaggtgaagatgtgagacgtcttccatgtatgcaccttttccaccaagtgtgtgttgaccaatggttgattaccaataagaagtgccccatatgcagagtggacattgaggcccagctgccaagtgaaagttgacaccatgtttcagaactcttgccctccctctcattcccatccttcctggtactgcagtcaaccaaagatggcatgacttacctgcgcagatttggaagcattgaacttagagtgctggctctgctatatggtacaactaatgctagacctacagtttatgtatacagttgattttgatgtatttataaaagcttttttttctagatttgacatttttctgtatcattttactgtatttttgcatggttccttgtattgcatttctttgcacatattatgggcttgtgaccctaaacttgcaggcaaggttagctgctttagtaagtagaattttgtggtctttttgttttttacatagtaccaagccttgataattatgaattttttatccattactaacctttaatttaatcaatcatgtactttagtttaatgtataaagatcctctagaaaatgataatattgtgtattaagacattccttaattaggacaaaatggctgctgtatatttactatatggagttctgagttaaataccatccttaatactgggaacagaatacaacccatataaatcagatgcaggtggtagtcacatcaccagagtgatcagtataaattttcttggtgtatccttttcctttcaacacagtgcagataagagttgaatattgatatcatacatttagactgctgttctgattgcatttatctttttcctacatcatttagaattttatttccctgattcagtttttgctgctgtgaaacagctctgatgaacactaaatattaatttcaattagctagattgtacatacttgcagatttaacaaaattttagggaaattgaaaaagacatgtagaatttgttgtcttctgctaagcacgaaaagttaagatatctgcttacattgattttgtagacacattaagtcaagatttggaatttaagtcactggcaggtatctgtgcattcatagaacttataaaggtcccaggatcacttttaagggatttttattagtttaaaggtaaataaagtcagctgaatctacatgtctcttgttttatttctctctaaacttgaaaacagtaaatctgcagatactgtgaggcacaaattatactgtcaacctactgttgctatggttatatactcccacttcatacattaccaagagtcgatcactgatttaaaatttttaatttctatagttaagatttactgcataatatagaatataaagttaagttaacatactaacatttctcctttggaggaagttttaatctacttcaggatgcatattattatcaagatactttcatatacaggatagcctaattttatttgtttaaatatgcttaatatgccccagattgcaaatgcatccagtcagtaatatcactgtctgtatgtggaggacatgttcccatggatcatatgtgaagatgtcaataagcttgcattaagccacctgctttgtaagtggattgattaataaataacttatatttc

SEQ ID NO: 4635 - DNA, 504 bp, Homo sapiens
  source 1..504: mol_type = genomic DNA
gtgctggctgcgtatgcgtcacgggcgtcatgacctcgctgtggccccggcagcggctgcggggaaagtcgcgaggtgcatccgcttcggctgcagctatttactgaggacccactggatgtcaagcattgtgcatagttttcttcgattgttgcaacatcccttgcgagagtttcactcctgttgcccaggctggagtgcaatggcatgatctcagctcaccgcaacctccgcctcctgagttcaagcagttctcctgcctcagcctcctgaatagctcggattacagtttctggagcagcagagctgaaggaacccaaacttggactgaagtgactctactaaggtcagctctatggctcttccacatgattcaaacgaaacttcctatttgctgcctcccaacaatgaggactggggcaggcaaaccattcctgactttgtttatgggcagaaggatctcatggcagaagggattcagtggccaaggaatgcacctggcat

SEQ ID NO: 4636 - DNA, 2026 bp, Homo sapiens
  source 1..2026: mol_type = genomic DNA
ggctccacggccacatccgcaaaaagggtactggtgaacgtgacattttcacgaagccacagcccatggtcactccctgcaaagctctgaacttgcgcattcccaggccaggccgtggttgtctttccaaggcggctcagcttgtgctttgcttggagagagcggagggcagcagcacagtgacagcgtctgggacctcagaccagtttccacagccacttatgaaagcagacggctccatgggctggaggaggtgggacgctctggaaagaactcgggtgcgagtgggaaagaaaatcgagctgagcagctggaagtcgaagtcgcgtgagtgaggaccagacactctcgatttaggcaaaggcggggtgcacttcccaacaacacatcctcctcactggcgagaccaggcctgcccttcaagttcctctcctgatttaatccccttggcgagggtttggcatgaaatcaatggccagcaagcttggtaaacgaagccgcctacaccgccctccccctccctgcacggccgcgccccgcctccgctcctgtctcaatctgggattgtcctcctgtagccccaccatccaccgtggggaacggtggagagactacaactcccagtatgcaccgcgatgcgcgcctcaccctgcatctcccagcccgcagccagctggcatcctagaccctctgccctgcgaccaacagccgggagcggaccagacaccagaactcccggaacggttgaagacggttccgctccctgtcccgcctttcgcagcccagcagtttcgccctgcggagaggagccttgctgtttccaaatctctcctgctgaagagacattggagctagggcggctagtttcacctggtaattgtgacaccctgtctcctcgagctgcaggcttttatgcttgtcatgttcgaagtttgataccttgcagatcaacaaagggccggtggcctctcactgcctccgcggcagggttgtcaagtttttcaggttaagtactgcacgactactcgcttctgaaactgatagacactgcctcagctccgtgcagggcagacgcacaagagcagaatctccgtgggacatctctctggagcatcaatattactgcagtatttggaagaaacaaatttaaataagttctaaggtgaagaatggaacatttaagacaagtctggaaagtcatctgcctttaataactgtcgtttgtccttaacgtcagactttctccaagaccaaaactctaagaacttatttccattcttacaaatagtaaaaatgataaatcatatcaagtcaattgaaagtcctgcctgctgctttcctaaattgcaatatggccttggtatggttttatttgtacttttgtgggggattcgtggatctttagattaaaaaaaaaaaaataggtttttgaacaatttttgcaagtttgcagctgttagttattgatttatttttccaacccatctaattcttctgtctctctcctcaggctcaataattccatgggtctctaaggctgtgtttattttctttaaattttgttgatttacttttatactccatttgattttttctatctctcaccttttctcagactcagtcatcccacaggtctgtaaggctctgttcattttctttaaacttcttttttttttcctctcctcagattggataaattatattgctatgtctctgtttctgaactatagaaaagctcaaaattattatttttatttctcattttttatatggctattttttctctgctgatgtttcacatctattcatttatgagaatattttcctttgccctcatgagcgtgtttataatagctgccttcaaattcttgtctgccgtttacatcttggacatcttggagatggctactgcctgctttttatcttgtgtatttattacattttcacgtgtcttcacgcatcccttgaattggaaattgtgccctggagactgtatacaagactggattaaaaagactggattctg

SEQ ID NO: 4637 - DNA, 1790 bp, Homo sapiens
  source 1..1790: mol_type = genomic DNA
caggagtggcctccgacgtcactgtggcgcgccgcttccggtctgcagccttgtagtggggctggagcagagcctgccgcgaacccccggagcccacgatccctcgtgccatccctcgaatccaccagcacgagcgtcccacccgcgcctgggaccatggccactgactcatgggccctggcggtggacgagcaggaagctgcggctgagtcgaggacagagctgcccagtccttactcaacaagctgatcagaagcaaccttgttgataacacaaaccaagtggaagtcctgcagcgggatccaaactcccctctgtactcggtgaagtcttttgaagagcttcggctcccacagaacttaattgcccaatctcagtctggtactggtaaaacagctgccttcgtgctggccatgcttagccaagtagaacctgcaaacaaatacccccagtgtctatgtctctccccaacgtatgagctcgccctccaaacaggaaaagtgattgaacaaatgggcaaattttaccctgaactgaagctagcttatgctgttcgaggcaataaattggaaagaggccagaagatcagtgagcagattgtcattggcacccctgggactgtgctggactggtgctccaagctcaagttcattgatcccaagaaaatcaaggtgtttgttctggatgaggctgatgtcatgatagccactcagggccaccaagatcagagcatccgcatccagaggatgctgcccaggaactgccagatgctgcttttctccgccacctttgaagactctgtgtggaagtttgcccagaaagtggtcccagacccaaacgttatcaaactgaagcgtgaggaagagaccctggacaccatcaagcagtactatgtcctgtgcagcagcagagacgagaagttccaggccttgtgtaacctctacggggccatcaccattgctcaagccatgatcttctgccatactcgcaaaacagctagttggctggcagcagagctctcaaaagaaggccaccaggtggctctgctgagtggggagatgatggtggaacagagggctgcagtgattgagcgcttccgagagggcaaagagaaggttttggtgaccaccaacgtgtgtgcccgcggcattgatgttgaacaagtgtctgtcgtcatcaactttgatcttcccgtggacaaggacgggaatcctgacaatgagacctacctgcaccggatcgggcgcacgggccgctttggcaagaggggcctggcagtgaacatggtggacagcaagcacagcatgaacatcctgaacagaatccaggagcattttaataagaagatagaaagattggacacagatgatttggacgagattgagaaaatagccaactgagaagctccaccagccactgatgccagccctggcactgcccctgcacaggagacaagtgcgttcagggcacaggccccgacatcaccccaaggacaacggcacaagtagagagaaactacctacctcacttcaaattatgtttggacttgacaaaaatgtatgcaaatgatgggggatggtagaaaaaaattatttacacaaccttggaagattaggcatgaatacacagagatttaccttttggaagtttcatcttttaatttggccagtgtttccttcatgctaatctagatgctgtggctgattacttgcccaggatctcctgtggcagcctctgcttgttctctggcttggagtggatggggcagcctccagctcctgtggaagtaa

SEQ ID NO: 4638 - DNA, 2043 bp, Homo sapiens
  source 1..2043: mol_type = genomic DNA
ccgggatgtgcaggccgggaggtagaggcaggctgatgggggagggaacgagcagcctgtgagacggggtgacggcggctaccagcccgggcgggcaccgggactggaagagttgcctgagcagccggctggtccggcggccaggctagggcgggggcgagcgcccagttgagcctgctggggctggaggagcgagaagggttctcttcacatttcagagcgaaccagacggacagtaaggtttggaggaagggggatcgttggaagtagcaggaagtggagagaatctggcaataggcgagaaaccgaaagaatcagaaagaagtctatgtgagtagctgaaagcattgggtgaccagaaagaaggtcgctgtaagtgaaggaagagtgaggtgtggctggatcaaagggctaagagaagcgggtctgtgtaagtggatgtgagtgaggatcaaggaaaagccgtggaagtggccgggggtcggggccgcagaagtgccagacggggccggaaagcagccgagcggagttcaaatttgagagcgtttggaaattggaagacttggtggcgaacgagggtcaggacctgcatcctgcctcagagttatcgacgtatccggaatgtgggatcagaggctggtgaagttggccctgttgcagcatctgcgggccttctatggtattaaggtgaagggtgtccgtgggcagtgcgatcgcaggagacatgaaacagcagccacggaaatagggggtaaaatatttggagtaccttttaatgcactgccccattctgctgtaccagaatatggacacattccaagctttcttgtcgatgcttgcacatctttagaagaacatattcataccgaagggctttttcggaaatcaggatctgtgattcgcctaaaagcactaaagaataaagtggatcatggtgaaggttgcctatcttctgcacctccttgtgatattgcgggacttcttaagcagttttttagggaactgccagagcccattctcccagctgatttgcatgaagcacttttgaaagctcaacagttaggcacagaggaaaagaataaagctatactgttgctctcctgtcttctggctgaccacacagttcatgtattaagatacttctttaactttctcaggaatgtttctcttagatccagtgagaataagatggatagcagcaatcttgcagtaatatttgcaccaaatcttcttcagacaagtgaaggacatgaaaagatgtcttctaacgcagaaaagaagggcgtgtaccagactttatcctggaaaagataccagccatgttgggtattgatggtctctgtgctactccatcactggaaggctttgaagaaggtgaatatgaaactcctggtgaatataagagaaagagaagacaacgtgtaggagattttgttagtggagcactaaataaatttaaacctaacagaacaccttctattacacctcaacaagaaagaattgataatgaaacaaccaccatcggttaaatttgatccaaaaatattgcatctaccagcattttcagtggataagttataatttctgaaagaccaagattggaatgactttttgtaacaagtgtgctcgcagatcgactccagtgagaagagctcggggacctcctgagccaagtttaatctcctttgctatttgtgcatggtggctggtcaccaggaggtggccaccaggcttctcctttccccgctgttctaattgctaatccagtatttgcggatagctccaaactgggatatgaccaccattgtatatgcagaccattgactggaacatcatgatctatctgcacatgactgtaaataacaactattggatgtggcacagatggaagctacataaacactctatacaatatggccaattcaccgggctccctgttagtcttgtgagcaattttaaactcttccacgattctttctctgctttggagtgtttcaattaattctccattatattacaatttacatttttattaagccttta

SEQ ID NO: 4639 - DNA, 1760 bp, Homo sapiens
  source 1..1760: mol_type = genomic DNA
gcccccggctcccggaggtcgacattttggtttccataggcaaagtcctaacaccacaattgacatagttaaaaaggggagacggtaacgtgtttggtagaggttacatatcttgctatagttgtttattttagttgctgagtgatacacagccctcaaagagtctgacattgtgcccatggttacacttgtccgggggagaccttgaatttggtgtggaagaaataacatcagtagttcagaggacagagctgcccagtccttactcaacaagctgatcagaagcaaccttgttgataacacaaaccaagtggaagtcctgcagcgggatccaaactcccctctgtactcggtgaagtcttttgaagagcttcggctgaaaccacagcttctccaaggagtctatgccatgggtttcaatcgtccatccaagatacaagagaacgcattgccactgatgcttgctgagcccccacagaacttaattgcccaatctcagtctggtactggtaaaacagctgccttcgtgctggccatgcttagccaagtagaacctgcaaacaaatacccccagtgtctatgtctctccccaacgtatgagctcgccctccaaacaggaaaagtgattgaacaaatgggcaaattttaccctgaactgaagctagcttatgctgttcgaggcaataaattggaaagaggccagaagatcagtgagcagattgtcattggcacccctgggactgtgctggactggtgctccaagctcaagttcattgatcccaagaaaatcaaggtgtttgttctggatgaggctgatgtcatgatagccactcagggccaccaagatcagagcatccgcatccagaggatgctgcccaggaactgccagatgctgcttttctccgccacctttgaagactctgtgtggaagtttgcccagaaagtggtcccagacccaaacgttatcaaactgaagcgtgaggaagagaccctggacaccatcaagcagtactatgtcctgtgcagcagcagagacgagaagttccaggccttgtgtaacctctacggggccatcaccattgctcaagccatgatcttctgccatactcgcaaaacagctagttggctggcagcagagctctcaaaagaaggccaccaggtggctctgctgagtggggagatgatggtggaacagagggctgcagtgattgagcgcttccgagagggcaaagagaaggttttggtgaccaccaacgtgtgtgcccgcggcattgatgttgaacaagtgtctgtcgtcatcaactttgatcttcccgtggacaaggacgggaatcctgacaatgagacctacctgcaccggatcgggcgcacgggccgctttggcaagaggggcctggcagtgaacatggtggacagcaagcacagcatgaacatcctgaacagaatccaggagcattttaataagaagatagaaagattggacacagatgatttggacgagattgagaaaatagccaactgagaagctccaccagccactgatgccagccctggcactgcccctgcacaggagacaagtgcgttcagggcacaggccccgacatcaccccaaggacaacggcacaagtagagagaaactacctacctcacttcaaattatgtttggacttgacaaaaatgtatgcaaatgatgggggatggtagaaaaaaattatttacacaaccttggaagattaggcatgaatacacagagatttacc

SEQ ID NO: 4640 - DNA, 3705 bp, Homo sapiens
  source 1..3705: mol_type = genomic DNA
gtggtctcgcgggcgggtgacgtcatcgaggcgagagaggcggagccgtggacagtgggcgggaggctgccaacggttttgagcgtagggggaggcgtgagagggggatctcaggggaggaggtcaatcgcttgccccccactttggcaaattggggactgaggactggaagggtggagagtaggcggaaccaggtggtcgtcggggcagaggatctcgggctaggcttgagggcggcgtgcttcttagggacgacttagggcgtgactgagggttcacaaggtttcttttggggtggtcgggagggagagattctagggaacaaggaagctcgctatggctttcttgccaggaggggtcgaagggaaagtacaagggagctggagctgaccctgggtagaacgggtgaagggatgggggagcgtgaggttccgccctctcttgagactggaaccaattgagggactagtagggcagggggacagaaattgggctcctagtggatttgggtccgtttccgttgggacgttttgggtgtgagaacttaagagctcagttgaccggggatagcctgtgccggagttgatctgcagcttccagcactcgtagtcgggaagaggagcttcagcagcgctgttgtcccacagtaggtcttctgtccgcacccgctctgcgctgcaccctcttaacgctgttcccaggagctggggaaagggatgcttttgcccactcccatggcccctggaactggtggaaacctttcctctaaccagaaagcctcgatatccttaattcaccaaggatccttggcgtggagtcttcctcccttctcccaagtctttctccgtgaacttttcctcctggactttgctaaagcagaacctcccagctctttgctgtctccggttgtctcttccctgtattcatggcaacatcagctgacagccccagttcacccctcggggcggaggatctcctgagtgattcatcagaaccccctgggctcaaccaagtgtcgtctgaagtgacctcccagctctatgcttctttgcgcctcagccggcaggcggaggccacggcccgagcccagctgtatttaccctccacctccccgcctcatgaagggttagacggcttcgcccaagaattgagtcgaagcttgtcagtcggattggaaaagaacttgaagaaaaaggatggttctaagcatatctttgagatggaaagtgttcggggtcagctccagaccatgctccaaacctcacgtgatacagcctatcgggatcctctcattcctggcgctggctcagagagacgggaagaggactcctttgacagtgatagcacagccaccttgctcaacacccggcccctgcaagacttgtctccatctagctcagcccaagccctggaggagctgtttccccgctacaccagccttcggccagggcctccactcaatcccccagattttcaggggctgagagatgcattggattcagagcatacccgccgcaagcattgtgagcgccatattcagagcctgcagacccgagtgttagagctacagcaacaattagccgtggctgtggctgccgaccgcaagaaagataccatgattgaacaactggacaagaccctggcccgtgtggtggagggctggaaccggcatgaggctgagcggacagaggttctcaggggacttcaagaggaacaccaggcagcagagctcaccagaagcaagcagcaggagacagtaacccgcctggaacaaagcctttctgaggccatggaggccctgaatcgtgagcaggaaagtgccagactgcagcaacgggaaagagagacactggaggaggaaaggcaagctctgactctgaggttggaggcagaacagcagcggtgctgtgtcctgcaggaagagcgggatgcagctcgggctgggcaactgagtgagcatcgagagttggagactcttcgggctgccctagaagaagaacggcagacctgggcccagcaagagcaccagcttaaggaacactaccaggcgctgcaggaggagagccaggctcagctggaaagggagaaggagaagagccagagggaagcccaggccgcctgggagacccagcaccagttggcattggtgcagtctgaggtgcggcggctggaaggagagctggatacagctcggagagagagagatgccctgcagctggaaatgagcttggtgcaggcccggtatgaaagccagcggatccagctggagtcggagctggctgtgcagctggagcagcgggtgacagagcggctggcgcaggctcaggagagcagcctacggcaagcagcctccctcagggaacatcacaggaagcagctgcaggacctgagtggacagcaccagcaggagctggccagtcagctagctcagttcaaggtggaaatggcagaacgagaggaacggcaacagcaggtggctgaggactacgagctcagactggcccgggagcaagcgcgagtgtgcgaactgcagagtgggaaccagcagctggaggagcagcgggtggagctggtggaaagactgcaggccatgctgcaggcccactgggatgaggccaaccagctgctcagcaccactctcccgccgcccaaccctccagctcctcctgctggaccctccagccccgggcctcaggagcccgagaaggaggagaggagggtctggactatgcctcccatggccgtggccctgaagcctgtattgcagcagagccgggaagcaagggacgagctacctggagcgcctcctgttctttgcagttcctcctcagatcttagcctcctgttgggcccctcttttcagagccagcattctttccagcccctggagcccaaaccagacctcacttcatccacagctggggccttctctgcacttggggccttccatcccgatcatagggcagaaaggccattccctgaggaagatcctggacctgacggggagggcctcctaaagcaagggctgccgcctgctcagctggagggcctcaagaattttttgcaccagttgctggagacagtgccccagaacaatgagaacccttctgtcgacctgttgccccctaagtctggtcctctgactgtcccatcttgggaggaagcccctcaagtgccacgtattccaccgcctgtccacaaaaccaaagttcccttagccatggcatccagtcttttccgggtccctgagcctccctcctcccattcacaaggcagtggtcccagcagtggttccccagagagaggtggagatgggcttacattcccaaggcagctgatggaggtgtctcaactgttgcgactctaccaggctcggggctggggggctctgcctgctgaggatctcctgctctacctgaagaggctggaacacagcgggactgatggccgaggggataatgtccccagaaggaacacagactcccgcttgggtgagatcccccggaaagagattccctcccaggctgtccctcgccgccttgctacagcccccaagactgaaaaacctcccgcacggaagaaaagtgggcaccctgccccgagtagcatgaggagccgggggggagtctggagatgagcccccctaccctctctcctctttgttctctcattgttgttattttaataaatgctcattagtctgta

SEQ ID NO: 4641 - DNA, 1043 bp, Homo sapiens
  source 1..1043: mol_type = genomic DNA
gctgcaaagcggggggccgccgcctccctgggcctgcctgggcggccgcctccgcgatgccgctgctcgtcgaggggcggcgagtgcggctgccgcagtcagccggggacctcgtccgagcccacccgcctttggaggctccatctccattctgggttctgatgatgccactacttgtcacattgtggtcctgaggcacacaggtaatggggccacctgcttgacacattgtgacggaaccgacaccaaagctgaggtccccttgatcatgaactccataaaatccttttctgaccacgctcaatgtggaaggctggaagtacaccttgttggaggcttcagtgacgacaggcagttgtcacaaaaactcactcatcaacttcttagtgaatttgacaggcaagaagatgacattcacttagtgacattatgtgtgacagaattaaatgaccgggaagaaaacgaaaaccactttccagtaatatatggcattgctgtcaacattaagactgcagagatttacagagcatcctttcaagatcggggtccggaggagcagcttcgtgctgcgcgaactttagcaggaggaccaatgattagcatttatgatgcagagacagaacaacttcgtataggaccgtactcctggacaccatttccacatgtggatttctggttgcaccaagatgacaagcaaatactagagaatctttccacttcgcctctggctgagccaccccactttgttgaacatattagatctaccttgatgtttttaaaaaaacacccatctccagctcacacactgttttctggaaataaagccctactctacaaaaaaaatgaagatggcttgtgggaaaagatctcttctccaggaagttaaaaaacatgaattaccaaagaaagcaccttcttggcctgacagaccattggtggggctggcacgaatccagatctggatcctacatctgttgggtcttaggcctccttccctcctcagtgtctttcaaatgactttcatcaaatgactttcaaaataa

SEQ ID NO: 4642 - DNA, 1641 bp, Homo sapiens
  source 1..1641: mol_type = genomic DNA
ggcgcgaggcctgtgggcccagcggtgaggcagcagctgggggcggggggagggcggacctagcttcccagggcaggtgattcgtcggccccggtggcggcggcgcgtgcgacggtcacctcggtttggggtccacctaaagtgggaagtctgttttcaaaatgacatctactccatgcctgtcttgtttccctaatgtactttatggaagttcttcacactactggagcattgacgttacttgttaagcagccttccacatcctagctcttttccaaggaagatggaagagttgagtcaggccctggctagtagcttttctgtgtctcaagatctgaacagcacagctgccccacacccccgcctatcccagtacaagtccaagtacagttccttggagcagagtgagcgccgccggaggttactggaactgcagaaatccaagcggctggattatgtgaaccatgccagaagactggctgaagatgactggacagggatggagagtgaggaagaaaataagaaagatgatgaagaaatggacattgacactgtcaagaagttaccaaaacactatgctaatcaattgatgctttctgagtggttaattgacgttccttcagatttggggcaggaatggattgtggtcgtgtgccctgttggaaaaagagcccttatcgtggcctccaggggttctaccagtgcctacaccaagagtggctactgtgtcaacaggttttcttcacttctgccaggaggcaacaggcgaaactcaacagcaaaagactacaccattctagattgcatttacaatgaggtaaaccagacctactacgttctggatgtgatgtgctggcggggacaccctttttatgattgccagactgatttccgattctactggatgcattcaaagttaccagaagaagaaggactgggagagaaaaccaagcttaatccttttaaatttgtggggctaaagaacttcccttgcactcccgaaagcctgtgtgatgtgctatctatggatttcccttttgaggtagatggacttctcttctaccacaaacagacccactacagccccggaagcactcccttggtgggctggctgcgcccctacatggtgtcagatgtccttggtgtagctgtgccggctggcccgctgaccaccaagccagactatgctgggcaccagctccagcagattatggagcacaagaagagccagaaggaaggcatgaaggagaaactcacacacaaggcctctgagaatgggcactatgaattggagcacctgtctactcccaagttgaagggttcttcccatagcccagaccaccctggatgcctcatggagaattaaagagagaagcctccttaaggagccacaggatggtacctggccccaaaaggaatcctggagaggaggacagtgacaacaggtgacttcattctttagagtgaactttccaaacccagtccagctggaaacagcttatctataatctgaaatgctggctcaaacagttatggggaggttcccagattgcgtagcattcagattgatttgagcagctcctactgtgataagtgtatcccagatccacaatgtaaatatatgtgatttgtaagaaagaa

SEQ ID NO: 4643 - DNA, 1792 bp, Homo sapiens
  source 1..1792: mol_type = genomic DNA
ctcattttctcttgccgccaccatgtaagaagcgcctttcgcctccctccatgattctgaggcctccccagccacatggtacttgtatgcctagacagcgggcacagggcttgctggacacagaaggcaaggactcagagaatatccaccagatgaaagaatgactgcatgacctgatcctgcctgaagatggtgccactggtggctgtggtatcagggccccgtgcccagctctttgcctgcctgctcaggctgggcactcagcaggtcggcccccttcagctgcacaccggggccagccatgcggccaggaaccattatgaggtgctggtgctgggtgggggcagtggcggaatcaccatggctgcccgcatgaagaggaaagtgggtgcagagaatgtggccattgttgagcccagtgagagacatttctaccagccaatctggacactggtgggtgctggtgccaaacaattgtcctcatctggtcgtcccacggcaagtgtgattccatctggtgtagaatggatcaaagctagagtgactgagttgaacccagacaagaactgcattcacacagatgacgacgagaagatctcctaccgatatcttattattgctctcggaatccagctggactatgagaagattaaaggcctacctgaaggtttcgctcatcccaaaatagggtcgaattattcagttaagactgtagagaagacatggaaagctctgcaggacttcaaagagggcaatgccatcttcaccttcccaaatactccagtgaagtgtgctggagcccctcagaagatcatgtacttatcagaagcctacttcaggaagacagggaagcgatccaaggccaatatcattttcaacacttctcttggagccattttcggggttaagaagtatgcagatgccctgcaggagatcatccaggagcggaacctcactgttaactacaagaaaaacctcattgaagtccgagccgataaacaagaggctgtatttgagaacctggacaaaccaggagagacccaagtgatttcatatgaaatgcttcatgtcacacctccaatgagcccaccagatgtcctcaagaccagtcctgtggctgatgctgctggttgggtggatgtggataaagaaactctgcaacacaggaggtacccaaatgtgtttgggattggggactgcaccaaccttcctacgtcaaagaccgctgctgcagtagctgcccagtcaggaatacttgataggacaatttctgtaattatgaagaatcaaacaccaacaaagaagtatgatggctacacatcatgtccactggtgaccggctacaaccgtgtgattcttgctgagtttgactacaaagcagagccgctagaaaccttcccctttgatcaaagcaaagagcgcctttccatgtatctcatgaaagctgacctgatgcctttcctgtattggaatatgatgctaaggggttactggggaggaccagcgtttctgcgcaagttgtttcatctaggtatgagttaaggatggctcagcacttgctcatcttggatggcttctgggccaaaactgcagtcactgaatgaccaagagcagcacgaaggacttggaacctatccttgtaaagagttccttgatgggtaatggtgaccaaatgcctcccttttcagtacctttgaacagcaaccatgtgggctactcatgatgggcttgattctttgggaataataaaatgaaataatacttttattttctgaataaaagtttgtcactg

SEQ ID NO: 4644 - DNA, 1681 bp, Homo sapiens
  source 1..1681: mol_type = genomic DNA
atgctcagccgcgatggctggggctgccgggcgcgtccaagatcgcgccctgcggcggtttcccatcaccctgcctgtgggcgacgtgagtatctgcgagggtagaagccagaccctttcctcccacgtttaggtgccttcctcgcccctactcctgggtagaggaataacaatatttctcgaggcttcggcccaaggtcttagccttgtgatctagaatccgccatctgtgaggtgctgttgtcaagaccaatgccaatgcagagaagacagatgaagaagagaaagaggacagagctgcccagtccttactcaacaagctgatcagaagcaaccttgttgataacacaaaccaagtggaagtcctgcagcgggatccaaactcccctctgtactcggtgaagtcttttgaagagcttcggctgaaaccacagcttctccaaggagtctatgccatgggtttcaatcgtccatccaagatacaagagaacgcattgccactgatgcttgctgagcccccacagaacttaattgcccaatctcagtctggtactggtaaaacagctgccttcgtgctggccatgcttagccaagtagaacctgcaaacaaatacccccagtgtctatgtctctccccaacgtatgagctcgccctccaaacaggaaaagtgattgaacaaatgggcaaattttaccctgaactgaagctagcttatgctgttcgaggcaataaattggaaagaggccagaagatcagtgagcagattgtcattggcacccctgggactgtgctggactggtgctccaagctcaagttcattgatcccaagaaaatcaaggtgtttgttctggatgaggctgatgtcatgatagccactcagggccaccaagatcagagcatccgcatccagaggatgctgcccaggaactgccagatgctgcttttctccgccacctttgaagactctgtgtggaagtttgcccagaaagtggtcccagacccaaacgttatcaaactgaagcgtgaggaagagaccctggacaccatcaagcagtactatgtcctgtgcagcagcagagacgagaagttccaggccttgtgtaacctctacggggccatcaccattgctcaagccatgatcttctgccatactcgcaaaacagctagttggctggcagcagagctctcaaaagaaggccaccaggtggctctgctgagtggggagatgatggtggaacagagggctgcagtgattgagcgcttccgagagggcaaagagaaggttttggtgaccaccaacgtgtgtgcccgcggcattgatgttgaacaagtgtctgtcgtcatcaactttgatcttcccgtggacaaggacgggaatcctgacaatgagacctacctgcaccggatcgggcgcacgggccgctttggcaagaggggcctggcagtgaacatggtggacagcaagcacagcatgaacatcctgaacagaatccaggagcattttaataagaagatagaaagattggacacagatgatttggacgagattgagaaaatagccaactgagaagctccaccagccactgatgccagccctggcactgcccctgcacaggagacaagtgcgttcagggcacaggccccgacatcaccccaaggacaacggcacaagtagagaga

SEQ ID NO: 4645 - DNA, 796 bp, Homo sapiens
  source 1..796: mol_type = genomic DNA
cgcagatcatgggtggcgggtatgatctcaacctcttcgccagccctcctgacagcaacttcgtgtgctccgtctgccatggggttctcaagaggccagcaaggttgccatgcagccacatcttctgcaaaaagtgcatcctccggtggctagccagacaaaagacctgtccgtgctgtaggaaagaggtgaaaaggaaaaaggttgtccacatgaataaactccggaaaaccattggccgcctggaagtcaagtgcaagaacgccgacgctggctgcatagtgacatgccccctggcccatcgcaaggggcaccaggactcatgcccctttgagctaacggcctgccccaacgagggctgcacctcgcaggtgccgcgtgggaccctggcagagcaccggcagcattgccagcaagggtcccagcagcgctgccccctgggctgcggggccaccctggacccggccgagcgtgctcgccacaactgctaccgggagctgcacaacgcctggagcgtgcgccaggagcgccgtcggcccctgctgctgtccctcctgcggcgtgtgcgctggctggaccaagccaccagtgtcgttcgtagagagctggcggagctcagcaacttcctggaggaagacaccgctctgctggagggtgccccacaggaggaggccgaggctgccccagaaggcaacgttggggctgaggtggtgggggagcccagggccaacataccttgtaaataggtaaataaaagcagacccccggcctgcctgcctctgtgcctgcggccctc

SEQ ID NO: 4646 - DNA, 1116 bp, Homo sapiens; identical to SEQ ID NO: 1485
  source 1..1116: mol_type = genomic DNA

SEQ ID NO: 4647 - DNA, 4134 bp, Homo sapiens
  source 1..4134: mol_type = genomic DNA
ggcttgctcgcgcgtgcgcaccagaagccagcagtggggttgcacacgcgcctcttcacgaggtggaaacaagatggaggattcggcctcggcctcgctgtcttctgcagccgctactggaacctccacctcgactccagcggccccgacagcacggaagcagctggataaagaacaggttagaaaggcagtggacgctctcttgacgcattgcaagtccaggaaaaacaattatgggttgcttttgaatgagaatgaaagtttatttttaatggtggtattatggaaaattccaagtaaagaactgagggtcagattgaccttgcctcatagtattcgatcagattcagaagatatctgtttatttacgaaggatgaacccaattcaactcctgaaaagacagaacagttttatagaaagcttttaaacaagcatggaattaaaaccgtttctcagattatctccctccaaactctaaagaaggaatataaatcctatgaagccaagctccgccttctgagcagttttgatttcttccttactgatgccagaattaggcggctcttaccctcactcattgggagacatttctatcaaagaaagaaagttccagtatctgtaaaccttctgtccaagaatttatcaagagagatcaatgactgtataggtggaacagtcttaaacatttctaaaagtggttcttgcagtgctatacgtattggtcacgttggaatgcaaattgagcacatcattgaaaacattgttgctgtcaccaaaggactttcagaaaaattgccagagaagtgggagagcgtgaaactcctgtttgtgaaaactgagaaatcggctgcacttcccatcttttcctcgtttgtcagcaattgggatgaagccaccaaaagatctttgcttaataagaagaaaaaagaggcaaggagaaaacgaagagaaagaaattttgaaaaacaaaaggagaggaagaagaagaggcagcaggctaggaagactgcatcagttcttagtaaagatgatgtggcacctgaaagtggtgatactacagtgaagaaacctgaatcaaagaaggaacagaccccagagcatgggaagaaaaaacgtggcagaggaaaagcccaagttaaagcaacaaatgaatccgaagacgaaatcccacagctggtaccaataggaaagaagactccagctaatgaaaaagtagagattcaaaaacatgccacaggaaagaagtctccagcaaagagtcctaatcccagcacacctcgtgggaagaaaagaaaggctttgccagcatctgagaccccaaaagctgcagagtctgagaccccagggaaaagcccagagaagaagccaaaaatcaaagaagaggcagtgaaggaaaaaagtccttcgctggggaaaaaagatgcgagacagactccaaaaaagccagaggccaagtttttcaccactcctagtaaatctgtgagaaaagcttcccacacccccaaaaaatggcccaaaaaacccaaagtaccccagtcgacctaaagtcagtgattcaactggaaggaaacctcaatgctgcctccagagctttttggaaatactcagatcctggccgcctttgtaaccttctctaaacgtcaggcctggacttaaaagattttttaaaacctccataagtagtccaggggcggtggctcacgcctgtaatcccagcactttgggaggccgaggcaggcggatcacaaggtcaacgagatcgagaccatcctggccaacatggtgaaaccctgtctgtaccaaaaatacaaaaattaattgggcatggtggtggacacctgtaatcccagctactagggaggctgaggcaggagaattgcttgaacctgggaggcggaggttgcagtgagccactgcactccagcctgatgacagagcaagactcagtctcaaaaataaataaaaataataaaacctccataagtaatcctgacatatgttcctgggtataatctgtttctaaattgtccttctgtgtatttgctaatgtaatagagggaaaaatagagtgcttctctgtggttgttcagcactttaggtagccaaggtgagaggattgcttgaggccaggagtttgagactagcctgggcaacttggtaaaaccccatctctacaaaagaaaaaaaaaaattagtgtggcatggtggcatgcatctgtgctcccagctcctcacgaggctgaggtggaaggatcaagtgagcgcaagaggttgaggctccagtgagccacgatcaccccactgtgctgtagcctgggtgacagtgtgagattctgtctcagaaaaaacaaagtataacattgctttgcttctgagtatactgttggctttccaaatcagtgggtctgacttgaggtctgtgatgtgacccttttcctcacctgctcaaccattattcacatggactccatcatattcatttgtagtcattcccagagtggcccagtgagggtctcgctgtatgagagtcggctacggaatttaggagaaacagaagtttcttggctttcatgctgagcttgttggtctaagcttatgagtcactggattagcatccatatgggaagggaaattaacatggagtcatttatacagggactaaattgaatcctacctaccggaggcaagaacatgatttatcttccataagccttatcctcttcctccttattcctcagtccatatggatttgcttatgtatgacaactccaaggaatcttggaagagtagattgctaacgtttccacaattgtcaagtatattctgaggcagtaaacacctttttaggtacgtggcctttcactggttgtgaattggtatgcatccgtagtagtaagttcacagattcactgcagtgcaggaatgttcttgcatgccaaagactcaactgctttcaaagataatgtgggtgctagatgcagtggcttacatctgtaaccctgttagggtgaccagacccaacaccaggtcgtgggggtgacaaagtccagtggagtcaaaggattgagaaaaagacagtttgagagagaagtaggaccagcagaccatcgggatggtggaggctgtgaaggccgtgagctctgggagcccacactatttattggtaatccaacaaagaaacagatggtgagaatgtgaaggtcagaagggcaccttgcattaagcacatgatttacagctgtgatggtttagcatttgctctgctacttgagatgatggagagcaggttcttttaactcaagttacagtcgatcctgggagagcaaggagccagcaagtctagacattccagagccacaggccctggattttatccaagccacgagggattttatgccctgggcttagattatggtgcgtcagggcagccttccaccctttagcacagagcttggtgttccaaagaccacaaggggttttagacccttgaccctggacatattccaagactcttttacattatgtcagaatgcaagccctgcctcagcttctcccaacactcagcttttcgcaacataatcccagcactttggaacgctgggtggattgcttgaacccaggagttcgagaccatcctgggcaatatggcaaaaccccatctttaccaaaaataagctgggtgtggtggaacatgcctgtggtcccagcttcttgggaggctgaggtgggaggattgcttgaacccgggaggtagaggctgcaatgggccatgatcacgatcctgcactccagcctgggcaacagagagagacagtccctggcccactgcccccttccctggcccagtctcaaaaaaaatgaggctgggcgtggtggctcacatctgtaatcccagccaaggctggcagatcacttgaggccaggagttctgagaccagcctggcttacatggtgaaaccccatctctactaaaaatacaaaaactagccaggcatggtgggaggcacctgtaatcccagctacttgggaggctgaagcaggagaatcactttaacccgggaggtggaggttgcagtgagctgagatcacaccactgcactccagcctgggcggcagagcaaaactgaaaaaaa

SEQ ID NO: 4648 - DNA, 1809 bp, Homo sapiens
  source 1..1809: mol_type = genomic DNA
atggccgagttcagggtcagggtgtccaccggagaagccttcggggctggcacatgggacaaagtgtctgtcagcatcgtggggacccggggagagagccccccactgcccctggacaatctcggcaaggagttcactgcgggcgctgaggaggacttccaggtgacgctcccggaggacgtaggccgagtgctgctgctgcgcgtgcacaaggcgcccccagtgctgcccctgctggggcccctggccccggatgcctggttctgccgctggttccagctgacaccgccgcggggcggccacctcctcttcccctgctaccagtggctggagggggcggggaccctggtgctgcaggagggtacagccaaggtgtcctgggcagaccaccaccctgtgctccagcaacagcgccaggaggagcttcaggcccggcaggagatgtaccagtggaaggcttacaacccaggttggcctcactgcctggatgaaaagacagtggaagacttggagctcaatatcaaatactccacagccaagaatgccaacttttatctacaggctggctctgcttttgcagagatgaaaatcaaggggttgctggaccgcaaggggctctggaggagtctgaatgagatgaaaaggatcttcaacttccggaggaccccagcagctgagcacgcatttgagcactggcaggaggacgccttcttcgcctcccagttcctgaatggtctcaaccctgtcctgatccgccgctgtcactacctcccaaagaacttccccgtcactgatgccatggtggcctcagtgttgggtcctgggaccagcttgcaggctgagctagagaagggctccctgttcttggtggatcacggcatcctctctggcatccagaccaatgtcattaatgggaagcctcagttctctgcggccccaatgaccctgctataccagagcccaggctgcgggccgctgctgcctctcgccatccagctcagccagacccccggcccaaacagccccatcttcctgcccactgatgacaagtgggactggttgctggccaagacctgggtgcgcaatgccgagttctccttccatgaggccctcacgcacctgctgcactcacatctgctgcctgaggtcttcaccctggctaccctgcgtcagctgccccactgccaccctctcttcaagtccacaggcatcggcattgaaggcttctctgagttgatacagaggaacatgaagcagctgaactattctctcctgtgtctgcctgaggatatccggacccgaggagttgaagacatcccaggctactactaccgtgatgatgggatgcagatctggggtataccctcctcactggagacccgggaagccctggtgcagtatgtcaccatggtgatattcacctgctccgccaagcatgcggctgtcagtgcagggcagtttgactcctgtgcttggatgcccaacctgccacccagcatgcagctgccaccacccacctccaaaggcctggcaacatgcgagggcttcatagccaccctcccacctgtcaatgccacatgtgatgtcatccttgctctctggttgctgagcaaggagcctggagaccaaaggcccctgggcacctatccggatgagcacttcacagaggaggcccctcggcggagcatcgccaccttccagagccgcctggcccagatctcgaggggcatccaggagcggaaccagggcctggtgctgccctacacctacctagaccctcccctcatcgagaacagcgtctccatctaa

SEQ ID NO: 4649 - DNA, 2204 bp, Homo sapiens
  source 1..2204: mol_type = genomic DNA
accagccaacgtccgggaaaaacgagtaagtacaggttccttctgccaatccccgccggccacagctaactttcccgcccggcccctttctgtcataattgaggtgtccacaaccagccaatcaggaacgcgagagtatcccgcgtttgctttcgctcgccgaggcgcgtatcagtcggaattttggggagccaaccgcgccgtctgtccctggcaagccagcggcggtttaaaggaggtggcgggaagcctgtgtgtgcttcaaatcgtcaccctcatggtcgctccggtttttcacgactgaaaacaacatagcaaaataagccaagatgtctgtggatccaatgacctacgaggcccagttctttggcttcacgccacaaacgtgcatgcttcggatctacattgcatttcaagactacctatttgaagtgatgcaggccgttgaacaggttattctgaagaagctggatggcatcccagactgtgacattagcccagtgcagattcgcaaatgcacagagaagtttctttgcttcatgaaaggacattttgataacctttttagcaaaatggagcaactgtttttgcagctgattttacgtattccctcaaacatcttgcttcctgaagataaatgtaaggagacaccttatagtgaggaagattttcagcatctccagaaagaaattgaacagttacaggagaagtacaagactgaattatgtactaagcaggcccttcttgcagaattagaagagcaaaaaattgttcaggccaaactcaaacagacgttgactttctttgatgagcttcataatgttggcagagatcatgggactagtgattttagggagagtttagtatccctggttcagaactccagaaaactacagaacattagagacaatgtggaaaaggaatcgaaacgactgaaaatatcttaattgctcagtagtcaaaaggaggagcctgtcaaaaagtagaatcataaggactgttcaaaccataaggactgttcaaatcataccagtgactgttcaaaccaaccatactttttattagatttgctttgtcaactctttcttgtattctgtgttttcctcttttttggtccactttgctgaggtatgaagtgtactactttgaactaggctgaagcatctgagtcttctaataagtgggaagggatccaacaaagaagccatgaccagttaaagatatttgcagagttacaccttggtcataagtcctttgtgaccttgattattttggcttactctttggatgagaccagacaagaaaaggattaaacgggtggctcctttaatattattattattgtttttgagacaaggtccctttctgtcacccaggttagagtagatttcagtggcacaatcttggctcactgcaacctctgtgtcctgggctcaagtgatcctcctgcctcagcctcccaagtagctaggaccacaggtgcgtgtcaccatgcttggctaatttttttgcagaaacgaggcctcactatattgtccaggctgagtggctcttttattaaccagtcattacactgcggaacagccaacatagagtacttgctctcgtcctgtgaattttctttcatgagggagtcaatatgtagtggaaagaagcatgtagcaaaaaagacaaccttgatctttaataaaaaagaagttggtttatttccaaaataaatcccctgacaaaaaacctggtgatgttaagcaattgactgtcttagagtccagcagaagaccttagacaaaaaaagcagaacccactggagtagaaaaggaagcatgtagcatatactcagtagtgaaatttaattttactgactgttaggtatctatgccaatttgttttcatacttcagttggttttggaatctgccttatacctaatatttatttattcacactcataagcatcaaatatttaatgccctcagtgggaaatttgtgtttaaactcaatggaatctaatatttctttatgtcgttagtccctgtaaaatgttaggtcacccaaggaaaggggagaaatagcaatggttgttcctaaggtattgcttgccctccatgtcttcctaaagagcagaacttggagtttctcctttatgtagagaagaagtaacttagggtgtatttgcaatgaaatattcatagatattgaaagctt

SEQ ID NO: 4650 - DNA, 618 bp, Homo sapiens
  source 1..618: mol_type = genomic DNA
ccgcaggaccccaaaacccaatgatcctgcagcagcccttgcagcgaggcccccagggaggggcccagcgcctcccgcgggccgccttgggggtgacttggggcctggacgccagggagcctctgcgcaagcagtttctgtctgaggagaacatggccacccacttctctcaactcagcctgcacaatgaccacccctactgcagcccccccatgaccttctccccagccctgcccccactcaggagcccttgctctgagctgcttctctggcgctatcctggcagcctcatccctgaggccctccgtctgctgaggctgggggacacccccagtcccccctaccctgcaaccccagctggggacataatggagctctgagtgctggtggacagtgcccctcccaccttccttcttccccacaacagaagagaccagcgactcccgcaaagggacaaggttcctccctctcctgcagagtaggcatctgggcaccaagaccttccctcaacagaggacactgagcccaacggagttctgggatgggaggggtgggagcatgggaagggaggcatcccacccccaagaagaactgaataaagattgctgagcaaaggaa

SEQ ID NO: 4651 - DNA, 1892 bp, Homo sapiens
  source 1..1892: mol_type = genomic DNA
ctcacgggagtcctccgcccgggcgtccggaacagtcgacggcagactccggcccgctgagccacccgaggggtcccgtggcctccgcggacccggaatctgggccctcgcggacccgcgccccgcccagtcgccccagcccgtccactgctctgttcgccagggcttccccacacccacggagtgaagtcagccgcggccctgcctgggaggaacttaccgtctaccgggaaaggtggccagcagatgtgtcgggcctggtgagaggggcctcctgcactggccatgcccatgcccacggagggcaccccgccacctctgagtggcacccccatcccagtcccagcctacttccgccacgcagaacctggattctccctcaagaggcccagggggctcagccggagcctcccacctccgccccctgccaagggcagcattcccatcagccgcctcttccctcctcggaccccaggctggcaccagctgcagccccggcgggtgtcattccggggcgaggcctcagagactctgcagagccctgggtatgacccaagccggccagagtccttcttccagcagagcttccagaggctcagccgcctgggccatggctcctacggagaggtcttcaaggtgcgctccaaggaggacggccggctctatgcggtaaagcgttccatgtcaccattccggggccccaaggaccgggcccgcaagttggccgaggtgggcagccacgagaaggtggggcagcacccatgctgcgtgcggctggagcaggcctgggaggagggcggcatcctgtacctgcagacggagctgtgcgggcccagcctgcagcaacactgtgaggcctggggtgccagcctgcctgaggcccaggtctggggctacctgcgggacacgctgcttgccctggcccatctgcacagccagggcctggtgcaccttgatgtcaagcctgccaacatcttcctggggccccggggccgctgcaagctgggtgacttcggactgctggtggagctgggtacagcaggagctggtgaggtccaggagggagacccccgctacatggcccccgagctgctgcagggctcctatgggacagcagcggatgtgttcagtctgggcctcaccatcctggaagtggcatgcaacatggagctgccccacggtggggagggctggcagcagctgcgccagggctacctgccccctgagttcactgccggtctgtcttccgagctgcgttctgtccttgtcatgatgctggagccagaccccaagctgcgggccacggccgaggccctgctggcactgcctgtgttgaggcagccgcgggcctggggtgtgctgtggtgcatggcagcggaggccctgagccgagggtgggccctgtggcaggccctgcttgccctgctctgctggctctggcatgggctggctcaccctgccagctggctacagcccctgggcccgccagccaccccgcctggctcaccaccctgcagtttgctcctggacagcagcctctccagcaactgggatgacgacagcctagggccttcactctcccctgaggctgtcctggcccggactgtggggagcacctccaccccccggagcaggtgcacacccagggatgccctggacctaagtgacatcaactcagagcctcctcggggctccttcccctcctttgagcctcggaacctcctcagcctgtttgaggacaccctagacccaacctgagccccagactctgcctctgcacttttaaccttttatcctgtgtctctcccgtcgcccttgaaagctggggcccctcgggaactcccatggtcttctctgcctggccgtgtctaataaaaagtatttgaaccttg

SEQ ID NO: 4652 - DNA, 1806 bp, Homo sapiens
  source 1..1806: mol_type = genomic DNA
cacgggccgttccccctcacgggagtcctccgcccgggcgtccggaacagtcgacggcagactccggcccgctgagccacccgaggggtcccgtggcctccgcggacccggaatctgggccctcgcggacccgcgccccgcccagtcgccccagggcttccccacacccacggagtgaagtcagccgcggccctgcctgggaggaacttaccgtctaccgggaaaggtggccagcagatgtgtcgggcctggtgagagggtgaggcgagacggcccgatcgcccagggccccggaagctgcggaggtcacccccgcctggccttagctcagggacaccctggattcacgtgggagcccctgctcctgcctcccccgtcccaccactgaggctgttgggccaggccagtcatgctagaacgctggcaccagctgcagccccggcgggtgtcattccggggcgaggcctcagagactctgcagagccctgggtatgacccaagccggccagagtccttcttccagcagagcttccagaggctcagccgcctgggccatggctcctacggagaggtcttcaaggtgcgctccaaggaggacggccggctctatgcggtaaagcgttccatgtcaccattccggggccccaaggaccgggcccgcaagttggccgaggtgggcagccacgagaaggtggggcagcacccatgctgcgtgcggctggagcaggcctgggaggagggcggcatcctgtacctgcagacggagctgtgcgggcccagcctgcagcaacactgtgaggcctggggtgccagcctgcctgaggcccaggtctggggctacctgcgggacacgctgcttgccctggcccatctgcacagccagggcctggtgcaccttgatgtcaagcctgccaacatcttcctggggccccggggccgctgcaagctgggtgacttcggactgctggtggagctgggtacagcaggagctggtgaggtccaggagggagacccccgctacatggcccccgagctgctgcagggctcctatgggacagcagcggatgtgttcagtctgggcctcaccatcctggaagtggcatgcaacatggagctgccccacggtggggagggctggcagcagctgcgccagggctacctgccccctgagttcactgccggtctgtcttccgagctgcgttctgtccttgtcatgatgctggagccagaccccaagctgcgggccacggccgaggccctgctggcactgcctgtgttgaggcagccgcgggcctggggtgtgctgtggtgcatggcagcggaggccctgagccgagggtgggccctgtggcaggccctgcttgccctgctctgctggctctggcatgggctggctcaccctgccagctggctacagcccctgggcccgccagccaccccgcctggctcaccaccctgcagtttgctcctggacagcagcctctccagcaactgggatgacgacagcctagggccttcactctcccctgaggctgtcctggcccggactgtggggagcacctccaccccccggagcaggtgcacacccagggatgccctggacctaagtgacatcaactcagagcctcctcggggctccttcccctcctttgagcctcggaacctcctcagcctgtttgaggacaccctagacccaacctgagccccagactctgcctctgcacttttaaccttttatcctgtgtctctcccgtcgcccttgaaagctggggcccctcgggaactcccatggtcttctctgcctgg

SEQ ID NO: 4653 - DNA, 1221 bp, Homo sapiens
  source 1..1221: mol_type = genomic DNA
gctcaggccccgccctcagacgagcaccgcccgccggctcctcccgcggctcgaatcgccgtctctctcctccccgccccgccgagttctagaattcgccgcgcagctgcttcagcccctcagccccagccggaccctcgggtcctcatccaccctcgcaggcgcaggccgtggctaccccgaagtcaactgtggaggatccttcctggcttccttcagctccatcctgcccttggatctagcaccaaaaaggagactaactacccagccccgtccagtcatgcaggtgcaggatgatggagtcaacctcatcccctttgccaagtgttccagggtggtcagccgatctccacccccaaggttgccttcccagagcctcagacccatgccccagcgttatggagatgtcttctggaagaaccttaatcaaaggcccacccccacttggctggaggagcagcacattccacccatgctgctcccaccccctgaaatgctttggagaagaaagaagaggaggccatgtttggaaggaatgcagcagcagggccttgggggagtccccgcccgggtgagggctgtcacttaccacctggaggacctaagaaggcgtcagagcatcatcaacgaactgaagaaggcccagtggggcagctctggggctgcatctgagccagtggtgcttggcgaagagggctgtggattccccagcaccaatgaataccctgatctggaagaggagagagcaacctatccacaggaagaggaccgttttctcactcctggcagggcccagctgctttggtctccctggagccccctggatcaggaggaggcttgtgcctccaggcagctgcactctctggcctcgttcagcactgtcacagccagaaggaacccccttcacaatccctgggggatggagttggcagcgtctgaagagtaaggagaaaccaccgatgccgagaggctagtggtgccccagggacccaagactagttccgtcactagagtcaccctcattgctgacatgaaggcgtttccccttccttcgtctctccaactgcctttcccatcctctgaactaggcattaacagcccccgtgggctcccatctcaacccaccgctctcacaggagcaccccaagtcctgttttcctccaggccccgctcctggccttgtattctctctgctctgttattaaaaagcaagcaagtgga

SEQ ID NO: 4654 - DNA, 2579 bp, Homo sapiens; identical to SEQ ID NO: 4457
  source 1..2579: mol_type = genomic DNA

SEQ ID NO: 4655 - DNA, 1406 bp, Homo sapiens
  source 1..1406: mol_type = genomic DNA
gggacggggtcagtgccaagatgtcgacggcggcggttccggagctgaagcagatcagccgggtggaggcgatgcgcctagggccgggctggagccactcgtgccacgccatgctgtacgccgccaaccctgggcagctcttcggccgcatccccatgcgcttctcggtgctgatgcagatgcgtttcgacgggctgctgggcttccccgggggcttcgtggaccggcgcttctggtcgctggaggacggcctgaaccgggtgctgggcctgggcctgggctgcctgcgcctcaccgaggccgactacctgagctcgcacctgaccgagggcccacaccgcgtcgtggcgcacctgtacgcgcggcagctgacgctggagcagctgcacgccgtggagatcagcgcggtgcactcgcgcgaccacggcctggaggtggggccgccgcccgggccccgccccccgccccggggtttggctctggccccgtggaaggcaccgatgggtgctgggcctcgtgcgggtcccgctgtacacccagaaggaccgagtcggaggcttccccaacttcctgagcaacgccttcgtgagcacggctaagtgccagctcctctttgccctcaaggtgctcaacatgatgcccgaggagaagctggttgaggccctggctgcagccaccgagaagcagaagaaggccctggagaagttgctcccggcctcctcttgagggctgcctgagctggtggcaccctcccctgggccggaagactgggaattcctgctaagtgtggcttctagagtgtttgtgtgtaccccgcttctgactgcctagggcgagtgggcatcctgtcatcatctccactgtcccaagcagtcactaggtggcggccgggccagctggaacccagcccatcctctcaggcagagcagggtggtccgggcacactgggcctgcctctccagcctcaggatgctcttgtttattctgggctcagaccctcctcttgtacgtctcatcacagctggtagagacccaggagtgcctgattgtcccacaggggtggcgcacagctctgggaccactcagaagatgggatgtgtgggtggaggatgccttgtctcggtcagctcattcctgcctccttcctgagccagttcagggcctgggggagagccagcttggggtaggaagttaataatactgttaatttgggttgttgttggatttactttgctagattttctctttcaccacgtgtgaactgtgggtgaggtttcaaagtagcttcaccccacgtggcttggttcccagggacagtcagggcctcgggggcccagctatgtacaacgaagctgtcgaaggagaagacaataaagtcgctccgcagctgctctgtgtgtttctca

SEQ ID NO: 4656 - DNA, 2763 bp, Homo sapiens
  source 1..2763: mol_type = genomic DNA
atactccggttgtgggcgggaccagacggtacctagggggatccgggcgcagccaatcctggccctaggattgtgttggggggcttggcaggcggtgtcccgacccccctttctgggcatcctggggatgaccccagcgccgggcccggcgccggccgcctgatgccaggcgagctgagctggggatgctggaacgaagggcgttgctatggcaacgggaggcagggcctggttggggggaccgggcccgggctgggaccgggggggccggcggtggctgtggtggggcgatggcggagcgcggcccggccttctgcggcctgtacgacacgtcctcgctgctgcgatactgcaacgatgacaatttgtcgggcacgagcggtatggaagtggacgaccgcgtgtcggcgctggagcagcggctgcagttacaggaagacgagctggcggtcctaaaggcggcgctggcggatgctctgcgtcgcctgcgggcatgcgaagaacagggagcggcgctacgcgcgcggggcacccccaagggccgggcgcctccgcgcttaggcaccactgcctcggtgtgtcagctcttgaaaggccttcccaccaggacgccccttaatggctcgggacccccgcggcgcgtgggtggctatgccacgtccccatcctctcccaagaaggaggcgacctccgggcgcagcagtgtccgccgctacttgtcaccagagcgcctcgcctcggtgcgccgtgaggacccccgcagccggaccacatcctccagcagcaactgtagcgccaaaaaggaaggcaaaaccaaagaagttatcttcagtgtggaggatggctccgtgaaaatgttcctgaggggccgccctgtgcccatgatgatcccagacgagctggcacccacctacagcctggacacacgctcggagctgccttcttgccggctcaagctggagtgggtctatggctaccgtggccgagactgccgggccaacctttatttgctgcccaccggggagatagtgtactttgtggcctccgtagccgtgctatacagcgtggaggagcagaggcagcgacactacctgggacacaacgatgacatcaaatgcttggccatccacccagatatggtcaccatcgccacgggacaggtggcgggaaccactaaggaagggaagccgctgccgccccacgtgcgcatctgggactcagtttccctctccaccttacacgtgctgggcttgggggtgtttgacagagccgtgtgctgtgtgggcttctccaaatctaatggaggcaacctgctgtgtgcagtggatgaatccaatgatcacatgctctcggtgtgggactgggccaaggagaccaaggtggtggatgtcaagtgctccaatgaggctgtattggtggccaccttccaccccacggaccccactgtgcttatcacctgcgggaaatctcacatctacttctggaccttggaggggggcagcttgagcaagcggcaaggcctctttgagaaacatgagaaaccgaagtatgtgctgtgtgtgacctttttggaaggtggcgacgtggtcacgggggactctggggggaacctctatgtttggggcaaaggtgggaaccgtatcacacaggcggtgctgggcgcccacgacggcggcgtgtttgggctctgcgccctgcgggacgggacgctggtgtctggagggggccgtgatcggcgggtggtcctctggggttctgactacagcaagctgcaggaagtggaggtccctgaggactttggccctgtgcgcaccgtggcagagggccacggagacacactgtacgtggggaccacccgcaattccatcctgcagggctccgtgcacacaggcttctcactgctggtccagggccatgtggaagagctgtggggcctggccacacaccccagtcgggcccagtttgtgacctgcgggcaggataagctggtgcatctatggagctcagattcccaccagcccctgtggagcaggatcatcgaggaccctgcccgctcagccggcttccaccccagtggctctgtcctggctgtgggtacagtgactggcagatggctgctgctggacacggagacccatgacctggtggctatccacacagacggcaatgaacagatctcagtggtcagcttctccccagacggggcgtacctggccgtgggctcccacgacaacttggtgtacgtgtacacggtggaccagggcggccgcaaggtcagccgcctgggcaagtgctcgggccattccagttttatcacccacctggattgggcccaggacagcagctgctttgtcaccaactccggggactatgagattctgtactgggacccggctacctgtaagcagatcaccagtgcggatgctgtgaggaacatggaatgggccacagctacttgtgtcctagggtttggggtgtttgggatctggtctgagggggcggacggcactgatatcaacgctgtggcccgctctcatgatgggaagttgctggcttcagctgatgactttggcaaagttcacctgtttagctacccctgctgtcagcctcgagccctcagccacaagtacggtggacacagcagccatgtgacaaatgtggccttcttgtgggatgacagcatggccctgaccacagggggcaaggacaccagtgtgctacagtggcgggtggtctgatgcggccagggaagagtcaggtgtc

SEQ ID NO: 4657 - DNA, 4217 bp, Homo sapiens
  source 1..4217: mol_type = genomic DNA
ccgacgaaaggtgtcaccacagtgatggcagtggaggacagcacgctgcaagtagtggtacgggtgcggccccccacccctcgggagctggacagtcagcggcggccagtggttcaggtggtggacgagcgggtgctggtgtttaaccctgaggagcccgatggagggttccctggcctgaaatggggtggcacccatgatggccccaagaagaagggcaaagacctgacgtttgtctttgaccgggtctttggcgaggcggccacccaacaggacgtgttccagcacaccacgcacagcgtcctggacagcttcctccagggctacaactgctcagtgtttgcctacggggccaccggggctgggaagacacacaccatgctgggaagggagggggaccccggcatcatgtacctgaccaccgtggaactgtacaggcgcctggaggcccgccagcaggagaagcacttcgaggtgctcatcagctaccaggaggtgtataatgaacagatccatgacctcctggagcccaaggggccccttgccatccgcgaggaccccgacaagggggtggtggtgcaaggactttctttccaccagccagcctcagccgagcagctgctggagatactgaccagggggaaccgtaaccgcacgcagcaccccactgatgccaacgcgacttcctcccgctcccatgccatcttccagatctttgtgaagcagcaggaccgggttccaggactgacccaggctgtccaggtggccaagatgagcctgattgacctggctggctcagagcgggcatccagcacccatgcgaagggggagcggctgcgggagggggccaacatcaaccgctctctgctggcgctcatcaacgtcctcaatgccttggccgatgcaaagggccgcaagacccatgtgccctaccgggacagcaaactgacccgcctgctcaaagactccctcgggggcaactgccgcacagtgatgatcgctgccatcagcccctccagcctgacctacgaggacacgtacaacaccctcaaatatgccgaccgggccaaggagatcaggctctcgctgaagagcaatgtgaccagcctggactgtcacatcagccagtatgctaccatctgccaacagctccaggctgaggtagccgctctgaggaagaagctccaagtgtatgaggggggaggccagcccccaccacaggacctcccaggatctcccaagtcgggaccaccaccagaacaccttcccagctcccccttgccaccccaccctcccagccagccctgcaccccagagctccctgcagggcctagagcccttcaagaggagagtctggggatggaggcccaggtggagagggccatggaagggaactcttcagaccaggagcagtccccagaggatgaggatgaaggcccagctgaggaggttccaacccagatgccagagcagaaccccacacatgcactgccagagtcccctcgcctgaccctgcagcccaagccagtcgtgggccacttctcagcacgggaactggatggggaccgttctaagcagttggccctaaaggtgctgtgcgttgcccagcggcagtactccctgctccaagcagccaacctcctgacgcccgacatgatcacagagtttgagaccctacagcagctggtgcaagaggaaaaaattgagcctggggcagaggccttgaggacttcaggcctggccaggggggcacctctggctcaggagctgtgttcagagtcaatccctgtgccgtctcctctctgcccagagcctccaggatacactggccctgtgacccggactatggcgaggcgactgagtggccccctgcacaccctgggaatcccgcctggacccaactgcaccccagcccaggggtcccgatggcccatggagaagaagaggaggagaccaagcgccttggaggcagacagtcccatggccccaaagcggggcaccaagcgccagcgccagtccttcctgccctgcctaaggagagggtctctgcctgacacccaaccttcacaggggcccagcacccccaaaggagaaagggcctcctccccctgccattcccctcgcgtttgcccagccacagtcatcaaaagccgggtgcccctgggcccttccgccatgcagaactgctccaccccgctggctctgcccactcgagacctcaatgccacctttgatctctctgaggagcctccctcaaagcccagtttccatgaatgcattggctgggacaaaataccccaggagctgagcaggctggaccagcccttcatccccagggcacctgtgcccctgttcaccatgaagggccccaagccaacatcttccctccctgggacctctgcctgcaagaagaagcgcgttgcgagttcctcagtctcccatggccgcagccgcatcgcccgcctccccagcagcactttgaagaggccagctgggccccttgtactcccaggtgactggcactagggacagggatagcctgggccatggaggccgatgaagacaagaaggaggaggggacggggagctgagacccagaagaaaggagggcctagggtattgccaagcatctcagggatgctgctgatgagacaggtgggaggtgggctggaggacggggacagagcgtcactttccttcctcgctgcactccccgccacccatccaactggcctgcagagctgcccttgagtcccctgtgccctagcaaccggaggaatggaaaggacctcatcagggtggggagagcactctcagcagggaacggcgtcaccaaggtgtcctgaccgccagaatgtcctgaccaccaaggtgtcctaacctaccggcccctctgctggatacccctcttggacctgtagccacctgcaccaggagctggacctgccttccttacctgggagcaattagtgccaacacacctttgctgtattaacatccctccccagacatccatcctgctactcaccctctgttaatctcctgttacactcagcttcttggcatgtacatattcatttgtgagtgttaatgtgctgctgttttttgttttttggtggtttttgttttttgttttttttgttttgagatggagtcttactctgtcgcccaggctggagtgcagtggtacgatcttggctcactgcaacctccgcctcctgggttcaagtaattctcctgcctcagctttccaagtagctgggattacaggcacccatcaccacacccagctaattttcgtctttttaatagagagggggtttttccatgttggccaggctggtcttgaactcctgacctcaggtgatccgcctgcctcagcttcccaaagtgctgagattacaggcatgagctaccacgcctggcccgtgttgctgttttaaaggtgctgccatgttcccccatcttttttttttttgagatggagtctcgctctgtcgcccaggctggagtgcagtggtggcgatcttggctcactgcaagctccgcctcccaggttcacaccattctcctgcctcagcctcccaagtagctgggactacaggcgcccaccaccacgcctggctaattttttgtatttttagtagagatggggtttcaccgtgttagccaggctggtctcgatctgacctcatgatccacccgcctcggcctcccaaagtgctgggattacaggcgtgagccactgcgcccggcctcccctctcatttatgatgccctctgtgcaggcagacggctcttgggctcttttccccacctgtctctaacacaggccccacggtgatggccacaggcagtagaggaggaatgaggatgggttggggagcggggagtcgcggcttggctcttcctggtttctgagagggacatcttcatccctactccccttggtccccaaccacagtcctggtgaagatgtggatgataatggtgccttgatttccaaatgaagacagctttattgcttaactctattgtacataggatacacgttcagtgtaaaataaagtgtaaaggggaattcaggcttaatgctgcacctagatataaatgctaatgatacttgggtttatagccttctgatcctttatttctgcatatatatatagatatatacatatatttttggtataacaataaaccgtctccatccttgg

SEQ ID NO: 4658 - DNA, 9202 bp, Homo sapiens
  source 1..9202: mol_type = genomic DNA
gatatggtgtaagatacttcttcaagattggacagctggggaccttcttctgattaaccttaaaccaacttgtagccatagagacacctcacaaggttcccatttttgttgttgttgttgttgattttctgctcacacctttcctgaccttgcaaccatgtatggaagtgcccgctctgttgggaaggtggagccgagcagccagagccctgggcgttcacccaggcttccacgttcccctcgcttgggtcaccgtcgaaccaacagtacgggagggagttcgggaagcagtgttggaggtggcagtgggaaaaccctttcaatggaaaatatacaatctttaaatgctgcctatgccacctctggccctatgtatctaagtgaccatgaaaatgtgggttcagaaacacctaaaagcaccatgacacttggccgttctgggggacgtctgccttacggtgttcggatgactgctatgggtagtagccccaatatagctagcagtggggttgctagtgacaccatagcatttggagagcatcacctccctcctgtgagtatggcatccactgtacctcactcccttcgtcaggcgagagataacacaatcatggatctgcagacacagctgaaggaagtattaagagaaaatgatctcttgcggaaggatgtggaagtaaaggagagcaaattgagttcttcaatgaatagcatcaagaccttctggagcccagagctgaagaaggaacgagccctgagaaaagatgaagcttccaaaatcaccatttggaaggaacagtacagagttgtacaggaggaaaaccagcacatgcagatgacaatccaggctctccaggatgaattgcggatccagagggacctgaatcagctgtttcagcaggatagtagcagcaggactggcgaaccttgtgtagcagagctgacagaggagaactttcagaggcttcatgctgagcatgagcggcaggccaaagagctgtttcttcttcgaaagacattggaggaaatggagctgcgtattgagactcaaaagcagaccctaaatgctcgggatgaatccattaagaagcttctggaaatgttgcagagcaaaggactttctgccaaggctaccgaggaagaccatgagagaacaagacgactggcagaggcagagatgcacgttcatcacctagaaagccttttggagcagaaggaaaaagagaacagtatgttgagagaggagatgcatcgaaggtttgagaatgctcctgattctgccaaaacaaaagctctgcaaactgttattgagatgaaggattcaaaaatttcctctatggagcgtgggcttcgagacctggaagaggaaattcagatgctgaaatcgaatggtgctttgagtactgaggaaagggaagaagaaatgaagcaaatggaagtgtatcggagccattctaaatttatgaaaaataaggtagaacaactgaaggaggaactaagttcgaaagaggctcaatgggaggagctgaaaaagaaagcggctggtcttcaggctgagattggccaggtgaaacaggagctgtccagaaaggacacagaactactcgccctgcagacaaagctagaaacactcacaaaccagttctcagatagtaaacagcacattgaagtgttgaaggagtccttgactgctaaggagcagagggctgccatcctgcagactgaggtggatgctctccgattgcgtttggaagagaaggaaaccatgttgaataaaaagacaaaacaaattcaggatatggctgaagagaaggggacacaagctggagagatacatgacctcaaggacatgttggatgtgaaggagcggaaggttaatgttcttcagaagaagattgaaaatcttcaagagcagcttagagacaaggaaaagcagatgagcagcttgaaagaacgggtcaaatccttgcaggctgacaccaccaacactgacactgccttgacaactttggaggaggcccttgcagagaaagagcggacaattgaacgcttaaaggagcagagggacagagatgagcgagagaagcaagaggaaattgataactacaaaaaagatcttaaagacttgaaggaaaaagtcagcctgttgcaaggcgacctttcagagaaagaggcttcacttttggatctgaaagagcatgcttcttctctggcatcctcaggactgaaaaaggactcacggcttaagacactagagattgctttggagcagaagaaggaggagtgtctgaaaatggaatcacaattgaaaaaggcacatgaggcagcattggaagccagagccagtccagagatgagtgaccgaatacagcacttggagagagagatcaccaggtacaaagatgaatctagcaaggcccaggcagaagttgatcgactcttagaaatcttgaaggaggtggaaaatgagaagaatgacaaagataagaagatagctgagttggaaaggcaagtgaaagaccagaataagaaggtagcaaatctgaagcacaaggaacaggtggaaaaaaagaagagtgcacaaatgttagaggaggcgcgacgacgggaggacaatctcaacgacagctctcagcagctacaggacagtctccgtaagaaggatgacaggattgaagagctggaagaagcactaagagaaagtgtacagataactgcagagcgggaaatggtgctagcacaagaggaatcagccaggaccaatgctgaaaaacaggtggaggagttactgatggccatggagaaggtaaagcaggaactagaatccatgaaagcaaagctgtcctccacccagcagtctctggcagaaaaggaaactcacttgactaatcttcgggcagagagaaggaaacacttagaggaagttctggagatgaagcaagaagctcttctggctgccattagtgaaaaagacgccaatatagctctcttggagctttcgtcctctaagaagaagacccaagaggaagtggctgccctgaagcgggagaaggatcgtctggtacagcagcttaagcagcagacgcaaaatcgaatgaagctaatggccgacaactacgaggatgaccacttcaaatcctcccattccaatcaaacaaatcacaagccctccccagaccagatcatccagcccctcttagaacttgaccaaaatagaagtaaattaaagttgtacattggacacctgacaaccctctgccatgaccgagaccccctgatcctccgtggactcactccaccagcttcctataacttggacgatgaccaggcggcttgggagaatgagctgcagaagatgacccgggggcagcttcaggatgagttagagaaaggtgaacgggacaatgcagaactgcaggagtttgccaacgccattcttcagcagatagcagaccattgtcccgacatcctagagcaagtggtcaacgccctggaagagtcctcttgaccctgctttatggggaagcctgaggtagtcaacccaggagccaagaaaagagaactacgaggaacaggtgcccggaaccttcttggcaccaaacactacaaacttcatcccaacttgctcacttgaagaagtgtgattccagcaccgtttctacatctgccatcttactctgcctttctgctttggatgtggtctctacactaaccttcttgatgtccagggtagataaagggtcgaatctctctgaagaactgccacctggtcatcagcagtggagaactgtgggagctggtggctctgccctgacagagagccatggagcagaggagcctctcacctcctgtcctctgacatgagaatgaaaccaggaatggacttggagttcaacaggctgagaggatgcctccaatggaccagagagctgagtgttctaatatcacaataggtgctttctcctaaaagggcaaaaaacaatctcaaaaagattagaaaaagagaaggggggaagggaagagaaaatcgactcttctttttactgtctcttctgcttactttccacatgagatgctttgtaccggggagctgtgagcaggcctcacgatggcttgggagcactcgttctcccaaggtctgagtcttcatccagccctgcctgtctgtcgcagccttcctcactctgttcctcggccagttaacaagaagatggtgtgaggtgttctccaccagtctctcctgtttgagactgttgacgttatcatactgaggtgttagatcaaatatctctaattgaagaacatgtgaggttgaaagagcaccagccagggcaacatagcgtgaccctgtctctacaaaaaattaaaaagagaacatacaaagttgacatatgagaccctgttgtccccgcctgcagctttgccccagtaacagatgcccgttgctcttgggctggtttcccctgaacacctccaagaggctgcctgccttgccagcacccgtgtcctgagctcctgcagcccagtggctgctgaagttgtgatccctcactcaccctgctagctttgcccttgactcgtcttctctgaacctcagcctcgtgcattgcctggaaccttcttctagcataaatgaaggtttttcctcctacacacattccttcctcggttatttcattcagagaatatttatgaaatgcctactgtgtgcaagtcatccatccttgaaaaggccacttctcagtgagggagagatgtagtggattctgtgagacatacctgctggagttgaagcagtaaatagcatgtccttcccctccccgatcttaaggtgtgttttctagaaaagttccctaatggaattcatgagtttgggggtctcagtcacccgcttgcctgtaggattccatttgatgattctggatttttgctgtttgttattgcccttagaggggctctgagtatctacttgtgggtggccatttcctgacatctgcatgtacctcgtggaattcagccagcttcatgttgcaaatcagaaagctgaccccaagactgcaaatcaatgaaggtattggcattgttaaggacgtagcgtagacaacagcagtcataaataattaggcaggaacttaacccaaatctagttctttgaccacctctaccaccagaacccagcagacactcacatctcctgataagagttgctggactcgatgtttttgttttgcattttctcctctccttccccacttactcagagaatttaaagtctgtagagtcagcacagccccatcagtccaggaacttcccaccaccagcccttgactgtcccattaactgacatggtcagatttccagctccccctactccctgctgtgaaacaatccctctccctgtgagaggaaactgtggagcgtttcttatcgaaggttaaatggactctgctcataaacctcttactgagatgcttcctgatagccaggctggccagagaggggtgcaggggttagatagtaagtggtggtcgtttgtggtcagttacctcaattctgttcattgcagtgcccgtaaaccatgtagaaagctcccagcactgaaaggcaggagtgttagcatctcgctttatccaccataacgtaaagaactgcggtgtgataacagccttcacggggccacggtggaaccaagacagcaggcgaggccatgcctaaacaagtggtctggcacgggcactggccagctgctctctccaagcaggtggcccagatcccacccacgtggactttctcatcaggtgcagcgcctgccactctcagccactgggtgtgtcactctcctcttcatctcagcattctccatcacttcccctccagaaaaacggatggaaggaagccctctgtgacactgcttctgagaagaagcatttccgggaccgatatcatctgtctggtctctgtgaacagcaaggaatcttcttgaccgttcttgggcactggaggctggctaggagttcagtaataaacgtggccttcgtgctgtagggcagagtggatgcagtttgtagctttcagagtgtctcattgagtctagatcattgaaccaacacttaaccaaatgtcccactcccatcacactaggacttgtcattccatgcccctctcctagtggtcatggtttcatatgggcatacaactgctactgaagttatatagccttgaaaactcagtgcaggttgcccttaattttccccaaacccctccatcggcaagtctagttgccctttagcacctaaagatctgcaccccaaaccaatgtcaccataaagagggcacgaagaagagtgggtgtgatcccaacggggttttgtaactgaagaagcccagtgtgagcttctcatcttttcatatacctctaacccccggtactcattgaatcattgatgaggtatctcaattgagatttgcaaggactttgataccatttgaaatggaaaaattttgaacgggctttaacatgtttaagaaatatggatggggccggccacagtggctcacgcctgtaatcccagaactctggaaggctgaggcaggcggatcacctgagatcaggagttcgaggccagcctggccaagatggcaaaaaccccgactctactaaaaatacaaaattagccaggcgtggtggcgtacgcctgtaatcccagctactcaggaggcaggagaatcgcttgagcctgggaggcagaggctgcggtgagccgagatcgtgtcactgcactccagcctgggtgacagagactccatttaaaaaaaaaaaaaaaaaatatatatatatatatatatatatatatatggatgggaatcaccaaattcatctcagctctaaccttttaacctttgtccttgcactttacaatctaaagatctacctgtggctctcagacttcctcacacttgggttttagaaataacttgtaaagcagactggacccaaggccgccttcagtgtcaagaagggcattgtgacttgcccctcaatttctgtccattgaagtctggttttccatgaggaacttgcgggctcacccacccccagagtgagagaagaggaaggcgaagtcatcacagacacggtcttagccacctgctgaactaatccctccgctattgagggtcagggttgtgaggcaaccatcatgtgtcaccccaaaatataaatgtttctgagccgcccatccactggcatttggatttgctgccagagtcctgttcctcccagaaccatcccgccctcctgttgaccatgttacttgagtgtaggcccggtgtcaagaccctcagagtctttgaggaaagagccaagcagagaagaccgctgcgtggagtgtgacaccacatggcatttctcaagcccagcggaccctgtgtcagcaaataccagtaatttaacatctgctcctggcctcctcttcacctgcctgggttcggaactgaggaggaaggatgagaagagactgcaatgcagcaggcaccctctgcagagtgaggccgcccgtccatcactgccagccctgggctgctcaggaggggacgtgaaccactcaaaggaatgtcttaaagaggatctggagtttcccccatgcaaattagggaagaattaggcaagaaaagacatacattacagggaaatccttctgaacaaaatggctgtcttcacctactcttcttgcaagaaaagacatacattacagggaaatccttctgaacaaaatggctatcttcacctactcttcagcaaaaaccgtctccagactttttagtgtcaaaaatgtaaccaactgtctcctgattttttccaatgtgtttggcaagtgctgtggccctgttgtaggtacttctcctgactcttgggggagaagtggttttagggattgatttgggggagcgggtttttgtcccatcccacctcctctcttctttctctgcttgtcgatattgtctgtgtgattcagagaattggggcagttacattgtgtctgttgttgagattattaaaagattaaaacgtagttgtagaaatgaaaaattaaacagctgtgttttaaaaatgcaaaccaatatcttgttaataaaggaattcaagctatggggcagccacactcccctcctcccaggctggcataggtggccctgggctggcggcttaggaagcatggagcacacttagggtagtgcctgcctgggcaagagacacctgccgagcaaaaggaacgagaatctggggctcagagcctcgcagttgtgccaggattttcctatacatgttcaggacctctgggtagaggtttcacagtttgtgaccccataaccaccctcacccgacgtgggttctagctcagtgtgcctaatactgcatggtaacctgggcttgaccctgaagcccctgcctggcaggccacaggacctctcctgcccacttggtgctatctcttccagtgaccacccagcacgggtgagcactggccagcctggagcctgcaatccaggtggaacagactgtcctccatgtcagttccttctggcttcaggccctcaattatttccctttgagcttttttagaccctagatctcctaggcccaggctctctcttgaccccagagaagccactgtcaggaaaggaagtgaaccctactgaagccagagaattcaccccggccaaagcaggccctctgggtccagcccctcattccacaccacgccagtattgcatccatctactgcagctacacatcctgagggcagcaccacccactctggcctgctggcccatcgcaggactagcccaggcacctgccgggcattgcaggatatccagtggggcctgtgactgctccctgatgcgtcagaagagaagtgttgcactttagtggaggagctgaggagcacctgcccccttgtagcttgagttccttttggtaacagtagcagcctccatggtggtgtctgggatgcacgtgcacccgctgccttcagctgtatgtgtgtgttcctgctggagttgtgttactgacaggataatgacattacaaagaaattgtgttatattcaactttgccttgataattattgtaaacactttgttcattttttcttttttattcacaaactaaatccaccaggaaattataaagttattt

SEQ ID NO: 4659 - DNA, 4751 bp, Homo sapiens
  source 1..4751: mol_type = genomic DNA
ggacgggggcccggtgggcccgcggaggaaagatactggggagtgggagccgcggggttcagagcgatgattcccccacaggaggcatccgctcgacggcgggagattgaggacaagctgaagcaggaggaggagactctgtccttcatccgagacagcctggagaagagcgaccagctcactaagaacatggtgtctatcttatcatcctttgagagccgccttatgaagctggagaactccatcatccctgtgcacaagcagacggagaatctgcagcggctgcaggagaatgttgagaagacgctgtcctgcctggaccatgtcatcagctactaccatgtggccagtgacactgagaagatcatcagagagggccccacaggtaggctggaagagtacctgggaagcatggccaagattcagaaggcagtggagtatttccaggacaacagcccagacagcccggaactcaacaaagtgaaactgctctttgagcgcgggaaggaggccctggagtccgaatttcgcagcctgatgacgcggcacagtaaggtcgtctcgcccgtgctcatcttggatctgatcagtggtgacgatgatctggaggcccaggaggacgtgaccctggagcacctgcccgagagcgtgctccaggatgtcattcgcatctcccgctggctggtggaatatggccgcaaccaagatttcatgaacgtctactaccagatacgctccagccagctggaccgctccatcaaaggactgaaggagcatttccataagagcagttcttcctctggggttccctactcccctgctatccccaacaagaggaaagacacacctaccaagaagccagtcaagcggccagggacgatccgtaaggctcagaaccttctgaaacagtattcccagcatggtctagatgggaaaaaggggggctctaacctcattcctctggaagggagagatgacatgctggacgtggagaccgatgcctacatccactgcgtcagtgccttcgtcaagctggcgcagagcgagtaccagctgctggccgacatcatccccgagcaccaccagaagaagaccttcgactccctgatacaggatgccctggatgggctgatgcttgaaggggagaacatcgtgtctgctgcccggaaggccattgtgcgacacgacttctccacggtgctcaccgtcttccccatcctgcgacacctcaagcagaccaagcctgagtttgaccaggtgctccagggcacggctgccagcacaaagaacaagctgcctggcctcatcacatccatggagaccatcggtgccaaagcgctggaggacttcgcagacaacatcaagaatgacccggacaaggagtacaacatgccgaaggacggcaccgtacacgagctcaccagcaatgccatcctcttcctgcagcagcttttggacttccaggagacggcaggcgccatgctggcctcccaagagaccagctcttcggccaccagctacagctctgagttcagcaagcggctgctaagcacctatatctgtaaagtgctgggcaacctgcagttgaacttgctgagcaagtccaaggtgtacgaggacccagctctgagcgccatcttcctgcacaacaactacaattacatcctcaagtccctggagaagtctgaactgatccagctggtggcagtgacacagaagactgctgagcgctcctaccgggagcacattgagcagcagatccagacctaccagcgcagctggttaaaggtgactgattacatcgcagagaagaatctacctgtgttccagccgggagtcaagctccgggacaaggagcggcagattatcaaggagcgttttaagggcttcaatgatggcctcgaagaactgtgcaaaatccagaaggcctgggctattccagacacagagcagagggacaggattcgccaggcccagaagaccattgtcaaggagacctacggggcctttctacagaagtttggcagcgtgcccttcaccaagaacccggagaagtacatcaagtacggggtggagcaggtgggcgacatgatcgatcgccttttcgacacctctgcctgagcctgctgctagccctgcctggttccaccagactggcgtgtcattggacagataaaccagtgttagcttgcctctgggctgggtgagcttgaagtcctctgggacagagacctgtctccacgcctccgggagctgtgtccctgagccccctagtcctggctcctgctttttccccacagcccgtgttcccagccgaaccagcactctcccggaagcctggggtccctccacaccttggcttttatgaccctgatggcttctgaaacaggaaaagagagaaggaagacagaggcctgtgcccactgctgctccatgtgtaccaagagcagcagggcagaagggccctccctccagcctaggtcagaggtggggacagagaactcccctacagcccagagatgtggcagggctcagagaagcagccagagctcctggaggaaaggcagtcgggactgaccccctctcttaaaacacattcccgcccgcccacaggcctgaggtctgggacctttccctcccaggagtcccctaggtggctgggggaggcaggctcactggccattttccctagagtccagcacactgcaggaggcgttcggaggaggagttccgccccaccctctacagccttcctcaggcccctgtctctggcccccagcctcagtgcctcttggcccagggccaggcagtcgtggttgcagaaggagcaattaggctgcctgcctgtgggctgggagacagggacaatggggaaaagttaaggagcaaaatgggggttggaagcaaaaaatagggccccacctatttaggacgagattgaagactgacccttgaggcacacttgcactggagatgggtttatttcacgctctgtgcttgtgtgctagcggagggagagctcagggtggcttaatccagaggccctgtcatggcccgcccccagccatgggaaagcaaacttcatcctaaggtgtgcagcccaggccctgcccctttacagtctaggccgcctgccatggggtgcagcctctccaggggctgcgtcagacttgcacgctgcccacatccagattcctgcaaagacgaattgggtgcacagcaccccaaccacatacacgaggaagaagatgcggtcagcagtctcaggccagcttctctgtgacccctttactcctctggagggctctgtggggagagatacagggaaaggagctgttcttcaaggtcccctcaacatgagcggaagagcgaaccccaggggtcatcagcctgtatcgcttcctttcttagattctcagctgatgaaaatttgggtctggcccatttcaggccatcttcagttgaagaaacaccctcttaggctgtgcaaggcatgggttatcaggggattgaggtcacctgggacttcagggaggctcagcttgctccctgccccagacctgtttcttctaagggaggaggacatggtggagaccagggacaggagagccagcagggtggatgcaaggggcctctacccacacctggacctccgtgccctcaccccagccctaggtgtgcacctaggcctcattccttaccccccagcccctgcccaccttcagcaggatgaggccctgggttgccgtgctctcgctgttcccctctcggggctgggctggggccgctcttggccccaaggttgccccgggccagcagcccagccagcagcacagtctctatggtgctgaggaagagcagcagcagcaggatggtgaagtagtaaactgggggaggcagggcacagggagatgctcaggggccagtccctgtgtctctggtgcccagcgagctgagcaccagtgggtgaccggggagaaacagggcagactgggtaagggagcagggcttactgagcagtgggttgcaggaggaggagctgggcagggcctgcaccagggaggagtggaggacgaggtaactcagcagcaatgtcaccttgtagcctatgcgctcaatggcccggaggggcagcaaccccccgcacacgtcagccaacagcagtgcctctgcaggcaccaagagagcgatgatggacttgagcgccgtgttcttcagcctcagctggaaggggaaaagtcagggccttcccggcgggggggaaggaggtgggcatcgggggcatggggcctggcctctggccgtgcatcctcactcccacccgcctccagcagccctctgtcggcctcctcccgacttgactcaccgtcacctggaagcagggcaccagctgctggggtgggacttgggtcttcagatcataaactacgtattccctcttgacactcacaatctcgttcaccacgtgggcctggaactctaactccatcgctgaggggtgggaatgagaactatgaaccaggaaggagagatcccagctgccaagtctgggggtagcagactggagcccaggggtgatggagacttttgatggcttttggcagggacagacttggacacaaaaccgatccatagaagggcttcccaaaccttgttttgcaacatcccaaattgtctccagttgaaggaaggcctttatcagattcatagatgagctttcattgtaaaaataaatgtactttgcaccactt

SEQ ID NO: 4660 - DNA, 697 bp, Homo sapiens
  source 1..697: mol_type = genomic DNA
ccgtgcgcccaagctcgaccgcctgaaatcggggaatcgggcctctgccggcgccctggcagcggcgcggggcgtggctccgggctggattggtggcgcctgggccccgcgagcgcctgcgcagtggtcaaggccgcgctcgcgccgaggggctgcgagagtgaccgcggctgctccagcgctgacgccgagccatggcggacgaggagcttgaggcgctgaggagacagaggctggccgagctgcaggccaaacacggggatcctggtgatgcggcccaacaggaagcaaagcacagggaagcagaaatgagaaacagtatcttagcccaagttctggatcagtcggcccgggccaggttaagtaacttagcacttgtaaagcctgaaaaaactaaagcagtagagaattaccttatacagatggcaagatatggacaactaagtgagaaggtatcagaacaaggtttaatagaaatccttaaaaaagtaagccaacaaacagaaaagacaacaacagtgaaattcaacagaagaaaagtaatggactctgatgaagatgacgattattgaactacaagtgctcacagactagaacttaacggaacaagtctaggacagaagttaagatctgattatttactttgtttattgtctatatgccttttaaaaaaataaacttgttatgcaaaataaaa

SEQ ID NO: 4661 - DNA, 3406 bp, Homo sapiens
  source 1..3406: mol_type = genomic DNA
gaaggcagcggcaggtcgggagcaagatggcgctgcggccaggagctggttctggtggcggcggggccgcgggagctggcgcggggtccgccgggggaggcggcttcatgtttcctgttgcaggtgggataagaccccctcaagcaggcctgatgccgatgcagcaacaaggatttcctatggtctctgtcatgcagcctaatatgcaaggcattatgggaatgaattacagctctcagatgtcccaaggacctattgctatgcaggcaggaataccaatgggaccaatgccagcagcgggaatgccttacctaggacaagcacccttcctgggcatgcgtcctccaggcccacagtacactccagacatgcagaagcagtttgccgaagagcagcagaaacgatttgaacagcagcaaaaactcttagaagaagaaagaaaaagacgccagtttgaagagcagaagcaaaagctcagacttttgagcagtgtgaaacccaagacaggagagaagagtagagatgatgctttggaagccataaaaggaaatttagatgggttttccagagatgcaaaaatgcaccctactccagcatcgcaccccaagaaaccaggtgtgggagtatttccctcacaggatcctgctcagcccagaatgcctccttggatttacaatgagagtttggttccagatgcctataagaaaatcttagaaaccacaatgactccaactggaatagatactgccaaactgtatcccattctgatgtcatctgggcttcccagggaaactcttggacagatatgggccttagctaatcgaactacacctggcaaacttacaaaagaagaactttataccgttctagccatgatagcggtaacacaggtagtaaagccagaagaagatgacttccaggattttcaagatgcttctaagtcaggatcccttgatgactcattcagtgatttccaagagttgcctgcttcttcaaaaacaagtaactcccagcatggaaacagtgccccttctttgttgatgccacttcctggaactaaagcattgccttcaatggacaaatatgctgtgtttaaaggaattgcagctgacaagtcctctgaaaatactgttccacctggagatcctggtgataaatatagtgctttcagagaacttgaacagacagcagagaataaacctttaggagaaagctttgcagaattcagatctgcaggaactgatgatggtttcaccgattttaaaacagccgatagtgtatcaccactagagccaccaacaaaagacaaaacttttccaccatccttcccctcaggaactatacaacagaaacaacaaacacaagtgaaaaaccctctgaacttagcagacctagatatgttttcctcagttaattgcagcagcgagaaaccattgtctttttcagctgtgtttagcacatcaaaatcagtttctacaccacagtcaacaggttctgctgctactatgacagcattggcagcaacaaaaacttctagtttggctgatgattttggagaattcagcctttttggggaatattctggtctagcacctgttggggagcaggatgactttgcagattttatggctttcagtaatagctctatttcatctgagcaaaagccggatgacaaatatgatgcccttaaagaggaagccagtcctgttcctctaaccagcaacgtgggcagcacagtgaagggtggacaaaactcgactgctgcgtctaccaagtacgatgtcttcagacaactttctctggaagggtctggactaggtgttgaagacctgaaagataacactccttcaggaaaaagtgatgatgattttgctgacttccactccagtaaattttcttccataaactcggacaaatccctgggagagaaagcagtggctttcagacacaccaaagaagactctgcatcagtgaagtccttagatctcccttccattggtggcagcagtgttggcaaggaggactctgaagatgcactctctgttcagtttgacatgaaattggctgatgtgggaggagatcttaagcatgtcatgtctgatagctctttggatttaccaacagttagtggccagcatcctcctgctgcagcaggaagtggatccccctcagccacctcaattcttcaaaagaaagagacttcatttggcagttctgaaaacatcaccatgacatctctctccaaagtaacgacctttgtaagtgaagatgctcttccagagaccaccttcccagctcttgccagttttaaagacacgattcctcagaccagtgagcaaaaggaatatgaaaacagagactataaagatttcacaaaacaggacctgcctacggctgaacggagccaggaggccacgtgtcccagcccagcgtccagtggtgcctctcaagaaaccccgaacgaatgttcggatgactttggagagtttcaaagtgaaaagcccaaaatcagcaaatttgacttcttagtagccacttcacaaagcaaaatgaaatccagtgaagaaatgatcaaaagtgagctggcaacctttgacctttctgttcaaggatcacacaagaggagtttgagccttggtgataaagaaataagccgttcttctccttctccagctttggagcagcctttcagagaccgttccaatactctgaatgagaagcccgccctgcccgtcatccgagacaagtacaaagacctgacgggagaggtggaggaaaatgagagatatgcatatgaatggcagagatgcctggggagtgccctgaatgtcattaagaaggcaaatgataccttaaatggaatcagtagtagttctgtttgcacagaagtaattcagtcagctcaaggcatggaatatttattaggtgttgttgaagtgtacagggtaaccaagcgtgtggagctggggataaaagccactgcagtgtgcagtgagaaactccagcagttgctgaaggacatcgataaagtatggaataacctaatcggcttcatgtcactcgccacactcacaccagatgaaaactcgctggatttttcctcctgtatgttacggcctgggattaaaaatgctcaggagcttgcctgtggagtgtgcctcttgaatgtggactcgaggagccggaaagaagagaagcctgcagaagaacatcctaaaaaagcattcaactcagaaacagacagtttcaagctggcctatggagggcaccagtatcacgccagctgtgccaacttctggatcaactgtgtcgaaccaaagcctcctggcctcgtcctgcctgacctgctctgaacaactcctctgtgaagcattgacttttttttttctgtgacaccccacggggt

SEQ ID NO: 4662 - DNA, 2315 bp, Homo sapiens
  source 1..2315: mol_type = genomic DNA
caaatttgcgcgggttggagcctggcgtagtcatggccgccttccgcgacatagaggaggtgagccaggggctgctcagcctgctgggcgccaaccgcgcggaggcgcagcagcgacggctgctggggcgccacgagcaggtggtggagcggctgctggaaacgcaagacggtgccgagaagcagctgcgagagatcctcaccatggagaaggaagtggcccagagccttctcaatgcgaaggagcaggtgcaccagggaggcgtggagctgcagcagctggaagctgggcttcaggaggctggggaggaggacacccgtctgaaggccagcctccttcagctcaccagagagctggaagagctcaaggagattgaggcggatctggagcgacaggagaaggaggtcgacgaggacacgacagtcacaatcccctcggccgtgtacgtggctcaactttaccaccaagttagtaaaattgagtgggattatgagtgtgagccagggatggtcaaaggcatccatcatggccccagtgtggcccagcccatccacctggacagcacccagctctccaggaaattcatcagcgactacctctggagtctggtggacaccgagtggtagccaggagcctcgtggctgcgtcttgcacccagcgggcatctgccgtggtcagatccatttcaaatgaaatgtggggacatagatctttttttttttttttttgagacagagtttcactcttgttgtccagtctggagtgcaatggcacaatctcagctcacagcaacctctgcctcctgggttcaagcgattctcctgcctcagcctccaaagtagctgggattacaggcatgcgccaccacacccagctaattttttgtatttggtagagatggagtttcaccatggtggtcaggctggtcttgaactcctgacctcaggtgatccacccgcccgccttggcctcccaaagtgctaggattccaggcgtgagccatcgtgcccagctagacgtcttccttttttttttttttttgagacggagtctcactctgtcgcccaggctggagtgcagtggtgcgatctcagctcactgcaagctccgcctcctcccgggttcacgccattctcctgcctcagcctcctgagtagctgggactacaggcacctgccaccatgcgcagctaattttttgtatttttagtagagacggggtttcaccatgttagacaggatggtctccatctcctgagtttgtgatctgcccgccttggcctcccaaagtgctgggattacaggtgtgagtcaccgcgcctggccttttttttttttttttttactggatttctttttctcctgattttcggcctcagctcctagagtggcctcagctaggtaaccaacgggagtcgacttatctatgccaggcctgcagtttcacatctgtgacgggatgggacaaatgacaccgtggtattcgatgacagctcccaggtacttcaaggttggcccttactcattcagggggtatgtttgagtgccacggtgtgcccagactctgctaggcaccagagagacaagatacgagtgacatggttctcctcccactgctgacggaggaattaacacaaaagcagacaacactctagaactggagagaggtccagattgcgacaggagccacaccagagtgtgcaggcttcatggaggacagaagcgacttttgtgccgggacttaaaaagataaggaggccaggtgtggtggctcatgcctgcaatcccagcactgtagaaggcagaggccggcagatcacttgagcccaggagttggagaccagactggggaacatggcaagaccccatctctacaaaaaaattaaaaaatttggcctggtgtggtggctcatgcctgtgatcctagcactttgggagttaaaatacaacacttcccagctgcccttatagttaaggtctggccagtgaaatgtatgtggaaatgttacatgacacttctagaaggattcttaaaagacaaatacaccctttcttcccccttcctatttcctggaatgtgggtgtgatggctggagccctggcagccatactgccacgtgtacagacgagtgccgtcctttagggatgacaggagcctggttccctgatgatggcagagccagatatcagcacaaacttatttaaatgggagagagaaggggagaaccaatctcaacttctaccttgtgtaagctgctggttttgggggttttctatgacagataccaaaataaaccctaactgaacatgtactcc

SEQ ID NO: 4663 - DNA, 1005 bp, Homo sapiens
  source 1..1005: mol_type = genomic DNA
tttccggtgtcggggcacagttgaagaagcgaccgagggactgggagtcgttagtgaggatgacgcggcatggcaagaactgcaccgcaggggccgtctacacctaccacgagaagaagaaggacacagcggcctcgggctatgggacccagaacattcgactgagccgggatgccgtgaaggacttcgactgctgttgtctctccctgcagccttgccacgatcctgttgtcaccccagatggctacctgtatgagcgtgaggccatcctggagtacattctgcaccagaagaaggagattgcccggcagatgaaggcctacgagaagcagcggggcacccggcgcgaggagcagaaggagcttcagcgggcggcctcgcaggaccatgtgcggggcttcctggagaaggagtcggctatcgtgagccggcccctcaaccctttcacagccaaggccctctcgggcaccagcccagatgatgtccaacctgggcccagtgtgggtcctccaagtaaggacaaggacaaagtgctgcccagcttctggatcccgtcgctgacgcccgaagccaaggccaccaagctggagaagccgtcccgcacggtgacctgccccatgtcagggaagcccctgcgcatgtcggacctgacgcccgtgcacttcacaccgctagacagctccgtggaccgcgtggggctcatcacccgcagcgagcgctacgtgtgtgccgtgacccgcgacagcctgagcaacgccaccccctgcgctgtgctgcggccctctggggctgtggtcaccctcgaatgcgtggagaagctgattcggaaggacatggtggaccctgtgactggagacaaactcacagaccgcgacatcatcgtgctgcagcggggcggtaccggcttcgcgggctccggagtgaagctgcaagcggagaaatcacggccggtgatgcaggcctgagtgtgtgcgggagaccaaataaaccggcttgggtgcgcaa

SEQ ID NO: 4664 - DNA, 1470 bp, Homo sapiens
  source 1..1470: mol_type = genomic DNA
tttccaagttctttctagcctcaaccagtttctgtctctgcttgttctgcagcccgctgaactacatttcccaggaggcgtcggggctgcgccgtacaacttccggctgtaaagatggcggcttcctagtgagtcggcggctgatttagaaggaggttcaggctacggtgagccgaagccacacaggagccatggaagtggcagagcccagcagccccactgaagaggaggaggaggaagaggagcactcggcagagcctcggccccgcactcgctccaatcctgaaggggctgaggaccgggcagtaggggcacaggccagcgtgggcagccgcagcgagggtgagggtgaggccgccagtgctgatgatgggagcctcaacacttcaggagccggccctaagtcctggcaggtgcccccgccagcccctgaggtccaaattcggacaccaagggtcaactgtccagagaaagtgattatctgcctggacctgtcagaggaaatgtcactgccaaagctggagtcgttcaacggctccaaaaccaacgccctcaatgtctcccagaagatgattgagatgttcgtgcggacaaaacacaagatcgacaaaagccacgagtttgcactggtggtggtgaacgatgacacggcctggctgtctggcctgacctccgacccccgcgagctctgtagctgcctctatgatctggagacggcctcctgttccaccttcaatctggaaggacttttcagcctcatccagcagaaaactgagcttccggtcacagagaacgtgcagacgattcccccgccatatgtggtccgcaccatccttgtctacagccgtccaccttgccagccccagttctccttgacggagcccatgaagaaaatgttccagtgcccatatttcttctttgacgttgtttacatccacaatggcactgaggagaaggaggaggagatgagttggaaggatatgtttgccttcatgggcagcctggataccaagggtaccagctacaagtatgaggtggcactggctgggccagccctggagttgcacaactgcatggcgaaactgttggcccaccccctgcagcggccttgccagagccatgcttcctacagcctgctggaggaggaggatgaagccattgaggttgaggccactgtctgaaccatccctgtacatctgcaccttcttgtgcaaggaagtccttggcctaaagccttggttctcaaactgggttccttgggacctccggggtgggggggttccaggaggcacgtagggtaccttgcagggtcctaggagggaaacccaggattccaggagggatcccaggaactgtgggcacccattttctgtgtctcccagcccatttccactcctagtttgtcatggataatttttgttcttccctgtgtgatttttgccatcaaaataaaaatttgagactcgttaa

SEQ ID NO: 4665 - DNA, 3184 bp, Homo sapiens
  source 1..3184: mol_type = genomic DNA
tgttgatatcaatatggcggttgtcagccagacaaagacagtcagtctgatgtgattgagacaagggaggtttttcagggggagactgggagataggggcctcccctcccccttctcctcttcctgcgccggcctcaacccctccccagtcccctcccgacgggcgccccacgcggaagacacccctccccctcccgccttccctcctccctatctcagcccttcgtactgggacgttggggagggggctgtgccgggcggagagaactcagcgaggattctgagaatggtagataacgcagatcatctctggaaaggatattgatccgcctcatgtaaagtatgcttagttcctttccagtggttttgctggaaaccatgtctcattatacagatgaacccagatttaccatagagcagatagatctgcttcagcgacttcggcgtactggaatgactaaacatgaaattctccatgccttggaaactttggaccgtcttgatcaagagcatagtgacaagtttggaagaaggtccagctatggaggaagttcatatgggaatagtactaacaatgtcccagcatcttcctctacagctacagcttccacacagacgcagcattcgggaatgtccccgtcacctagcaacagttatgatacttccccacagccttgcactaccaatcaaaatgggagggagaataatgagcgattatctacatccaatggaaagatgtcaccaactcgctaccatgcaaacagcatgggtcagaggtcatacagttttgaagcctcagaagaggacctagatgtagatgataaagtggaagaattaatgaggagggacagcagtgtgataaaagaggaaatcaaagcctttcttgccaatcggaggatttcccaagcagttgttgcacaggtaacaggtatcagtcagagccggatctctcattggctgttgcagcagggatcagacctgagtgaacagaagaaaagagcattttaccgatggtatcaacttgagaagacaaaccctggcgctacactaagtatgagaccagcccccattccaatagaggaccctgaatggagacaaacgcctcccccagtctctgccacatctggtactttccgactgcgacgagggagtcgatttacctggagaaaggagtgcctggctgttatggaaagttacttcaatgagaatcaatacccagatgaagcaaagagggaagaaattgcaaacgcttgcaatgcagttatacagaagccaggcaaaaagctgtcagatctggaaagagttacctccctgaaagtatataattggtttgctaacagaaggaaggagatcaagaggagagccaatattgaagcagcaatcctggagagtcatgggatagatgtgcagagtccaggaggccactcaaacagtgatgatgtcgacgggaatgactactctgagcaggatgacagtacgagccatagtgaccaccaagaccccatctcattagctgtggaaatggcagcagtcaaccacactatcttggcattggcccgacaaggagccaacgaaatcaagacagaggccctggatgatgactgatcagggaggttaaacatgacaagttaacttagtttagacgtagcaccttagcagactttcctcggtccttaacatgtgttcttacagtataacttgcagtttcttgtatgtcaggtagctgttagggtcttgttctgtgaagatggcatggtgccctcagcctttgcatatactctctcagtattaactcccagtaaataataaccaaccaaccaaccaaacttccctctcccagcccccgaggctagaaaatcttgctgctccgtcttagcattccaagaaagtgcttccaggtatttagatagccctcagttctcaaatattagactacgtgtaaaatcttgggtacctttagattcttgtaacactagtctgtactcccttttccttccccaagactgataggatgcaagctgaggtcgtggcacaggaatgacagacaccatttggggagtatccacagagtcaaaggaacactagaatccccacctcagcgtgaggataattgatttccagctgcaataagccgtgcctcattatagccacactgtggctagattatacttctttgggtgctgtgctaagaatgtcaatggaaaaagccgatctcagattttgtttgaagttaacatgcctgacacagacatcctttcctctcacaagctgtgtgacttagtagataaaatactgccttctgcctttgggaccatgattaaaaacaaagacaaaaaccaaaagtcattaaaaaaaaaaaaaaaaaaaacccagcttgagagcattggaaaaaaaaaatatgagctgaatgtctaatggatgctaagtccagttttcagaaccactgtacattccacggcacagttagcagtgcctgcctggaaaagttttggaggtcatcgtggaagttgctttgcctcctgtcagtgtcccctttccctgctaccaaaaaagtctttcaaggatggagctaaggtcaaaaatgagtgaaaaaacttgcagtgtttgtatccattaaacggaagccccctcactctgagaggtcactagaggacttcatagtggggttgtgctgcttatcacagatgcagacacttgcccagataggagcagagaaaagcaggggacgtttcctactcacattgtggctgtatgagaacacgatgggactgctttgctgttctctttactctgtccttggagaggtgtgaaaagctgtattgctacaggcaatttatttaataattggaagccatattgataatggatgtggtaatatttgtaaagtttaatctactttaagcggcagtaactaatggaatttttttccttgatcacatatgtagcacttttgttactttttaaagatatttatatttgataaatctttttttcattttgagaactcaaaataccaaacagtgaacttgcattctaaagtcaccctgtgatcaccttgtcatctagtagcaaaatgatgaactattcatgcatcaaagaaaattacatctgctggccttgtatgaaaatgatctcttggcatcccgattaaatgacacactgtcactgtgggtaagaggaaaga

SEQ ID NO: 4666 - DNA, 4082 bp, Homo sapiens
  source 1..4082: mol_type = genomic DNA
aatatggcggttgtcagccagacaaagacagtcagtctgatgtgattgagacaagggaggtttttcagggggagactgggagataggggcctcccctcccccttctcctcttcctgcgccggcctcaacccctccccagtcccctcccgacgggcgccccacgcggaagacacccctccccctcccgccttccctcctccctatctcagcccttcgtactgggacgttggggagggggctgtgccgggcggagagaactcagcgaggattctgaggtgagtcgagcggttttgaagccggactacctcaagtctctttcctcacttctttctcttcacttaaaacaatttttttggaggggttttggggaggaagtgagcggacgctggggatgggtctcgtaagcggccggattgagaggagggaggaagcagggggcttccgagtgggtgacccagacgcgggctgtggggtggggcagttcgtggggtccggtcctggaaaggcgtcgactgccccccaactcttctggtttcctctacgatgagcggaaggtttgaatcctggaggtggggtctccggtgtggagttctggaaactgtgaggtgatttgcagctggtggaatggaacagtgaagaagcattggaatggtagataacgcagatcatctctggaaaggatattgatccgcctcatgtaaagtatgcttagttcctttccagtggttttgctggaaaccatgtctcattatacagatgaacccagatttaccatagagcagatagatctgcttcagcgacttcggcgtactggaatgactaaacatgaaattctccatgccttggaaactttggaccgtcttgatcaagagcatagtgacaagtttggaagaaggtccagctatggaggaagttcatatgggaatagtactaacaatgtcccagcatcttcctctacagctacagcttccacacagacgcagcattcgggaatgtccccgtcacctagcaacagttatgatacttccccacagccttgcactaccaatcaaaatgggagggagaataatgagcgattatctacatccaatggaaagatgtcaccaactcgctaccatgcaaacagcatgggtcagaggtcatacagttttgaagcctcagaagaggacctagatgtagatgataaagtggaagaattaatgaggagggacagcagtgtgataaaagaggaaatcaaagcctttcttgccaatcggaggatttcccaagcagttgttgcacaggtaacaggtatcagtcagagccggatctctcattggctgttgcagcagggatcagacctgagtgaacagaagaaaagagcattttaccgatggtatcaacttgagaagacaaaccctggcgctacactaagtatgagaccagcccccattccaatagaggaccctgaatggagacaaacgcctcccccagtctctgccacatctggtactttccgactgcgacgagggagtcgatttacctggagaaaggagtgcctggctgttatggaaagttacttcaatgagaatcaatacccagatgaagcaaagagggaagaaattgcaaacgcttgcaatgcagttatacagaagccaggcaaaaagctgtcagatctggaaagagttacctccctgaaagtatataattggtttgctaacagaaggaaggagatcaagaggagagccaatattgaagcagcaatcctggagagtcatgggatagatgtgcagagtccaggaggccactcaaacagtgatgatgtcgacgggaatgactactctgagcaggatgacagtacgagccatagtgaccaccaagaccccatctcattagctgtggaaatggcagcagtcaaccacactatcttggcattggcccgacaaggagccaacgaaatcaagacagaggccctggatgatgactgatcagggaggttaaacatgacaagttaacttagtttagacgtagcaccttagcagactttcctcggtccttaacatgtgttcttacagtataacttgcagtttcttgtatgtcaggtagctgttagggtcttgttctgtgaagatggcatggtgccctcagcctttgcatatactctctcagtattaactcccagtaaataataaccaaccaaccaaccaaacttccctctcccagcccccgaggctagaaaatcttgctgctccgtcttagcattccaagaaagtgcttccaggtatttagatagccctcagttctcaaatattagactacgtgtaaaatcttgggtacctttagattcttgtaacactagtctgtactcccttttccttccccaagactgataggatgcaagctgaggtcgtggcacaggaatgacagacaccatttggggagtatccacagagtcaaaggaacactagaatccccacctcagcgtgaggataattgatttccagctgcaataagccgtgcctcattatagccacactgtggctagattatacttctttgggtgctgtgctaagaatgtcaatggaaaaagccgatctcagattttgtttgaagttaacatgcctgacacagacatcctttcctctcacaagctgtgtgacttagtagataaaatactgccttctgcctttgggaccatgattaaaaacaaagacaaaaaccaaaagtcattaaaaaaaaaaaaaaaaaaaacccagcttgagagcattggaaaaaaaaaatatgagctgaatgtctaatggatgctaagtccagttttcagaaccactgtacattccacggcacagttagcagtgcctgcctggaaaagttttggaggtcatcgtggaagttgctttgcctcctgtcagtgtcccctttccctgctaccaaaaaagtctttcaaggatggagctaaggtcaaaaatgagtgaaaaaacttgcagtgtttgtatccattaaacggaagccccctcactctgagaggtcactagaggacttcatagtggggttgtgctgcttatcacagatgcagacacttgcccagataggagcagagaaaagcaggggacgtttcctactcacattgtggctgtatgagaacacgatgggactgctttgctgttctctttactctgtccttggagaggtgtgaaaagctgtattgctacaggcaatttatttaataattggaagccatattgataatggatgtggtaatatttgtaaagtttaatctactttaagcggcagtaactaatggaatttttttccttgatcacatatgtagcacttttgttactttttaaagatatttatatttgataaatctttttttcattttgagaactcaaaataccaaacagtgaacttgcattctaaagtcaccctgtgatcaccttgtcatctagtagcaaaatgatgaactattcatgcatcaaagaaaattacatctgctggccttgtatgaaaatgatctcttggcatcccgattaaatgacacactgtcactgtgggtaagaggaaagagccttcaatgtagcagcacagggtgcgcctgaaagaggcacaactgctgtggattttctgcctcgctccatctctcctatgtataatgaagccttgtttaaaggggcatgtggggctggatgttaagcacggcttctttttgtccgttacctgaaaacaatttctaagataaaaggaaggtgccatttccttacctcttcacccatcctcctccaccaaatgtattcaacttaaaactgtgagagagagagactgaatgaccttcctcagttttccctttctcattcaggagatactgaatatccgccagtttgtagttggtttccttccacttaaggcacacgctgactgcatcatttccttatctgttaatcctgcttatgtgagtgtgaggaaagtctttgagagggcatgaaagtgccaccttatatatgtctgtgactttaaagagctatatgcagggcctggtcccacttttgtccatggatttcagggggaaaaaatatatgtacttttttcagcttccaagcattgaa

SEQ ID NO: 4667 - DNA, 1257 bp, Homo sapiens
  source 1..1257: mol_type = genomic DNA
tgttgatatcaatatggcggttgtcagccagacaaagacagtcagtctgatgtgattgagacaagggaggtttttcagggggagactgggagataggggcctcccctcccccttctcctcttcctgcgccggcctcaacccctccccagtcccctcccgacgggcgccccacgcggaagacacccctccccctcccgccttccctcctccctatctcagcccttcgtactgggacgttggggagggggctgtgccgggcggagagaactcagcgaggattctgagaatggtagataacgcagatcatctctggaaaggatattgatccgcctcatgtaaagtatgcttagttcctttccagtggttttgctggaaaccatgtctcattatacagatgaacccagatttaccatagagcagatagatctgcttcagcgacttcggcgtactggaatgactaaacatgaaattctccatgccttggaaactttggaccgtcttgatcaagagcatagtgacaagtttggaagaaggtccagctatggaggaagttcatatgggaatagtactaacaatgtcccagcatcttcctctacagctacagcttccacacagacgcagcattcgggaatgtccccgtcacctagcaacagttatgatacttccccacagccttgcactaccaatcaaaatgggagggagaataatgagcgattatctacatccaatggaaagatgtcaccaactcgctaccatgcaaacagcatgggtcagaggtcatacagttttgaagcctcagaagaggacctagatgtagatgataaagtggaagaattaatgaggagggacagcagtgtgataaaagaggaaatcaaagcctttcttgccaatcggaggatttcccaagcagttgttgcacaggtaacaggtatcagtcagagccggatctctcattggctgttgcagcagggatcagacctgagtgaacagaagaaaagagcattttaccgatggtatcaacttgagaagacaaaccctggcgctacactaagtatgagaccagcccccattccaatagaggaccctgaatggagacaaacgcctcccccagtctctgccacatctggtactttccgactgcgacgagggagtcgatttacctggagaaaggagtgcctggctgttatggaaaggaacacttggtcccctgagagaaggatggaagaaaataaatggaagttgctttctgcagggtag

SEQ ID NO: 4668 - DNA, 3244 bp, Homo sapiens
  source 1..3244: mol_type = genomic DNA
tgttgatatcaatatggcggttgtcagccagacaaagacagtcagtctgatgtgattgagacaagggaggtttttcagggggagactgggagataggggcctcccctcccccttctcctcttcctgcgccggcctcaacccctccccagtcccctcccgacgggcgccccacgcggaagacacccctccccctcccgccttccctcctccctatctcagcccttcgtactgggacgttggggagggggctgtgccgggcggagagaactcagcgaggattctgagaatggtagataacgcagatcatctctggaaaggatattgatccgcctcatgtaaagtatgcttagttcctttccagtggttttgctggaaaccatgtctcattatacagatgaacccagatttaccatagagcagatagatctgcttcagcgacttcggcgtactggaatgactaaacatgaaattctccatgccttggaaactttggaccgtcttgatcaagagcatagtgacaagtttggaagaaggtccagctatggaggaagttcatatgggaatagtactaacaatgtcccagcatcttcctctacagctacagcttccacacagacgcagcattcgggaatgtccccgtcacctagcaacagttatgatacttccccacagccttgcactaccaatcaaaatgggagggagaataatgagcgattatctacatccaatggaaagatgtcaccaactcgctaccatgcaaacagcatgggtcagaggtcatacagttttgaagcctcagaagaggacctagatgtagatgataaagtggaagaattaatgaggagggacagcagtgtgataaaagaggaaatcaaagcctttcttgccaatcggaggatttcccaagcagttgttgcacaggtaacaggtatcagtcagagccggatctctcattggctgttgcagcagggatcagacctgagtgaacagaagaaaagagcattttaccgatggtatcaacttgagaagacaaaccctggcgctacactaagtatgagaccagcccccattccaatagaggaccctgaatggagacaaacgcctcccccagtctctgccacatctggtactttccgactgcgacgagggagtcgatttacctggagaaaggagtgcctggctgttatggaaagttacttcaatgagaatcaatacccagatgaagcaaagagggaagaaattgcaaacgcttgcaatgcagttatacagaagccaggcaaaaagctgtcagatctggaaagagttacctccctgaaagtatataattggtttgctaacagaaggaaggagatcaagaggagagccaatattgcagcaatcctggagagtcatgggatagatgtgcagagtccaggaggccactcaaacagtgatgatgtcgacgggaatgactactctgagcaggatacttggcaagtacgcaatggggaggaggaggagggaagaagttcagagggaggcagagaagcagagaaggatgacagtacgagccatagtgaccaccaagaccccatctcattagctgtggaaatggcagcagtcaaccacactatcttggcattggcccgacaaggagccaacgaaatcaagacagaggccctggatgatgactgatcagggaggttaaacatgacaagttaacttagtttagacgtagcaccttagcagactttcctcggtccttaacatgtgttcttacagtataacttgcagtttcttgtatgtcaggtagctgttagggtcttgttctgtgaagatggcatggtgccctcagcctttgcatatactctctcagtattaactcccagtaaataataaccaaccaaccaaccaaacttccctctcccagcccccgaggctagaaaatcttgctgctccgtcttagcattccaagaaagtgcttccaggtatttagatagccctcagttctcaaatattagactacgtgtaaaatcttgggtacctttagattcttgtaacactagtctgtactcccttttccttccccaagactgataggatgcaagctgaggtcgtggcacaggaatgacagacaccatttggggagtatccacagagtcaaaggaacactagaatccccacctcagcgtgaggataattgatttccagctgcaataagccgtgcctcattatagccacactgtggctagattatacttctttgggtgctgtgctaagaatgtcaatggaaaaagccgatctcagattttgtttgaagttaacatgcctgacacagacatcctttcctctcacaagctgtgtgacttagtagataaaatactgccttctgcctttgggaccatgattaaaaacaaagacaaaaaccaaaagtcattaaaaaaaaaaaaaaaaaaaacccagcttgagagcattggaaaaaaaaaatatgagctgaatgtctaatggatgctaagtccagttttcagaaccactgtacattccacggcacagttagcagtgcctgcctggaaaagttttggaggtcatcgtggaagttgctttgcctcctgtcagtgtcccctttccctgctaccaaaaaagtctttcaaggatggagctaaggtcaaaaatgagtgaaaaaacttgcagtgtttgtatccattaaacggaagccccctcactctgagaggtcactagaggacttcatagtggggttgtgctgcttatcacagatgcagacacttgcccagataggagcagagaaaagcaggggacgtttcctactcacattgtggctgtatgagaacacgatgggactgctttgctgttctctttactctgtccttggagaggtgtgaaaagctgtattgctacaggcaatttatttaataattggaagccatattgataatggatgtggtaatatttgtaaagtttaatctactttaagcggcagtaactaatggaatttttttccttgatcacatatgtagcacttttgttactttttaaagatatttatatttgataaatctttttttcattttgagaactcaaaataccaaacagtgaacttgcattctaaagtcaccctgtgatcaccttgtcatctagtagcaaaatgatgaactattcatgcatcaaagaaaattacatctgctggccttgtatgaaaatgatctcttggcatcccgattaaatgacacactgtcactgtgggtaa

SEQ ID NO: 4669 - DNA, 811 bp, Homo sapiens
  source 1..811: mol_type = genomic DNA
gttgatatcaatatggcggttgtcagccagacaaagacagtcagtctgatgtgattgagacaagggaggtttttcagggggagactgggagataggggcctcccctcccccttctcctcttcctgcgccggcctcaacccctccccagtcccctcccgacgggcgccccacgcggaagacacccctccccctcccgccttccctcctccctatctcagcccttcgtactgggacgttggggagggggctgtgccgggcggagagaactcagcgaggattctgagagtttcgctcttgtccatgctggagtgcaatggtgtaatctcagctcaccacaacctccgcctcctgggttcaagtgattctcctgcctcagcttcctgagtagctgggattacagaatggtagataacgcagatcatctctggaaaggatattgatccgcctcatgtaaagtatgcttagttcctttccagtggttttgctggaaaccatgtctcattatacagatgaacccagatttaccatagagcagatagatctgcttcagcgacttcggcgtactggaatgactaaacatgaaattctccatgccttggaaactttggaccgtcttgatcaagagcatagtgacaagtttggaagaaggtccagctatggaggaagttcatatgggaatagtactaacaatgtcccagcatcttcctctacagctacagcttccacacagacgcagcattcgggaatgtccccgtcacctagcaacagttatgatacttccccacagccttgcactaccaatcaaaatggg

SEQ ID NO: 4670 - DNA, 1731 bp, Homo sapiens
  source 1..1731: mol_type = genomic DNA
aaagtatgcttagttcctttccagtggttttgctggaaaccatgtctcattatacagatgaacccagatttaccatagagcagatagatctgcttcagcgacttcggcgtactggaatgactaaacatgaaattctccatgccttggaaactttggaccgtcttgatcaagagcatagtgacaagtttggaagaaggtccagctatggaggaagttcatatgggaatagtactaacaatgtcccagcatcttcctctacagctacagcttccacacagacgcagcattcgggaatgtccccgtcacctagcaacagttatgatacttccccacagccttgcactaccaatcaaaatgggagggagaataatgagcgattatctacatccaatggaaagatgtcaccaactcgctaccatgcaaacagcatgggtcagaggtcatacagttttgaagcctcagaagaggacctagatgtagatgataaagtggaagaattaatgaggagggacagcagtgtgataaaagaggaaatcaaagcctttcttgccaatcggaggatttcccaagcagttgttgcacaggtaacaggtatcagtcagagccggatctctcattggctgttgcagcagggatcagacctgagtgaacagaagaaaagagcattttaccgatggtatcaacttgagaagacaaaccctggcgctacactaagtatgagaccagcccccattccaatagaggaccctgaatggagacaaacgcctcccccagtctctgccacatctggtactttccgactgcgacgagggagtcgatttacctggagaaaggagtgcctggctgttatggaaagttacttcaatgagaatcaatacccagatgaagcaaagagggaagaaattgcaaacgcttgcaatgcagttatacagaagccaggcaaaaagctgtcagatctggaaagagttacctccctgaaagtatataattggtttgctaacagaaggaaggagatcaagaggagagccaatattgcagcaatcctggagagtcatgggatagatgtgcagagtccaggaggccactcaaacagtgatgatgtcgacgggaatgactactctgagcaggatacttggcaagtacgcaatggggaggaggaggagggaagaagttcagagggaggcagagaagcagagaaggatgacagtacgagccatagtgaccaccaagaccccatctcattagctgtggaaatggcagcagtcaaccacactatcttggcattggcccgacaaggagccaacgaaatcaagacagaggccctggatgatgactgatcagggaggttaaacatgacaagttaacttagtttagacgtagcaccttagcagactttcctcggtccttaacatgtgttcttacagtataacttgcagtttcttgtatgtcaggtagctgttagggtcttgttctgtgaagatggcatggtgccctcagcctttgcatatactctctcagtattaactcccagtaaataataaccaaccaaccaaccaaacttccctctcccagcccccgaggctagaaaatcttgctgctccgtcttagcattccaagaaagtgcttccaggtatttagatagccctcagttctcaaatattagactacgtgtaaaatcttgggtacctttagattcttgtaacactagtctgtactcccttttccttcccc

SEQ ID NO: 4671 - DNA, 1765 bp, Homo sapiens
  source 1..1765: mol_type = genomic DNA
gttgatatcaatatggcggttgtcagccagacaaagacagtcagtctgatgtgattgagacaagggaggtttttcagggggagactgggagataggggcctcccctcccccttctcctcttcctgcgccggcctcaacccctccccagtcccctcccgacgggcgccccacgcggaagacacccctccccctcccgccttccctcctccctatctcagcccttcgtactgggacgttggggagggggctgtgccgggcggagagaactcagcgaggattctgagaatggtagataacgcagatcatctctggaaaggatattgatccgcctcatgtaaagtatgcttagttcctttccagtggttttgctggaaaccatgtctcattatacagatgaacccagatttaccatagagcagatagatctgcttcagcgacttcggcgtactggaatgactaaacatgaaattctccatgccttggaaactttggaccgtcttgatcaagagcatagtgacaagtttggaagaaggtccagctatggaggaagttcatatgggaatagtactaacaatgtcccagcatcttcctctacagctacagcttccacacagacgcagcattcgggaatgtccccgtcacctagcaacagttatgatacttccccacagccttgcactaccaatcaaaatgggagggagaataatgagcgattatctacatccaatggaaagatgtcaccaactcgctaccatgcaaacagcatgggtcagaggtcatacagttttgaagcctcagaagaggacctagatgtagatgataaagtggaagaattaatgaggagggacagcagtgtgataaaagaggaaatcaaagcctttcttgccaatcggaggatttcccaagcagttgttgcacaggtaacaggtatcagtcagagccggatctctcattggctgttgcagcagggatcagacctgagtgaacagaagaaaagagcattttaccgatggtatcaacttgagaagacaaaccctggcgctacactaagtatgagaccagcccccattccaatagaggaccctgaatggagacaaacgcctcccccagtctctgccacatctggtactttccgactgcgacgagggagtcgatttacctggagaaaggagtgcctggctgttatggaaagttacttcaatgagaatcaatacccagatgaagcaaagagggaagaaattgcaaacgcttgcaatgcagttatacagaagccaggcaaaaagctgtcagatctggaaagagttacctccctgaaagtatataattggtttgctaacagaaggaaggagatcaagaggagagccaatattgcagcaatcctggagagtcatgggatagatgtgcagagtccaggaggccactcaaacagtgatgatgtcgacgggaatgactactctgagcaggatacttggcaagtacgcaatggggaggaggaggagggaagaagttcagagggaggcagagaagcagagaaggtagaagaagagaggaggatctgatccaaacaagcaagttacaccattcacgacacacactcagtgtttgagaaatactaggggcagctggaccccatgcctaaacacgtaccgacgcagggcacgatggaaggccccactcactctggccccactgcagtgggaaccctcctgcccaaaggagtggttcttccagagtctctggcacactgacacatgcatcctctcat

SEQ ID NO: 4672 - protein, 459 aa, Homo sapiens
MTAEEMKATESGAQSAPLPMEGVDISPKQDEGVLKVIKREGTGTEMPMIGDRVFVHYTGWLLDGTKFDSSLDRKDKFSFDLGKGEVIKAWDIAIATMKVGEVCHITCKPEYAYGSAGSPPKIPPNATLVFEVELFEFKGEDLTEEEDGGIIRRIQTRGEGYAKPNEGAIVEVALEGYYKDKLFDQRELRFEIGEGENLDLPYGLERAIQRMEKGEHSIVYLKPSYAFGSVGKEKFQIPPNAELKYELHLKSFEKAKESWEMNSEEKLEQSTIVKERGTVYFKEGKYKQALLQYKKIVSWLEYESSFSNEEAQKAQALRLASHLNLAMCHLKLQAFSAAIESCNKALELDSNNEKGLFRRGEAHLAVNDFELARADFQKVLQLYPNNKAAKTQLAVCQQRIRRQLAREKKLYANMFERLAEEENKAKAEASSGDHPTDTEMKEEQKSNTAGSQSQVETEA

SEQ ID NO: 4673 - protein, 158 aa, Homo sapiens
MEPPEGAGTGEIVKEAEVPQAALGVPAQGTGDNGHTPVEEEVGGIPVPAPGLLQVTERRQPLSSVSSLEVHFDLLDLTELTDMSDQELAEVFADSDDENLNTESPAGLHPLPRAGYLRSPSWTRTRAEQSHEKQPLGDPERQATVLDTFLTVERPQED

SEQ ID NO: 4674 - protein, 317 aa, Homo sapiens
MASVIPASNRSMRSDRNTYVGKRFVHVKNPYLDLMDEDILYHLDLGTKTHNLPAMFGDVKFVCVGGSPNRMKAFALFMHKELGFEEAEEDIKDICAGTDRYCMYKTGPVLAISHGMGIPSISIMLHELIKLLHHARCCDVTIIRIGTSGGIGIAPGTVVITDIAVDSFFKPRFEQVILDNIVTRSTELDKELSEELFNCSKEIPNFPTLVGHTMCTYDFYEGQGRLDGALCSFSREKKLDYLKRAFKAGVRNIEMESTVFAAMCGLCGLKAAVVCVTLLDRLDCDQINLPHDVLVEYQQRPQLLISNFIRRRLGLCD

SEQ ID NO: 4675 - protein, 364 aa, Homo sapiens
MSEVEAAAGATAVPAATVPATAAGVVAVVVPVPAGEPQKGGGAGGGGGAASGPAAGTPSAPGSRTPGNPATAVSGTPAPPARSQADKPVLAIQVLGTVKWFNVRNGYGFINRNDTKEDVFVHQTAIKRNNPRKFLRSVGDGETVEFDVVEGEKGAEATNVTGPGGVPVKGSRYAPNRRKSRRFIPRPPSVAPPPMVAEIPSAGTGPGSKGERAEDSGQRPRRWCPPPFFYRRRFVRGPRPPNQQQPIEGTDRVEPKETAPLEGHQQQGDERVPPPRFRPRYRRPFRPRPRQQPTTEGGDGETKPSQGPADGSRPEPQRPRNRPYFQRRRQQAPGPQQAPGPRQPAAPETSAPVNSGDPTTTILE

SEQ ID NO: 4676 - protein, 1901 aa, Homo sapiens
MATFRNNHMKTKASVRKSFSEDVFQSVKSLLQSQKELCSVTAEDCLQQDEHANLTEVTFLGFNEETDAAHIQDLAAVSLELPDILNSLHFCSLNENEIICMKNINKPLDISSDPLNQSHPSGMLCVMRVSPTSPRLRIDFIFSLLSKYATGIRYTLDTFLHQKHQLETTDEDDDDTNQSVSSIEDDFVTAFEHLEEEETSKPYNDGMNITVLRSQCDAASQTVTGHHLETHDLKILISSGQQKSLAKPSTSSVNVLGHKELPSVKTSVTTSISEPWTQRSFYRSSNASDKDSDLQKTFFSSSPAYSSESECSSPSPVIFLDEEGYQKSLKAKLELPKIPVMKDDIEDSDSEVSEFFDSFDQFDELEQTLETCLFNKDPVIGKSSQRKGHKHGKSCMNPQKFKFDRPALPANVRKPTPRKPESPYGNLCDAPDSPRPVKASREDSGLFSPIRSSAFSPLGGCTPAECFCQTDIGGDRIHENHDSVYYTYEDYAKSISCEVLGSVLRTHHTNTLSNINSIKHGENKTVTFKHGNLDQKNKSKNKSLMIKDSIQKFAADLVEKSFGSAFKDLQKGVSSCTNALYHLAIKLTSSVLQMAFDELRRQRAFSLKERAISGLANFLVSEALSNALKDLQYVKKQIFTNTVARFAADLAEELVFEGIMEVCQFSYPQTPASPQCGSFDFEDKVVKLYAKDLSESVIQEAFIELSQVDVTFTTKAAVSVSTDNIKYVSAESVVPSTQAVTFSPSFHNQAIMVTKPVQEYKKEYTVQQALFCTSGIVTSIPVPLAGSALLPYHISSTACQAKAHLSSDDSNSNGDSAQVHIATKNREEKAACLRNICLPSEHNPGNQNDFKPTNDDIEMQSSSKLPNDPAIISNFSAAVVHTIVNETLESMTSLEVTKMVDERTDYLTKSLKEKTPPFSHCDQAVLQCSEASSNKDMFADRLSKSIIKHSIDKSKSVIPNIDKNAVYKESLPVSGEESQLTPEKSPKFPDSQNQLTHCSLSAAKDCVPECKVSMVHGSSLETLPSCPAVTGQKSDLKESAKDQPLKKHNLNSTSLEALSFGQENPFPHSHTFSSTALTCVDGLHVEDKQKVRDRNVIPDTPPSTPLVPSRASSEWDIKKLTKKLKGELAKEFAPATPPSTPHNSSVGSLSENEQNTIEKEEFMLKLMRSLSEEVESSESGELPEVDVKSEHSGKKVQFAEALATHILSLATEMAASHLDNKIIQEPKVKNPCLNVQSQRSVSPTFLNPSDENLKTLCNFAGDLAAEVITEAEKIAKVRNCMLFKQKKNSCYADGDEDYKVEEKLDIEAVVHPREVDPFILSLPPSSCMSGLMYKYPSCESVTDEYAGHLIQILKQEGGNSELIMDQYANRLAYRSVKSGLQEAAKTTKVQCNSRMFPVPSSQVKTNKELLMFSNKEHHQEADKKRQSKRNEGYFCKNQTCERTLDPYRNEVSQLYSFSTSLVHSITKDAKEELTASLVGLPKSLTDSCLFEKSGYEEDNECHVTPELPKSLQPSSQNHRFYHSTGSLNGYGCGDNVVQAVEQYAKKVVDDTLELTLGSTVFRVSETTKSADRVTYAEKLSPLTGQACRYCDLKELHNCTGNSSQHFFRQGSLASSKPASNPKFSSRYQKSRIFHLSVPQIHVNLDKKAVLAEKIVAEAIEKAERELSSTSLAADSGIGQEGASFAESLATETMTAAVTNVGHAVSSSKEIEDFQSTESVSSQQMNLSIGDDSTGSWSNLSFEDEHQDESSSFHHLSESNGNSSSWSSLGLEGDLYEDNLSFPTSDSDGPDDKDEEHEDEVEGLGQDGKTLLITNIDMEPCTVDPQLRIILQWLIASEAEVAELYFHDSANKEFMLLSKQLQEKGWKVGDLLQAVLQYYEVMEKASSEERCKSLFDWLLENA

SEQ ID NO: 4677 - protein, 138 aa, Homo sapiens
MAELQQLRVQEAVESMVKSLERENIRKMQGLMFRCSASCCEDSQASMKQVHQCIERCHVPLAQAQALVTSELEKFQDRLARCTMHCNDKAKDSIDAGSKELQVKQQLDSCVTKCVDDHMHLIPTMTKKMKEALLSIGK

SEQ ID NO: 4678 - protein, 369 aa, Homo sapiens
MTLEAIRYSRGSLQILDQLLLPKQSRYEAVGSVHQAWEAIRAMKVRGAPAIALVGCLSLAVELQAGAGGPGLAALVAFVRDKLSFLVTARPTAVNMARAARDLADVAAREAEREGATEEAVRERVICCTEDMLEKDLRDNRSIGDLGARHLLERVAPSGGKVTVLTHCNTGALATAGYGTALGVIRSLHSLGRLEHAFCTETRPYNQGARLTAFELVYEQIPATLITDSMVAAAMAHRGVSAVVVGADRVVANGDTANKVGTYQLAIVAKHHGIPFYVAAPSSSCDLRLETGKEIIIEERPGQELTDVNGVRIAAPGIGVWNPAFDVTPHDLITGGIITELGVFAPEELRTALTTTISSRDGTLDGPQM

SEQ ID NO: 4679 - protein, 1218 aa, Homo sapiens
MMSLSVRPQRRLLSARVNRSQSFAGVLGSHERGPRSFPVFSPPGPPRKPPALSRVSRMFSVAHPAAKVPQPERLDLVYTALKRGLTAYLEVHQQEQEKLQGQIRESKRNSRLGFLYDLDKQVKSIERFLRRLEFHASKIDELYEAYCVQRRLRDGAYNMVRAYTTGSPGSREARDSLAEATRGHREYTESMCLLESELEAQLGEFHLRMKGLAGFARLCVGDQYEICMKYGRQRWKLRGRIEGSGKQVWDSEETIFLPLLTEFLSIKVTELKGLANHVVVGSVSCETKDLFAALPQVVAVDINDLGTIKLSLEVTWSPFDKDDQPSAASSVNKASTVTKRFSTYSQSPPDTPSLREQAFYNMLRRQEELENGTAWSLSSESSDDSSSPQLSGTARHSPAPRPLVQQPEPLPIQVAFRRPETPSSGPLDEEGAVAPVLANGHAPYSRTLSHISEASVDAALAEASVEAVGPESLAWGPSPPTHPAPTHGEHPSPVPPALDPGHSATSSTLGTTGSVPTSTDPAPSAHLDSVHKSTDSGPSELPGPTHTTTGSTYSAITTTHSAPSPLTHTTTGSTHKPIISTLTTTGPTLNIIGPVQTTTSPTHTMPSPTHTTASPTHTSTSPTHTPTSPTHKTSMSPPTTTSPTPSGMGLVQTATSPTHPTTSPTHPTTSPILINVSPSTSLELATLSSPSKHSDPTLPGTDSLPCSPPVSNSYTQADPMAAAPHPSPAHSSRKPLTSPAPDPSESTVQSLSPTPSPPTPAPQHSDLCLAMAVQTPVPTAAGGSGDRSLEEALGALMAALDDYRGQFPELQGLEQEVTRLESLLMQRQGLTRSRASSLSITVEHALESFSFLNEDEDEDNDVPGDRPPSSPEAGAEDSIDSPSARPLSTGCPALDAALVRHLYHCSRLLLKLGTFGPLRCQEAWALERLLREARVLEAVCEFSRRWEIPASSAQEVVQFSASRPGFLTFWDQCTERLSCFLCPVERVLLTFCNQYGARLSLRQPGLAEAVCVKFLEDALGQKLPRRPQPGPGEQLTVFQFWSFVETLDSPTMEAYVTETAEEVLLVRNLNSDDQAVVLKALRLAPEGRLRRDGLRALSSLLVHGNNKVMAAVSTQLRSLSLGPTFRERALLCFLDQLEDEDVQTRVAGCLALGCIKAPEGIEPLVYLCQTDTEAVREAARQSLQQCGEEGQSAHRRLEESLDALPRIFGPGSMASTAF

SEQ ID NO: 4680 - protein, 441 aa, Homo sapiens
MASVAAARAVPVGSGLRGLQRTLPLVVILGATGTGKSTLALQLGQRLGGEIVSADSMQVYEGLDIITNKVSAQEQRICRHHMISFVDPLVTNYTVVDFRNRATALIEDIFARDKIPIVVGGTNYYIESLLWKVLVNTKPQEMGTEKVIDRKVELEKEDGLVLHKRLSQVDPEMAAKLHPHDKRKVARSLQVFEETGISHSEFLHRQHTEEGGGPLGGPLKFSNPCILWLHADQAVLDERLDKRVDDMLAAGLLEELRDFHRRYNQKNVSENSQDYQHGIFQSIGFKEFHEYLITEGKCTLETSNQLLKKGPGPIVPPVYGLEVSDVSKWEESVLEPALEIVQSFIQGHKPTATPIKMPYNEAENKRSYHLCDLCDRIIIGDREWAAHIKSKSHLNQLKKRRRLDSDAVNTIESQSVSPDHNKEPKEKGSPGQNDQELKCSV

SEQ ID NO: 4681 - protein, 205 aa, Homo sapiens
MAEPLQPDPGAAEDAAAQAVETPGWKAPEDAGPQPGSYEIRHYGPAKWVSTSVESMDWDSAIQTGFTKLNSYIQGKNEKEMKIKMTAPVTSYVEPGSGPFSESTITISLYIPSEQQFDPPRPLESDVFIEDRAEMTVFVRSFDGFSSAQKNQEQLLTLASILREDGKVFDEKVYYTAGYNSPVKLLNRNNEVWLIQKNEPTKENE

SEQ ID NO: 4682 - protein, 207 aa, Homo sapiens
MSCTIEKILTDAKTLLERLREHDAAAESLVDQSAALHRRVAAMREAGTALPDQYQEDASDMKDMSKYKPHILLSQENTQIRDLQQENRELWISLEEHQDALELIMSKYRKQMLQLMVAKKAVDAEPVLKAHQSHSAEIESQIDRICEMGEVMRKAVQVDDDQFCKIQEKLAQLELENKELRELLSISSESLQARKENSMDTASQAIK

SEQ ID NO: 4683 - protein, 343 aa, Homo sapiens
MNIHRSTPITIARYGRSRNKTQDFEELSSIRSAEPSQSFSPNLGSPSPPETPNLSHCVSCIGKYLLLEPLEGDHVFRAVHLHSGEELVCKVFDISCYQESLAPCFCLSAHSNINQITEIILGETKAYVFFERSYGDMHSFVRTCKKLREEEAARLFYQIASAVAHCHDGGLVLRDLKLRKFIFKDEERTRVKLESLEDAYILRGDDDSLSDKHGCPAYVSPEILNTSGSYSGKAADVWSLGVMLYTMLVGRYPFHDIEPSSLFSKIRRGQFNIPETLSPKAKCLIRSILRREPSERLTSQEILDHPWFSTDFSVSNSAYGAKEVSDQLVPDVNMEENLDPFFN

SEQ ID NO: 4684 - protein, 1015 aa, Homo sapiens
MRRFLRPGHDPVRERLKRDLFQFNKTVEHGFPHQPSALGYSPSLRILAIGTRSGAIKLYGAPGVEFMGLHQENNAVTQIHLLPGQCQLVTLLDDNSLHLWSLKVKGGASELQEDESFTLRGPPGAAPSATQITVVLPHSSCELLYLGTESGNVFVVQLPAFRALEDRTISSDAVLQRLPEEARHRRVFEMVEALQEHPRDPNQILIGYSRGLVVIWDLQGSRVLYHFLSSQQLENIWWQRDGRLLVSCHSDGSYCQWPVSSEAQQPEPLRSLVPYGPFPCKAITRILWLTTRQGLPFTIFQGGMPRASYGDRHCISVIHDGQQTAFDFTSRVIGFTVLTEADPAATFDDPYALVVLAEEELVVIDLQTAGWPPVQLPYLASLHCSAITCSHHVSNIPLKLWERIIAAGSRQNAHFSTMEWPIDGGTSLTPAPPQRDLLLTGHEDGTVRFWDASGVCLRLLYKLSTVRVFLTDTDPNENFSAQGEDEWPPLRKVGSFDPYSDDPRLGIQKIFLCKYSGYLAVAGTAGQVLVLELNDEAAEQAVEQVEADLLQDQEGYRWKGHERLAARSGPVRFEPGFQPFVLVQCQPPAVVTSLALHSEWRLVAFGTSHGFGLFDHQQRRQVFVKCTLHPSDQLALEGPLSRVKSLKKSLRQSFRRMRRSRVSSRKRHPAGPPGEAQEGSAKAERPGLQNMELAPVQRKIEARSAEDSFTGFVRTLYFADTYLKDSSRHCPSLWAGTNGGTIYAFSLRVPPAERRMDEPVRAEQAKEIQLMHRAPVVGILVLDGHSVPLPEPLEVAHDLSKSPDMQGSHQLLVVSEEQFKVFTLPKVSAKLKLKLTALEGSRVRRVSVAHFGSRRAEDYGEHHLAVLTNLGDIQVVSLPLLKPQVRYSCIRREDVSGIASCVFTKYGQGFYLISPSEFERFSLSTKWLVEPRCLVDSAETKNHRPGNGAGPKKAPSRARNSGTQSDGEEKQPGLVMERALLSDERAATGVHIEPPWGAASAMAEQSEWLSVQAAR

SEQ ID NO: 4685 - protein, 298 aa, Homo sapiens
MAAAEPAVLALPNSGAGGAGAPSGTVPVLFCFSVFARPSSVPHGAGYELLIQKFLSLYGDQIDMHRKFVVQLFAEEWGQYVDLPKGFAVSERCKVRLVPLQIQLTTLGNLTPSSTVFFCCDMQERFRPAIKYFGDIISVGQRLLQGARILGIPVIVTEQYPKGLGSTVQEIDLTGVKLVLPKTKFSMVLPEVEAALAEIPGVRSVVLFGVETHVCIQQTALELVGRGVEVHIVADATSSRSMMDRMFALERLARTGIIVTTSEAVLLQLVADKDHPKFKEIQNLIKASAPESGLLSKV

SEQ ID NO: 4686 - protein, 812 aa, Homo sapiens
MSEQGDLNQAIAEEGGTEQETATPENGIVKSESLDEEEKLELQRRLEAQNQERRKSKSGAGKGKLTRSLAVCEESSARPGGESLQDQESIHLQLSSFSSLQEEDKSRKDDSEREKEKDKNKDKTSEKPKIRMLSKDCSQEYTDSTGIDLHEFLINTLKNNSRDRMILLKMEQEIIDFIADNNNHYKKFPQMSSYQRMLVHRVAAYFGLDHNVDQTGKSVIINKTSSTRIPEQRFCEHLKDEKGEESQKRFILKRDNSSIDKEDNQQNRMHPFRDDRRSKSIEEREEEYQRVRERIFAHDSVCSQESLFVENSRLLEDSNICNETYKKRQLFRGNRDGSGRTSGSRQSSSENELKWSDHQRAWSSTDSDSSNRNLKPAMTKTASFGGITVLTRGDSTSSTRSTGKLSKAGSESSSSAGSSGSLSRTHPPLQSTPLVSGVAAGSPGCVPYPENGIGGQVAPSSTSYILLPLEAATGIPPGSILLNPHTGQPFVNPDGTPAIYNPPTSQQPLRSAMVGQSQQQPPQQQPSPQPQQQVQPPQPQMAGPLVTQRDDVATQFGQMTLSRQSSGETPEPPSGPVYPSSLMPQPAQQPSYVIASTGQQLPTGGFSGSGPPISQQVLQPPPSPQGFVQQPPPAQMPVYYYPSGQYPTSTTQQYRPMAPVQYNAQRSQQMPQAAQQAGYQPVLSGQQGFQGLIGVQQPPQSQNVINNQQGTPVQSVMVSYPTMSSYQVPMTQGSQGLPQQSYQQPIMLPNQAGQGSLPATGMPVYCNVTPPTPQNNLRLIGPHCPSSTVPVMSASCRTNCASMSNAGWQVKF

SEQ ID NO: 4687 - protein, 396 aa, Homo sapiens
MTTLVLDNGAYNAKIGYSHENVSVIPNCQFRSKTARLKTFTANQIDEIKDPSGLFYILPFQKGYLVNWDVQRQVWDYLFGKEMYQVDFLDTNIIITEPYFNFTSIQESMNEILFEEYQFQAVLRVNAGALSAHRYFRDNPSELCCIIVDSGYSFTHIVPYCRSKKKKEAIIRINVGGKLLTNHLKEIISYRQLHVMDETHVINQVKEDVCYVSQDFYRDMDIAKLKGEENTVMIDYVLPDFSTIKKGFCKPREEMVLSGKYKSGEQILRLANERFAVPEILFNPSDIGIQEMGIPEAIVYSIQNLPEEMQPHFFKNIVLTGGNSLFPGFRDRVYSEVRCLTPTDYDVSVVLPENPITYAWEGGKLISENDDFEDMVVTREDYEENGHSVCEEKFDI

SEQ ID NO: 4688 - protein, 334 aa, Homo sapiens
MEPGPTAAQRRCSLPPWLPLGLLLWSGLALGALPFGSSPHRVFHDLLSEQQLLEVEDLSLSLLQGGGLGPLSLPPDLPDLDPECRELLLDFANSSAELTGCLVRSARPVRLCQTCYPLFQQVVSKMDNISRAAGNTSESQSCARSLLMADRMQIVVILSEFFNTTWQEANCANCLTNNSEELSNSTVYFLNLFNHTLTCFEHNLQGNAHSLLQTKNYSEVCKNCREAYKTLSSLYSEMQKMNELENKAEPGTHLCIDVEDAMNITRKLWSRTFNCSVPCSDTVPVIAVSVFILFLPVVFYLSSFLHSEQKKRKLILPKRLKSSTSFANIQENSN

SEQ ID NO: 4689 - protein, 723 aa, Homo sapiens
MSTATGPEAAPKPSAKSIYEQRKRYSTVVMADVSQYPVNHLVTFCLGEDDGVHTVEDASRKLAVMDSQGRVWAQEMLLRVSPDHVTLLDPASKEELESYPLGAIVRCDAVMPPGRSRSLLLLVCQEPERAQPDVHFFQGLRLGAELIREDIQGALHNYRSGRGERRAAALRATQEELQRDRSPAAETPPLQRRPSVRAVISTVERGAGRGRPQAKPIPEAEEAQRPEPVGTSSNADSASPDLGPRGPDLAVLQAEREVDILNHVFDDVESFVSRLQKSAEAARVLEHRERGRRSRRRAAGEGLLTLRAKPPSEAEYTDVLQKIKYAFSLLARLRGNIADPSSPELLHFLFGPLQMIVNTSGGPEFASSVRRPHLTSDAVALLRDNVTPRENELWTSLGDSWTRPGLELSPEEGPPYRPEFFSGWEPPVTDPQSRAWEDPVEKQLQHERRRRQQSAPQVAVNGHRDLEPESEPQLESETAGKWVLCNYDFQARNSSELSVKQRDVLEVLDDSRKWWKVRDPAGQEGYVPYNILTPYPGPRLHHSQSPARSLNSTPPPPPAPAPAPPPALARPRWDRPRWDSCDSLNGLDPSEKEKFSQMLIVNEELQARLAQGRSGPSRAVPGPRAPEPQLSPGSDASEVRAWLQAKGFSSGTVDALGVLTGAQLFSLQKEELRAVSPEEGARVYSQVTVQRSLLEDKEKVSELEAVMEKQKKKVEGEVEMEVI

SEQ ID NO: 4690 - protein, 1873 aa, Homo sapiens
MFSRRSHGDVKKSTQKVLDPKKDVLTRLKHLRALLDNVDANDLKQFFETNYSQIYFIFYENFIALENSLKLKGNNKSQREELDSILFLFEKILQFLPERIFFRWHYQSIGSTLKKLLHTGNSIKIRCEGIRLFLLWLQALQTNCAEEQVLIFACLVPGFPAVMSSRGPCTLETLINPSPSVADVKIYPEEITPLLPAISGEKIAEDQTCFFLQILLKYMVIQAASLEWKNKENQDTGFKFLFTLFRKYYLPHLFPSFTKLTNIYKPVLDIPHLRPKPVYITTTRDNENIYSTKIPYMAARVVFIKWIVTFFLEKKYLTATQNTKNGVDVLPKIIQTVGGGAVQERAPELDGGGPTEQDKSHSNSSTLSDRRLSNSSLCSIEEEHRMVYEMVQRILLSTRGYVNFVNEVFHQAFLLPSCEIAVTRKVVQVYRKWILQDKPVFMEEPDRKDVAQEDAEKLGFSETDSKEASSESSGHKRSSSWGRTYSFTSAMSRGCVTEEENTNVKAGVQALLQVFLTNSANIFLLEPCAEVPVLLKEQVDACKAVLIIFRRMIMELTMNKKTWEQMLQILLRITEAVMQKPKDKQIKDLFAQSLAGLLFRTLMVAWIRANLCVYISRELWDDFLGVLSSLTEWEELINEWANIMDSLTAVLARTVYGVEMTNLPLDKLSEQKEKKQRGKGCVLDPQKGTTVGRSFSLSWRSHPDVTEPMRFRSATTSGAPGVEKARNIVRQKATEVEECQQSENAPAAGSGHLTVGQQQQVLRSSSTSDIPEPLCSDSSQGQKAENTQNSSSSEPQPIQENKGHVKREHEGITILVRRSSSPAELDLKDDLQQTQGKCRERQKSESTNSDTTLGCTNEAELSMGPWQTCEEDPELNTPTDVVADADARHWLQLSPTDASNLTDSSECLTDDCSIIAGGSLTGWHPDSAAVLWRRVLGILGDVNNIQSPKIHARVFCYLYELWYKLAKIRDNLAISLDNQSSPSPPVLIPPLRMFASWLFKAATLPNEYKEGKLQAYRLICAMMTRRQDVLPNSDFLVHFYLVMHLGLTSEDQDILNTIIRHCPPRFFSLGFPGFSMLVGDFITAAARVLSTDILTAPRSEAVTVLGSLVCFPNTYQEIPLLQSVPEVNEAITGTEDVKHYLINILLKNATEEPNEYARCIAVCSLGVWICEELAQCTSHPQVKEAINVIGVTLKFPNKIVAQVACDVLQLLVSYWEKLQMFETSLPRKMAEILVATVAFLLPSAEYSSVETDKKFIVSLLLCLLDWCMALPVSVLLHPVSTAVLEEQHSARAPLLDYIYRVLHCCVCGSSTYTQQSHYILTLADLSSTDYDPFLPLANVKSSEPVQYHSSAELGNLLTVEEEKKRRSLELIPLTARMVMAHLVNHLGHYPLSGGPAILHSLVSENHDNAHVEGSELSFEVFRSPNLQLFVFNDSTLISYLQTPTEGPVGGSPVGSLSDVRVIVRDISGKYSWDGKVLYGPLEGCLAPNGRNPSFLISSWHRDTFGPQKDSSQVEEGDDVLDKLLENIGHTSPECLLPSQLNLNEPSLTPCGMNYDQEKEIIEVILRQNAQEDEYIQSHNFDSAMKVTSQGQPSPVEPRGPFYFCRLLLDDLGMNSWDRRKNFHLLKKNSKLLRELKNLDSRQCRETHKIAVFYIAEGQEDKCSILSNERGSQAYEDFVAGLGWEVDLSTHCGFMGGLQRNGSTGQTAPYYATSTVEVIFHVSTRMPSDSDDSLTKKLRHLGNDEVHIVWSEHSRDYRRGIIPTAFGDVSIIIYPMKNHMFFIAITKKPEVPFFGPLFDGAIVSGKLLPSLVCATCINASRAVKCLIPLYQSFYEERALYLEAIIQNHREVMTFEDFAAQVFSPSPSYSLSGTD

SEQ ID NO: 4691 - protein, 582 aa, Homo sapiens
MGGSSPVTSKAIVDADGRIYIRNWQGGILSGGFEKNPKPIFTEGKNQLEIQNLQEDWDHFEPLLSSLLRRMPELETLEIMKLVNCPETFTPDMRCIMGESPAVQGYFVLAGMNSAGLSFGGGAGKYLAEWMVHGYPSENVWELDLKRFGALQSSRTFLRHRVMEVMPLMYDLKVPRWDFQTGRQLRTSPLYDRLDAQGARWMEKHGFERPKYFVPPDKDLLALEQSKTFYKPDWFDIVESEVKCCKEAVCVIDMSSFTKFEITSTGDQALEVLQYLFSNDLDVPVGHIVHTGMLNEGGGYENDCSIARLNKRSFFMISPTDQQVHCWAWLKKHMPKDSNLLLEDVTWKYTALNLIGPRAVDVLSELSYAPMTPDHFPSLFCKEMSVGYANGIRVMSMTHTGEPGFMLYIPIEGMDFIGRDALLQQKQNGVYKRLTMFILDDHDSDLDLWPWWGEPIYRNGQYVGKTTSSAYSYSLERHVCLGFVHNFSEDTGEEQVVTADFINRGEYEIDIAGYRFQAKAKLYPVASLFTQKRRKDDMELSAFLALPPPPPNIHSGLFFPSHPSLSFSWWQEVCLTGQKQAP

SEQ ID NO: 4692 - protein, 706 aa, Homo sapiens
MNESKPGDSQNLACVFCRKHDDCPNKYGEKKTKEKWNLTVHYYCLLMSSGIWQRGKEEEGVYGFLIEDIRKEVNRASKLKCCVCKKNGASIGCVAPRCKRSYHFPCGLQRECIFQFTGNFASFCWDHRPVQIITSNNYRESLPCTICLEFIEPIPSYNILRSPCCKNAWFHRDCLQVQAINAGVFFFRCTICNNSDIFQKEMLRMGIHIPEKDASWELEENAYQELLQHYERCDVRRCRCKEGRDYNAPDSKWEIKRCQCCGSSGTHLACSSLRSWEQNWECLECRGIIYNSGEFQKAKKHVLPNSNNVGITDCLLEESSPKLPRQSPGSQSKDLLRQGSKFRRNVSTLLIELGFQIKKKTKRLYINKANIWNSALDAFRNRNFNPSYAIEVAYVIENDNFGSEHPGSKQEFLSLLMQHLENSSLFEGSLSKNLSLNSQALKENLYYEAGKMLAISLVHGGPSPGFFSKTLFNCLVYGPENTQPILDDVSDFDVAQIIIRINTATTVADLKSIINECYNYLELIGCLRLITTLSDKYMLVKDILGYHVIQRVHTPFESFKQGLKTLGVLEKIQAYPEAFCSILCHKPESLSAKILSELFTVHTLPDVKALGFWNSYLQAVEDGKSTTTMEDILIFATGCSSIPPAGFKPTPSIECLHVDFPVGNKCNNCLAIPITNTYKEFQENMDFTIRNTLRLEKEESSHYIGH

SEQ ID NO: 4693 - protein, 422 aa, Homo sapiens
MNSGHSFSQTPSASFHGAGGGWGRPRSFPRAPTVHGGAGGARISLSFTTRSCPPPGGSWGSGRSSPLLGGNGKATMQNLNDRLASYLEKVRALEEANMKLESRILKWHQQRDPGSKKDYSQYEENITHLQEQIVDGKMTNAQIILLIDNARMAVDDFNLKYENEHSFKKDLEIEVEGLRRTLDNLTIVTTDLEQEVEGMRKELILMKKHHEQEMEKHHVPSDFNVNVKVDTGPREDLIKVLEDMRQEYELIIKKKHRDLDTWYKEQSAAMSQEAASPATVQSRQGDIHELKRTFQALEIDLQTQYSTKSALENMLSETQSRYSCKLQDMQEIISHYEEELTQLRHELERQNNEYQVLLGIKTHLEKEITTYRRLLEGESEGTREESKSSMKVSATPKIKAITQETINGRLVLCQVNEIQKHA

SEQ ID NO: 4694 - protein, 191 aa, Homo sapiens
MGKKTKRTADSSSSEDEEEYVVEKVLDRRVVKGQVEYLLKWKGFSEEHNTWEPEKNLDCPELISEFMKKYKKMKEGENNKPREKSESNKRKSNFSNSADDIKSKKKREQSNDIARGFERGLEPEKIIGATDSCGDLMFLMKWKDTDEADLVLAKEANVKCPQIVIAFYEERLTWHAYPEDAENKEKETAKS

SEQ ID NO: 4695 - protein, 607 aa, Homo sapiens
MEGKPMRRCTNIRPGETGMDVTSRCTLGDPNKLPEGVPQPARMPYISDKHPRQTLEVINLLRKHRELCDVVLVVGAKKIYAHRVILSACSPYFRAMFTGELAESRQTEVVIRDIDERAMELLIDFAYTSQITVEEGNVQTLLPAACLLQLAEIQEACCEFLKRQLDPSNCLGIRAFADTHSCRELLRIADKFTQHNFQEVMESEEFMLLPANQLIDIISSDELNVRSEEQVFNAVMAWVKYSIQERRPQLPQVLQHVRLPLLSPKFLVGTVGSDPLIKSDEECRDLVDEAKNYLLLPQERPLMQGAARPRKPIRCGEVLFAVGGWCSGDAISSVERYDPQTNEWRMVASMSKRRCGVGVSVLDDLLYAVGGHDGSSYLNSVERYDPKTNQWSSDVAPTSTCRTSVGVAVLGGFLYAVGGQDGVSCLNIVERYDPKENKWTRVASMSTRRLGVAVAVLGGFLYAVGGSDGTSPLNTVERYNPQENRWHTIAPMGTRRKHLGCAVYQDMIYAVGGRDDTTELSSAERYNAANQWSPVVAMTSRRSGVGLAVVNGQLMAVGGFDGTTYLKTIEVFDPDANTWRLYGGMNYRRLGGGVGVIKMTHCESHIW

SEQ ID NO: 4696 - protein, 350 aa, Homo sapiens
MFIKGRAPRAPPRERRRATRGGLRQVVAPPRALGSTSRPHFRRASVCRRRCRKSGGLLAASRKMAAAAVNGAAGFSSSGPAATSGAVLQAATGMYEQLKGEWNRKSPNLSKCGEELGRLKLVLLELNFLPTTGTKLTKQQLILARDILEIGAQWSILRKDIPSFERYMAQLKCYYFDYKEQLPESAYMHQLLGLNLLFLLSQNRVAEFHTELERLPAKDIQTNVYIKHPVSLEQYLMEGSYNKVFLAKGNIPAESYTFFIDILLDTIRDEIAGCIEKAYEKILFTEATRILFFNTPKKMTDYAKKRGWVLGPNNYYSFASQQQKPEDTTIPSTELAKQVIEYARQLEMIV

SEQ ID NO: 4697 - protein, 126 aa, Homo sapiens
MSIGVPIKVLHEAEGHIVTCETNTGEVYRGKLIEAEDNMNCQMSNITVTYRDGRVAQLEQVYIRGSKIRFLILPDMLKNAPMLKSMKNKNQGSGAGRGKAAILKAQVAARGRGRGMGRGNIFQKRR

SEQ ID NO: 4698 - protein, 970 aa, Homo sapiens
MLCFLDDGAGMDPSDAASVIQFGKSAKRTPESTQIGQYGNGLKSGSMRIGKDFILFTKKEDTMTCLFLSRTFHEEEGIDEVIVPLPTWNARTREPVTDNVEKFAIETELIYKYSPFRTEEEVMTQFMKIPGDSGTLVIIFNLKLMDNGEPELDIISNPRDIQMAETSPEGTKPERRSFRAYAAVLYIDPRMRIFIHGHKVQTKRLSCCLYKPRMYKYTSSRFKTRAEQEVKKAEHVARIAEEKAREAESKARTLEVRLGGDLTRDSRVMLRQVQNRAITLRREADVKKRIKEAKQRALKEPKELNFVFGVNIEHRDLDGMFIYNCSRLIKMYEKVGPQLEGGMACGGVVGVVDVPYLVLEPTHNKQDFADAKEYRHLLRAMGEHLAQYWKDIAIAQRGIIKFWDEFGYLSANWNQPPSSELRYKRRRAMEIPTTIQCDLCLKWRTLPFQLSSVEKDYPDTWVCSMNPDPEQDRCEASEQKQKVPLGTFRKDMKTQEEKQKQLTEKIRQQQEKLEALQKTTPIRSQADLKKLPLEVTTRPSTEEPVRRPQRPRSPPLPAVIRNAPSRPPSLPTPRPASQPRKAPVISSTPKLPALAAREEASTSRLLQPPEAPRKPANTLVKTASRPAPLVQQLSPSLLPNSKSPREVPSPKVIKTPVVKKTESPIKLSPATPSRKRSVAVSDEEEVEEEAERRKERCKRGRFVVKEEKKDSNELSDSAGEEDSADLKRAQKDKGLHVEVRVNREWYTGRVTAVEVGKHVVRWKVKFDYVPTDTTPRDRWVEKGSEDVRLMKPPSPEHQSLDTQQEGGEEEVGPVAQQAIAVAEPSTSECLRIEPDTTALSTNHETIDLLVQILRNCLRYFLPPSFPISKKQLSAMNSDELISFPLKEYFKQYEVGLQNLCNSYQSRADSRAKASEESLRTSERKLRETEEKLQKLRTNIVALLQKVQEDIDINTDDELDAYIEDLITKGD

SEQ ID NO: 4699 - protein, 862 aa, Homo sapiens
MAGPRGALLAWCRRQCEGYRGVEIRDLSSSFRDGLAFCAILHRHRPDLLDFDSLSKDNVFENNRLAFEVAEKELGIPALLDPNDMVSMSVPDCLSIMTYVSQYYNHFCSPGQAGVSPPRKGLAPCSPPSVAPTPVEPEDVAQGEELSSGSLSEQGTGQTPSSTCAACQQHVHLVQRYLADGRLYHRHCFRCRRCSSTLLPGAYENGPEEGTFVCAEHCARLGPGTRSGTRPGPFSQPKQQHQQQLAEDAKDVPGGGPSSSAPAGAEADGPKASPEARPQIPTKPRVPGKLQELASPPAGRPTPAPRKASESTTPAPPTPRPRSSLQQENLVEQAGSSSLVNGRLHELPVPKPRGTPKPSEGTPAPRKDPPWITLVQAEPKKKPAPLPPSSSPGPPSQDSRQVENGGTEEVAQPSPTASLESKPYNPFEEEEEDKEEEAPAAPSLATSPALGHPESTPKSLHPWYGITPTSSPKTKKRPAPRAPSASPLALHASRLSHSEPPSATPSPALSVESLSSESASQTAGAELLEPPAVPKSSSEPAVHAPGTPGNPVSLSTNSSLASSGELVEPRVEQMPQASPGLAAARGSSGPQPAKPCSGATPTPLLLVGDRSPVPSPGSSSPQLQVKSSCKENPFNRKPSPAASPATKKATKGSKPVRPPAPGHGFPLIKRKVQADQYIPEEDIHGEMDTIERRLDALEHRGVLLEEKLRGGLNEGREDDMLVDWFKLIHEKHLLVRRESELIYVFKQQNLEQRQADVEYELRCLLNKPEKDWTEEDRAREKVLMQELVTLIEQRNAIINCLDEDRQREEEEDKMLEAMIKKKEFQREAEPEGKKKGKFKTMKMLKLLGNKRDAKSKSPRDKS

SEQ ID NO: 4700 - protein, 180 aa, Homo sapiens
MSVLRPLDKLPGLNTATILLVGTEDALLQQLADSMLKEDCASELKVHLAKSLPLPSSVNRPRIDLIVFVVNLHSKYSLQNTEESLRHVDASFFLGKVCFLATGAGRESHCSIHRHTVVKLAHTYQSPLLYCDLEVEGFRATMAQRLVRVLQICAGHVPGVSALNLLSLLRSSEGPSLEDL

SEQ ID NO: 4701 - protein, 126 aa, Homo sapiens
MPFFGNTFSPKKTPPRKSASLSNLHSLDRSTREVELGLEYGSPTMNLAGQSLKFENGQWIAETGVSGGVDRREVQRLRRRNQQLEEENNLLRLKVDILLDMLSESTAESHLMEKELDELRISRKRK

SEQ ID NO: 4702 - protein, 966 aa, Homo sapiens
MFWKFDLNTTSHVDKLLDKEHVTLQELMDEDDILQECKAQNQKLLDFLCRQQCMEELVSLITQDPPLDMEEKVRFKYPNTACELLTCDVPQISDRLGGDESLLSLLYDFLDHEPPLNPLLASFFSKTIGNLIARKTEQVITFLKKKDKFISLVLKHIGTSALMDLLLRLVSCVEPAGLRQDVLHWLNEEKVIQRLVELIHPSQDEDRQSNASQTLCDIVRLGRDQGSQLQEALEPDPLLTALESQDCVEQLLKNMFDGDRTESCLVSGTQVLLTLLETRRVGTEGLVDSFSQGLERSYAVSSSVLHGIEPRLKDFHQLLLNPPKKKAILTTIGVLEEPLGNARLHGARLMAALLHTNTPSINQELCRLNTMDLLLDLFFKYTWNNFLHFQVELCIAAILSHAAREERTEASGSESRVEPPHENGNRSLETPQPAASLPDNTMVTHLFQKCCLVQRILEAWEANDHTQAAGGMRRGNMGHLTRIANAVVQNLERGPVQTHISEVIRGLPADCRGRWESFVEETLTETNRRNTVDLVSTHHLHSSSEDEDIEGAFPNELSLQQAFSDYQIQQMTANFVDQFGFNDEEFADQDDNINAPFDRIAEINFNIDADEDSPSAALFEACCSDRIQPFDDDEDEDIWEDSDTRCAARVMARPRFGAPHASESCSKNGPERGGQDGKASLEAHRDAPGAGAPPAPGKKEAPPVEGDSEGAMWTAVFDEPANSTPTAPGVVRDVGSSVWAAGTSAPEEKGWAKFTDFQPFCCSESGPRCSSPVDTECSHAEGSRSQGPEKASQASYFAVSPASPCAWNVCVTRKAPLLASDSSSSGGSHSEDGDQKAASAMDAVSRGPGREAPPLPTVARTEEAVGRVGCADSRLLSPACPAPKEVTAAPAVAVPPEATVAITTALSKAGPAIPTPAVSSALAVAVPLGPIMAVTAAPAMVATLGTVTKDGKTDAPPEGAALNGPV

SEQ ID NO: 4703 - protein, 108 aa, Homo sapiens [sequence omitted]

SEQ ID NO: 4704 - protein, 669 aa, Homo sapiens
MGTALVYHEDMTATRLLWDDPECEIERPERLTAALDRLRQRGLEQRCLRLSAREASEEELGLVHSPEYVSLVRETQVLGKEELQALSGQFDAIYFHPSTFHCARLAAGAGLQLVDAVLTGAVQNGLALVRPPGHHGQRAAANGFCVFNNVAIAAAHAKQKHGLHRILVVDWDVHHGQGIQYLFEDDPSVLYFSWHRYEHGRFWPFLRESDADAVGRGQGLGFTVNLPWNQVGMGNADYVAAFLHLLLPLAFEFDPELVLVSAGFDSAIGDPEGQMQATPECFAHLTQLLQVLAGGRVCAVLEGGYHLESLAESVCMTVQTLLGDPAPPLSGPMAPCQSALESIQSARAAQAPHWKSLQQQDVTAVPMSPSSHSPEGRPPPLLPGGPVCKAAASAPSSLLDQPCLCPAPSVRTAVALTTPDITLVLPPDVIQQEASALREETEAWARPHESLAREEALTALGKLLYLLDGMLDGQVNSGIAATPASAAAATLDVAVRRGLSHGAQRLLCVALGQLDRPPDLAHDGRSLWLNIRGKEAAALSMFHVSTPLPVMTGGFLSCILGLVLPLAYGFQPDLVLVALGPGHGLQGPHAALLAAMLRGLAGGRVLALLEENSTPQLAGILARVLNGEAPPSLGPSSVASPEDVQALMYLRGQLEPQWKMLQCHPHLVA

SEQ ID NO: 4705 - protein, 576 aa, Homo sapiens
MRGPNSGTEKGRLVIPEKQGFDFLCMPVFHPRFKREFIQEPAKNRPGPQTRSDLLLSGRAFLLPLNQEDNTNLARVLTNHIHTGHHSSMFWMRVPLVAPEDLRDDIIENAPTTHTEEYSGEEKTWMWWHNFRTLCDYSKRIAVALEIGADLPSNHVIDRWLGEPIKAAILPTSIFLTNKKGFPVLSKMHQRLIFRLLKLEVQFIITGTNHHSEKEFCSYLQYLEYLSQNRPPPNAYELFAKGYEDYLQSPLQPLMDNLESQTYEVFEKDPIKYSQYQQAIYKCLLDRVPEEEKDTNVQVLMVLGAGRGPLVNASLRAAKQADRRIKLYAVEKNPNAVVTLENWQFEEWGSQVTVVSSDMREWVAPEKADIIVSELLGSFADNELSPECLDGAQHFLKDDGVSIPGEYTSFLAPISSSKLYNEVRACREKDRDPEAQFEMPYVVRLHNFHQLSAPQPCFTFSHPNRDPMIDNNRYCTLEFPVEVNTVLHGFAGYFETVLYQDITLSIRPETHSPGMFSWFPILFPIKQPITVREGQTICVRFWRCSNSKKVWYEWAVTAPVCSAIHNPTGRSYTIGL

SEQ ID NO: 4706 - protein, 188 aa, Homo sapiens
MEDERSFSDICGGRLALQRRYYSPSCREFCLSCPRLSLRSLTAVTCTVWLAAYGLFTLCENSMILSAAIFITLLGLLGYLHFVKIDQETLLIIDSLGIQMTSSYASGKESTTFIEMGKVKDIVINEAIYMQKVIYYLCILLKDPVEPHGISQVVPVFQSAKPRLDCLIEVYRSCQEILAHQKATSTSP

SEQ ID NO: 4707 - protein, 338 aa, Homo sapiens
MAKWGEGDPRWIVEERADATNVNNWHWTERDASNWSTDKLKTLFLAVQVQNEEGKCEVTEVSKLDGEASINNRKGKLIFFYEWSVKLNWTGTSKSGVQYKGHVEIPNLSDENSVDEVEISVSLAKDEPDTNLVALMKEEGVKLLREAMGIYISTLKTEFTQGMILPTMNGESVDPVGQPALKTEERKAKPAPSKTQARPVGVKIPTCKITLKETFLTSPEELYRVFTTQELVQAFTHAPATLEADRGGKFHMVDGNVSGEFTDLVPEKHIVMKWRFKSWPEGHFATITLTFIDKNGETELCMEGRGIPAPEEERTRQGWQRYYFEGIKQTFGYGARLF

SEQ ID NO: 4708 - protein, 984 aa, Homo sapiens
MIRHAGAPARGDPTGPVPVVGKGEEEEEEDGMRLCLPANPKNCLPHRRGISILEKLIKTCPVWLQLSLGQAEVARILHRVVAGMFLVRRDSSSKQLVLCVHFPSLNESSAEVLEYTIKEEKSILYLEGSALVFEDIFRLIAFYCVSRDLLPFTLRLPQAILEASSFTDLETIANLGLGFWDSSLNPPQERGKPAEPPRDRAPGFPLVSSLRPTAHDANCACEIELSVGNDRLWFVNPIFIEDCSSALPTDQPPLGNCPARPLPPTSDATSPTSRWAPRRPPPPPPVLPLQPCSPAQPPVLPALAPAPACPLPTSPPVPAPHVTPHAPGPPDHPNQPPMMTCERLPCPTAGLGPLREEAMKPGAASSPLQQVPAPPLPAKKNLPTAPPRRRVSERVSLEDQSPGMAAEGDQLSLPPQGTSDGPEDTPRESTEQGQDTEVKASDPHSMPELAAAKQPPVPPPRKKRISRQLASTLPAPLENAELCTQAMALETPTPGPPREGQSPASQAGTQHPPAQATAHSQSSPEFKGSLASLSDSLGVSVMATDQDSYSTSSTEEELEQFSSPSVKKKPSMILGKARHRLSFASFSSMFHAFLSNNRKLYKKVVELAQDKGSYFGSLVQDYKVYSLEMMARQTSSTEMLQEIRTMMTQLKSYLLQSTELKALVDPALHSEEELEAIVESALYKCVLKPLKEAINSCLHQIHSKDGSLQQLKENQLVILATTTTDLGVTTSVPEVPMMEKILQKFTSMHKAYSPEKKISILLKTCKLIYDSMALGNPGKPYGADDFLPVLMYVLARSNLTEMLLNVEYMMELMDPALQLGEGSYYLTTTYGALEHIKSYDKITVTRQLSVEVQDSIHRWERRRTLNKARASRSSVQDFICVSYLEPEQQARTLASRADTQAQALCAQCAEKFAVERPQAHRLFVLVDGRCFQLADDALPHCIKGYLLRSEPKRDFHFVYRPLDGGGGGGGGSPPCLVVREPNFL

SEQ ID NO: 4709 - protein, 435 aa, Homo sapiens
MAESSSESDHFRCRDRLSPWAARSTHRGTRSLPTVEVTEKVNTITSTLQDTSRNLRQVDQMLGRYREYSNGQAGAIEHLKESLEQSIDQLRSQRLLRNSGGRSISVTSLSASDLDGGTGSELHHFPPTSPLKDYGDPQGIKRMRSRTGVRFVQETDDMTQLHGFHQSLRDLSSEQIRLGDDFNRELSRRSRSDAETKRALEELTEKLNEAQKQEVVSDRVERRLQELEREMRTERELVERRQDQLGLMSLQLQEALKKQEAKADEHEGAIKNKLRQTETEKNQLEQELELSRRLLNQSEGSRETLLHQVEELRTQLTKAEGDRKGLQHQVSQISKQQSNYQDEQGEDWRFRRGVEREKQDLEKQMSDLRVQLNFSAMASELEEVKRCMERKDKEKAHLASQVEHINRKCLLNLVQDLDCKDNEILTYSLQSPLHV

SEQ ID NO: 4710 - protein, 451 aa, Homo sapiens
MVSRDQAHLGPKYVGLWDFKSRTDEELSFRAGDVFHVARKEEQWWWATLLDEAGGAVAQGYVPHNYLAERETVESEPWFFGCISRSEAVRRLQAEGNATGAFLIRVSEKPSADYVLSVRDTQAVRHYKIWRRAGGRLHLNEAVSFLSLPELVNYHRAQSLSHGLRLAAPCRKHEPEPLPHWDDWERPREEFTLCRKLGSGYFGEVFEGLWKDRVQVAIKVISRDNLLHQQMLQSEIQAMKKLRHKHILALYAVVSVGDPVYIITELMAKGSLLELLRDSDEKVLPVSELLDIAWQVAEGMCYLESQNYIHRDLAARNILVGENTLCKVGDFGLARLIKEDVYLSHDHNIPYKWTAPEALSRGHYSTKSDVWSFGILLHEMFSRGQVPYPGMSNHEAFLRVDAGYRMPCPLECPPSVHKLMLTCWCRDPEQRPCFKALRERLSSFTSYENPT

SEQ ID NO: 4711 - protein, 129 aa, Homo sapiens
  VARIANT 1: note = X can be any amino acid
XSEVPLPPGALATLSSSCSLGVALHRSSPASRGPGESSLPAFSGVALLPPACKAGLPYNLSRQEGHLTCLSIPDIKTAFSDCTSKIGRRDCLTQACSALTGKGVREGIEWMVKCVVRNVHRPPRQRDIT

SEQ ID NO: 4712 - protein, 615 aa, Homo sapiens
MARACLIQRLPIKRDCTPVFVRGLSSPSAAMALLSEGLDEVPAACLSPCGPPNPTELFSESRRLALEELVAGGPEAFAAFLRRERLARFLNPDEVHAILRAAERPGEEGAAAAAAAEDSFGSSHDCSSGTYFPEQSDLEPPLLELGWPAFYQGAYRGATRVETHFQPRGAGEGGPYGCKDALRQQLRSAREVIAVVMDVFTDIDIFRDLQEICRKQGVAVYILLDQALLSQFLDMCMDLKVHPEQEKLMTVRTITGNIYYARSGTKIIGKVHEKFTLIDGIRVATGSYSFTWTDGKLNSSNLVILSGQVVEHFDLEFRILYAQSKPISPKLLSHFQSSNKFDHLTNRKPQSKELTLGNLLRMRLARLSSTPRKADLDPEMPAEGKAERKPHDCESSTVSEEDYFSSHRDELQSRKAIDAATQTEPGEEMPGLSVSEVGTQTSITTACAGTQTAVITRIASSQTTIWSRSTTTQTDMDENILFPRGTQSTEGSPVSKMSVSRSSSLKSSSSVSSQGSVASSTGSPASIRTTDFHNPGYPKYLGTPHLELYLSDSLRNLNKERQFHFAGIRSRLNHMLAMLSRRTLFTENHLGLHSGNFSRVNLLAVRDVALYPSYQ

SEQ ID NO: 4713 - protein, 289 aa, Homo sapiens
MVGVKPVGSDPDFQPELSGAGSRLAVVKFTMRGCGPCLRIAPAFSSMSNKYPQAVFLEVDVHQCQGTAATNNISATPTFLFFRNKVRIDQYQGADAVGLEEKIKQHLENDPGSNEDTDIPKGYMDLMPFINKAGCECLNESDEHGFDNCLRKDTTFLESDCDEQLLITVAFNQPVKLYSMKFQGPDNGQGPKYVKIFINLPRSMDFEEAERSEPTQALELTEDDIKEDGIVPLRYVKFQNVNSVTIFVQSNQGEEETTRISYFTFIGTPVQATNMNDFKRVVGKKGESH

SEQ ID NO: 4714 - protein, 171 aa, Homo sapiens
MSSKRTKTKTKKRPQRATSNVFAMFDQSQIQEFKEAFNMIDQNRDGFIDKEDLHDMLASLGKNPTDEYLDAMMNEAPGPINFTMFLTMFGEKLNGTDPEDVIRNAFACFDEEATGTIQEDYLRELLTTMGDRFTDEEVDELYREAPIDKKGNFNYIEFTRILKHGAKDKDD

SEQ ID NO: 4715 - protein, 226 aa, Homo sapiens
MEGCVSNLMVCNLAYSGKLEELKESILADKSLATRTDQDSRTALHWACSAGHTEIVEFLLQLGVPVNDKDDAGWSPLHIAASAGRDEIVKALLGKGAQVNAVNQNGCTPLHYAASKNRHEIAVMLLEGGANPDAKDHYEATAMHRAAAKGNLKMIHILLYYKASTNIQDTEGNTPLHLACDEERVEEAKLLVSQGASIYIENKEEKTPLQVAKGGLGLILKRMVEG

SEQ ID NO: 4716 - protein, 742 aa, Homo sapiens
MSPQKRVKNVQAQNRTSQGSSSFQTTLSAWKVKQDPSNSKNISKHGQNNPVGDYEHADDQAEEDALQMAVGYFEKGPIKASQNKDKTLEKHLKTVENVAWKNGLASEEIDILLNIALSGKFGNAVNTRILKCMIPATVISEDSVVKAVSWLCVGKCSGSTKVLFYRWLVAMFDFIDRKEQINLLYGFFFASLQDDALCPYVCHLLYLLTKKENVKPFRVRKLLDLQAKMGMQPHLQALLSLYKFFAPALISVSLPVRKKIYFKNSENLWKTALLAVKQRNRGPSPEPLKLMLGPANVRPLKRKWNSLSVIPVLNSSSYTKECGKKEMSLSDCLNRSGSFPLEQLQSFPQLLQNIHCLELPSQMGSVLNNSLLLHYINCVRDEPVLLRFYYWLSQTLQEECIWYKVNNYEHGKEFTNFLDTIIRAECFLQEGFYSCEAFLYKSLPLWDGLCCRSQFLQLVSWIPFSSFSEVKPLLFDHLAQLFFTSTIYFKCSVLQSLKELLQNWLLWLSMDIHMKPVTNSPLETTLGGSMNSVSKLIHYVGWLSTTAMRLESNNTFLLHFILDFYEKVCDIYINYNLPLVVLFPPGIFYSALLSLDTSILNQLCFIMHRYRKNLTAAKKNELVQKTKSEFNFSSKTYQEFNHYLTSMVGCLWTSKPFGKGIYIDPEILEKTGVAEYKNSLNVVHHPSFLSYAVSFLLQGKKWSWYLDYLFSQGLQGLKLFIRSSVHHSSIPRAEGINCNNQY

SEQ ID NO: 4717 - protein, 127 aa, Homo sapiens
MGDKPIWEQIGSSFIQHYYQLFDNDRTQLGAIYIDASCLTWEGQQFQGKAAIVEKLSSLPFQKIQHSITAQDHQPTPDSCIISMVVGQLKADEDPIMGFHQMFLLKNINDAWVCTNDMFRLALHNFG

SEQ ID NO: 4718 - protein, 163 aa, Homo sapiens
MDALEGESFALSFSSASDAEFDAVVGYLEDIIMDDEFQLLQRNFMDKYYLEFEDTEENKLIYTPIFNEYISLVEKYIEEQLLQRIPEFNMAAFTTTLQHHKDEVAGDIFDMLLTFTDFLAFKEMFLDYRAEKEGRGLDLSSGLVVTSLCKSSSLPASQNNLRH

SEQ ID NO: 4719 - protein, 225 aa, Homo sapiens
MLGLDACELGAQLLELLRLALCARVLLADKEGGPPAVDEVLDEAVPEYRAPGRKSLLEIRQLDPDDRSLAKYKRVLLGPLPPAVDPSLPNVQVTRLTLLSEQAPGPVVMDLTGDLAVLKDQVFVLKEGVDYRVKISFKVHREIVSGLKCLHHTYRRGLRVDKTVYMVGSYGPSAQEYEFVTPVEEAPRGALVRGPYLVVSLFTDDDRTHHLSWEWGLCICQDWKD

SEQ ID NO: 4720 - protein, 234 aa, Homo sapiens
MEEETHTDAKIRAENGTGSSPRGPGCSLRHFACEQNLLSRPDGSASFLQGDTSVLAGVYGPAEVKVSKEIFNKATLEVILRPKIGLPGVAEKSRERLIRNTCEAVVLGTLHAASITVVLQVVSDAGSLLACCLNAACMALVDAGVPMRALFCGVACALDSDGTLVLDPTSKQEKEARAVLTFALDSVERKLLMSSTKGLYSDTELQQCLAAAQAASQHVFRFYRESLQRRYSKS

SEQ ID NO: 4721 - protein, 402 aa, Homo sapiens
MPWKLWRGSVGCPGDLSSDGLLFRLGPPKPPTELEPEPEIEGLLTPVLEAGDVDEGPVARPLSPTRLQPALPPEAQSVPELEEVARVLAEIPRPLKRRGSMEQAPAVALPPTHKKQYQQIISRLFHRHGGPGPGGPEPELSPITEGSEARAGPPAPAPPAPIPPPAPSQSSPPEQPQSMEMRSVLRKAGSPRKARRARLNPLVLLLDAALTGELEVVQQAVKEMNDPSQPNEEGITALHNAICGANYSIVDFLITAGANVNSPDSHGWTPLHCAASCNDTVICMALVQHGAAIFATTLSDGATAFEKCDPYREGYADCATYLADVEQSMGLMNSGAVYALWDYSAEFGDELSFREGESVTVLRRDGPEETDWWWAALHGQEGYVPRNYFGLFPRVKPQRSKV

SEQ ID NO: 4722 - protein, 496 aa, Homo sapiens
MDDVPAPTPAPAPPAAAAPRVPFHCSECGKSFRYRSDLRRHFARHTALKPHACPRCGKGFKHSFNLANHLRSHTGERPYRCSACPKGFRDSTGLLHHQVVHTGEKPYCCLVCELRFSSRSSLGRHLKRQHRGVLPSPLQPGPGLPALSAPCSVCCNVGPCSVCGGSGAGGGEGPEGAGAGLGSWGLAEAAAAAAASLPPFACGACARRFDHGRELAAHWAAHTDVKPFKCPRCERDFNAPALLERHKLTHDLQGPGAPPAQAWAAGPGAGPETAGEGTAAEAGDAPLASDRRLLLGPAGGGVPKLGGLLPEGGGEAPAPAAAAEPSEDTLYQCDCGTFFASAAALASHLEAHSGPATYGCGHCGALYAALAALEEHRRVSHGEGGGEEAATAAREREPASGEPPSGSGRGKKIFGCSECEKLFRSPRDLERHVLVHTGEKPFPCLECGKFFRHECYLKRHRLLHGTERPFPCHICGKGFITLSNLSRHLKLHRGMD

SEQ ID NO: 4723 - protein, 657 aa, Homo sapiens
MASARKASRPMRDVFGDFSDVSLEDSTMEEIRNFQISRNLTKIAPGHSRFLKRNQTLDEKHLLLKENPVLGSGPRLASCRPPTTASRIRANAALMKLAQLETRIMNRKLQRNLSDTESDSMTADAGLPKRADRILSGGALELASQNTDKTSQNQARELPVTENNAQNAKVSRFLKKKQAPVENISPEAPAGKERTLQTPKQKEPARTFDSPDSDEEEMKVLLGSLMDSSREKNTNQGFSSANVSEEEERKLFSVPSQLRAFTVPSVELSSAKPSQTSHLPTSLAADRTLHSTRSRADYPQSHVSSDTASHTPSVSITGAFSNSVSLKMGHVKLVSSPGRSEAETVDEPVSEGADDSLDEFRINILSLDGLAPAVSENSDLEQEEESAQRQKTAGKIFRAEASTGQDAPRQAQARSWASQGKAASAEGDESEVSEHLSASSASAIQQDSTSSMQPPSEAPMVNTVSSAYSEDFENSPSLTASEPTAHSKESLDRTLDALSESSSSVKTDLPQTAESRKKSGRHVTRVLVKDTAVQTPDPAFTYEWTKVASMAAMGPALGGAYVDPTPIANHVISADAIEALTAYSPAVLALHDVLKQQLSLTQQFIQASRHLHASLLRSLDADSFHYHTLEEAKEYIRCHRPAPLTMEDALEEVNKEL

SEQ ID NO: 4724 - protein, 125 aa, Homo sapiens
MADEELEALRRQRLAELQAKHGDPGDAAQQEAKHREAEMRNSILAQVLDQSARARLSNLALVKPEKTKAVENYLIQMARYGQLSEKVSEQGLIEILKKVSQQTEKTTTVKFNRRKVMDSDEDDDY

SEQ ID NO: 4725 - protein, 244 aa, Homo sapiens
MEVTGVSAPTVTVFISSSLNTFRSEKRYSRSLTIAEFKCKLELLVGSPASCMELELYGVDDKFYSKLDQEDALLGSYPVDDGCRIHVIDHSGARLGEYEDVSRVEKYTISQEAYDQRQDTVRSFLKRSKLGRYNEEERAQQEAEAAQRLAEEKAQASSIPVGSRCEVRAAGQSPRRGTVMYVGLTDFKPGYWIGVRYDEPLGKNDGSVNGKRYFECQAKYGAFVKPAVVTVGDFPEEDYGLDEI

SEQ ID NO: 4726 - protein, 378 aa, Homo sapiens
MVDYSVWDHIEVSDDEDETHPNIDTASLFRWRHQARVERMEQFQKEKEELDRGCRECKRKVAECQRKLKELEVAEGGKAELERLQAEAQQLRKEERSWEQKLEEMRKKEKSMPWNVDTLSKDGFSKSMVNTKPEKTEEDSEEVREQKHKTFVEKYEKQIKHFGMLRRWDDSQKYLSDNVHLVCEETANYLVIWCIDLEVEEKCALMEQVAHQTIVMQFILELAKSLKVDPRACFRQFFTKIKTADRQYMEGFNDELEAFKERVRGRAKLRIEKAMKEYEEEERKKRLGPGGLDPVEVYESLPEELQKCFDVKDVQMLQDAISKMDPTDAKYHMQRCIDSGLWVPNSKASEAKEGEEAGPGDPLLEAVPKTGDEKDVSV

SEQ ID NO: 4727 - protein, 483 aa, Homo sapiens
MSGGGPSGGGPGGSGRARTSSFAEPGGGGGGGGGGPGGSASGPGGTGGGKASVGAMGGGVGASSSGGGPGGSGGGGSGGPGAGTSFPPPGVKLGRDSGKVTTVVATLGQGPERSQEVAYTDIKVIGNGSFGVVYQARLAETRELVAIKKVLQDKRFKNRELQIMRKLDHCNIVRLRYFFYSSGEKKDELYLNLVLEYVPETVYRVARHFTKAKLTIPILYVKVYMYQLFRSLAYIHSQGVCHRDIKPQNLLVDPDTAVLKLCDFGSAKQLVRGEPNVSYICSRYYRAPELIFGATDYTSSIDVWSAGCVLAELLLGQPIFPGDSGVDQLVEIIKVLGTPTREQIREMNPNYTEFKFPQIKAHPWTKVFKSRTPPEAIALCSSLLEYTPSSRLSPLEACAHSFFDELRCLGTQLPNNRPLPPLFNFSAGELSIQPSLNAILIPPHLRSPAGTTTLTPSSQALTETPTSSDWQSTDATPTLTNSS

SEQ ID NO: 4728 - protein, 320 aa, Homo sapiens
MPMYQVKPYHGGGAPLRVELPTCMYRLPNVHGRSYGPAPGAGHVQEESNLSLQALESRQDDILKRLYELKAAVDGLSKMIQTPDADLDVTNIIQADEPTTLTTNALDLNSVLGKDYGALKDIVINANPASPPLSLLVLHRLLCEHFRVLSTVHTHSSVKSVPENLLKCFGEQNKKQPRQDYQLGFTLIWKNVPKTQMKFSIQTMCPIEGEGNIARFLFSLFGQKHNAVNATLIDSWVDIAIFQLKEGSSKEKAAVFRSMNSALGKSPWLAGNELTVADVVLWSVLQQIGGCSVTVPANVQRWMRSCENLAPFNTALKLLK

SEQ ID NO: 4729 - protein, 148 aa, Homo sapiens
MAESDWDTVTVLRKKGPTAAQAKSKQAILAAQRRGEDVETSKKWAAGQNKQHSITKNTAKLDRETEELHHDRVTLEVGKVIQQGRQSKGLTQKDLATKINEKPQVIADYESGRAIPNNQVLGKIERAIGLKLRGKDIGKPIEKGPRAK

SEQ ID NO: 4730 - protein, 518 aa, Homo sapiens
MAFWAGGSPSVVDYFPSEDFYRCGYCKNESGSRSNGMWAHSMTVQDYQDLIDRGWRRSGKYVYKPVMNQTCCPQYTIRCRPLQFQPSKSHKKVLKKMLKFLAKGEVPKGSCEDEPMDSTMDDAVAGDFALINKLDIQCDLKTLSDDIKESLESEGKNSKKEEPQELLQSQDFVGEKLGSGEPSHSVKVHTVPKPGKGADLSKPPCRKAKEIRKERKRLKLMQQNPAGELEGFQAQGHPPSLFPPKAKSNQPKSLEDLIFESLPENASHKLEVRVVRSSPPSSQFKATLLESYQVYKRYQMVIHKNPPDTPTESQFTRFLCSSPLEAETPPNGPDCGYGSFHQQYWLDGKIIAVGVIDILPNCVSSVYLYYDPDYSFLSLGVYSALREIAFTRQLHEKTSQLSYYYMGFYIHSCPKMKYKGQYRPSDLLCPETYVWVPIEQCLPSLENSKYCRFNQDPEAVDEDRSTEPDRLQVFHKRAIMPYGVYKKQQKDPSEEAAVLQYASLVGQKCSERMLLFRN

SEQ ID NO: 4731 - protein, 300 aa, Homo sapiens
MEPPMEPSGGEQEPGAVRFLDLPWEDVLLPHVLNRVPLRQLLRLQRVSRAFRSLVQLHLAGLRRFDAAQVGPQIPRAALARLLRDAEGLQELALAPCHEWLSDEDLVPVLARNPQLRSVALGGCGQLSRRALGALAEGCPRLQRLSLAHCDWVDGLALRGLADRCPALEELDLTACRQLKDEAIVYLAQRRGAGLRSLSLAVNANVGDAAVQELARNCPELHHLDLTGCLRVGSDGVRTLAEYCPVLRSLRVRHCHHVAESSLSRLRKRGVDIDVEPPLHQALVLLQDMAGFAPFVNLQV

SEQ ID NO: 4732 - protein, 478 aa, Homo sapiens
MAARPITLGIDLGTTSVKAALLRAAPDDPSGFAVLASCARAARAEAAVESAVAGPQGREQDVSRILQALHECLAALPRPQLRSVVGIGVSGQMHGVVFWKTGQGCEWTEGGITPVFEPRAVSHLVTWQDGRCSSEFLASLPQPKSHLSVATGFGCATIFWLLKYRPEFLKSYDAAGTIHDYVVAMLCGLPRPLMSDQNAASWGYFNTQSQSWNVETLRSSGFPVHLLPDIAEPGSVAGRTSHMWFEIPKGTQVGVALGDLQASVYSCMAQRTDAVLNISTSVQLAASMPSGFQPAQTPDPTAPVAYFPYFNRTYLGVAASLNGGNVLATFVHMLVQWMADLGLEVEESTVYSRMIQAAVQQRDTHLTITPTVLGERHLPDQLASVTRISSSDLSLGHVTRALCRGIVQNLHSMLPIQQLQDWGVERVMGSGSALSRNDVLKQEVQRAFPLPMSFGQDVDAAVGAALVMLRRHLNQKES

SEQ ID NO: 4733 - protein, 124 aa, Homo sapiens
MSYIPGQPVTAVVQRVEIHKLRQGENLILGFSIGGGIDQDPSQNPFSEDKTDKGIYVTRVSEGGPAEIAGLQIGDKIMQVNGWDMTMVTHDQARKRLTKRSEEVVRLLVTRQSLQKAVQQSMLS

SEQ ID NO: 4734 - protein, 185 aa, Homo sapiens
MGKKQNKKKVEEVLEEEEEEYVVEKVLDRRVVKGKVEYLLKWKGFSDEDNTWEPEENLDCPDLIAEFLQSQKTAHETDKSEGGKRKADSDSEDKGEESKPKKKKEESEKPRGFARGLEPERIIGATDSSGELMFLMKWKNSDEADLVPAKEANVKCPQVVISFYEERLTWHSYPSEDDDKKDDKN

SEQ ID NO: 4735 - protein, 366 aa, Homo sapiens
MAELQQLQEFEIPTGREALRGNHSALLRVADYCEDNYVQATDKRKALEETMAFTTQALASVAYQVGNLAGHTLRMLDLQGAALRQVEARVSTLGQMVNMHMEKVARREIGTLATVQRLPPGQKVIAPENLPPLTPYCRRPLNFGCLDDIGHGIKDLSTQLSRTGTLSRKSIKAPATPASATLGRPPRIPEPVHLPVVPDGRLSAASSAFSLASAGSAEGVGGAPTPKGQAAPPAPPLPSSLDPPPPPAAVEVFQRPPTLEELSPPPPDEELPLPLDLPPPPPLDGDELGLPPPPPGFGPDEPSWVPASYLEKVVTLYPYTSQKDNELSFSEGTVICVTRRYSDGWCEGVSSEGTGFFPGNYVEPSC

SEQ ID NO: 4736 - protein, 186 aa, Homo sapiens [sequence omitted]

SEQ ID NO: 4737 - protein, 519 aa, Homo sapiens
MFLLPLPAAGRVVVRRLAVRRFGSRSLSTADMTKGLVLGIYSKEKEDDVPQFTSAGENFDKLLAGKLRETLNISGPPLKAGKTRTFYGLHQDFPSVVLVGLGKKAAGIDEQENWHEGKENIRAAVAAGCRQIQDLELSSVEVDPCGDAQAAAEGAVLGLYEYDDLKQKKKMAVSAKLYGSGDQEAWQKGVLFASGQNLARQLMETPANEMTPTRFAEIIEKNLKSASSKTEVHIRPKSWIEEQAMGSFLSVAKGSDEPPVFLEIHYKGSPNANEPPLVFVGKGITFDSGGISIKASANMDLMRADMGGAATICSAIVSAAKLNLPINIIGLAPLCENMPSGKANKPGDVVRAKNGKTIQVDNTDAEGRLILADALCYAHTFNPKVILNAATLTGAMDVALGSGATGVFTNSSWLWNKLFEASIETGDRVWRMPLFEHYTRQVVDCQLADVNNIGKYRSAGACTAAAFLKEFVTHPKWAHLDIAGVMTNKDEVPYLRKGMTGRPTRTLIEFLLRFSQDNA

SEQ ID NO: 4738 - protein, 842 aa, Homo sapiens
MKRGRLPSSSEDSDDNGSLSTTWSQNSRSQHRRSSCSRHEDRKPSEVFRTDLITAMKLHDSYQLNPDEYYVLADPWRQEWEKGVQVPVSPGTIPQPVARVVSEEKSLMFIRPKKYIVSSGSEPPELGYVDIRTLADSVCRYDLNDMDAAWLELTNEEFKEMGMPELDEYTMERVLEEFEQRCYDNMNHAIETEEGLGIEYDEDVVCDVCQSPDGEDGNEMVFCDKCNICVHQACYGILKVPEGSWLCRTCALGVQPKCLLCPKKGGAMKPTRSGTKWVHVSCALWIPEVSIGSPEKMEPITKVSHIPSSRWALVCSLCNEKFGASIQCSVKNCRTAFHVTCAFDRGLEMKTILAENDEVKFKSYCPKHSSHRKPEESLGKGAAQENGAPECSPRNPLEPFASLEQNREEAHRVSVRKQKLQQLEDEFYTFVNLLDVARALRLPEEVVDFLYQYWKLKRKVNFNKPLITPKKDEEDNLAKREQDVLFRRLQLFTHLRQDLERVRNLTYMVTRREKIKRSVCKVQEQIFNLYTKLLEQERVSGVPSSCSSSSLENMLLFNSPSVGPDAPKIEDLKWHSAFFRKQMGTSLVHSLKKPHKRDPLQNSPGSEGKTLLKQPDLCGRREGMVVPESFLGLEKTFAEARLISAQQKNGVVMPDHGKRRDNRFHCDLIKGDLKDKSFKQSHKPLRSTDVSQRHLDNTRAATSPGVGQSAPGTRKEIVPKCNGSLIKVNYNQTAVKVPTTPASPVKNWGGFRIPKKGERQQQGEAHDGACHQHSDYPYLGLGRVPAKERAKSKLKSDNENDGYVPDVEMSDSESEASEKKCIHTSSTISRRTDIIRRSILAS

SEQ ID NO: 4739 - protein, 294 aa, Homo sapiens
MNSELDYYEKFEEVHGILMYKDFVKYWDNVEAFQARPDDLVIATYPKSGTTWVSEIVYMIYKEGDVEKCKEDVIFNRIPFLECRKENLMNGVKQLDEMNSPRIVKTHLPPELLPASFWEKDCKIIYLCRNAKDVAVSFYYFFLMVAGHPNPGSFPEFVEKFMQGQVPYGSWYKHVKSWWEKGKSPRVLFLFYEDLKEDIRKEVIKLIHFLERKPSEELVDRIIHHTSFQEMKNNPSTNYTTLPDEIMNQKLSPFMRKGITGDWKNHFTVALNEKFDKHYEQQMKESTLKFRTEI

SEQ ID NO: 4740 - protein, 151 aa, Homo sapiens
MSIPFSNTHYRIPQGFGNLLEGLTREILREQPDNIPAFAAAYFESLLEKREKTNFDPAEWGSKVEDRFYNNHAFEEQEPPEKSDPKQEESQISGKEEETSVTILDSSEEDKEKEEVAAVKIQAAFRGHIAREEAKKMKTNSLQNEEKEENK

SEQ ID NO: 4741 - protein, 459 aa, Homo sapiens
MAASGAVEPGPPGAAVAPSPAPAPPPAPDHLFRPISAEDEEQQPTEIESLCMNCYCNGMTRLLLTKIPFFREIIVSSFSCEHCGWNNTEIQSAGRIQDQGVRYTLSVRALEDMNREVVKTDSAATRIPELDFEIPAFSQKGALTTVEGLITRAISGLEQDQPARRANKDATAERIDEFIVKLKELKQVASPFTLIIDDPSGNSFVENPHAPQKDDALVITHYNRTRQQEEMLGLQEEAPAEKPEEEDLRNEVLQFSTNCPECNAPAQTNMKLVQIPHFKEVIIMATNCENCGHRTNEVKSGGAVEPLGTRITLHITDASDMTRDLLKSETCSVEIPELEFELGMAVLGGKFTTLEGLLKDIRELVTKNPFTLGDSSNPGQTERLQEFSQKMDQIIEGNMKAHFIMDDPAGNSYLQNVYAPEDDPEMKVERYKRTFDQNEELGLNDMKTEGYEAGLAPQR

SEQ ID NO: 4742 - protein, 619 aa, Homo sapiens
MLLASAVVVWEWLNEHGRWRPYSPAVSHHIEAVVRAGPRAGGSVVLGQVDSRLAPYIIDLQSMNQFRQDTGTLRPVRRNYYDPSSAPGKGVVWEWENDNGSWTPYDMEVGITIQHAYEKQHPWIDLTSIGFSYVIDFNTMGQINRQTQRQRRVRRRLDLIYPMVTGTLPKAQSWPVSPGPATSPPMSPCSCPQCVLVMSVKAAVVNGSTGPLQLPVTRKNMPPPGVVKLPPLPGSGAKPLDSTGTIRGPLKTAPSQVIRRQASSMPTGTTMGSPASPPGPNSKTGRVALATLNRTNLQRLAIAQSRVLIASGVPTVPVKNLNGSSPVNPALAGITGILMSAAGLPVCLTRPPKLVLHPPPVSKSEIKSIPGVSNTSRKTTKKQAKKGKTPEEVLKKYLQKVRHPPDEDCTICMERLTAPSGYKGPQPTVKPDLVGKLSRCGHVYHIYCLVAMYNNGNKDGSLQCPTCKTIYGVKTGTQPPGKMEYHLIPHSLPGHPDCKTIRIIYSIPPGIQGPEHPNPGKSFSARGFPRHCYLPDSEKGRKVLKLLLVAWDRRLIFAIGTSSTTGESDTVIWNEVHHKTEFGSNLTGHGYPDANYLDNVLAELAAQGISEDSTAQEKD

SEQ ID NO: 4743 - protein, 178 aa, Homo sapiens [sequence omitted]

SEQ ID NO: 4744 - protein, 853 aa, Homo sapiens
MSEKVDWLQSQNGVCKVDVYSPGDNQAQDWKMDTSTDPVRVLSWLRRDLEKSTAEFQDVRFKPGESFGGETSNSGDPHKGFSVDYYNTTTKGTPERLHFEMTHKEIPCQGPRAQLGNGSSVDEVSFYANRLTNLVIAMARKEINEKIDGSENKCVYQSLYMGNEPTPTKSLSKIASELVNETVSACSRNAAPDKAPGSGDRVSGSSQSPPNLKYKSTLKIKESTKERQGPDDKPPSKKSFFYKEVFESRNGDYAREGGRFFPRERKRFRGQERPDDFTASVSEGIMTYANSVVSDMMVSIMKTLKIQVKDTTIATILLKKVLLKHAKEVVSDLIDSFLRNLHSVTGTLMTDTQFVSAVKRTVFSHGSQKATDIMDAMLRKLYNVMFAKKVPEHVRKAQDKAESYSLISMKGMGDPKNRNVNFAMKSETKLREKMYSEPKSEEETCAKTLGEHIIKEGLTLWHKTQQKECKSLGFQHAAFEAPNTQRKPASDISFEYPEDIGNLSLPPYPPEKPENFMYDSDSWAEDLIVSALLLIQYHLAQGGRRDARSFVEAAGTTNFPANEPPVAPDESCLKSAPIVGDQEQAEKKDLRSVFFNFIRNLLSETIFKRDQSPEPKVPEQPVKEDRKLCERPLASSPPRLYEDDETPGALSGLTKMAVSQIDGHMSGQMVEHLMNSVMKLCVIIAKSCDASLAELGDDKSGDASRLTSAFPDSLYECLPAKGTGSAEAVLQNAYQAIHNEMRGTSGQPPEGCAAPTVIVSNHNLTDTVQNKQLQAVLQWVAASELNVPILYFAGDDEGIQEKLLQLSAAAVDKGCSVGEVLQSVLRYEKERQLNEAVGNVTPLQLLDWLMVNL

SEQ ID NO: 4745 - protein, 665 aa, Homo sapiens
MAHEMIGTQIVTERLVALLESGTEKVLLIDSRPFVEYNTSHILEAININCSKLMKRRLQQDKVLITELIQHSAKHKVDIDCSQKVVVYDQSSQDVASLSSDCFLTVLLGKLEKSFNSVHLLAGGFAEFSRCFPGLCEGKSTLVPTCISQPCLPVANIGPTRILPNLYLGCQRDVLNKELMQQNGIGYVLNASNTCPKPDFIPESHFLRVPVNDSFCEKILPWLDKSVDFIEKAKASNGCVLVHCLAGISRSATIAIAYIMKRMDMSLDEAYRFVKEKRPTISPNFNFLGQLLDYEKKIKNQTGASGPKSKLKLLHLEKPNEPVPAVSEGGQKSETPLSPPCADSATSEAAGQRPVHPASVPSVPSVQPSLLEDSPLVQALSGLHLSADRLEDSNKLKRSFSLDIKSVSYSASMAASLHGFSSSEDALEYYKPSTTLDGTNKLCQFSPVQELSEQTPETSPDKEEASIPKKLQTARPSDSQSKRLHSVRTSSSGTAQRSLLSPLHRSGSVEDNYHTSFLFGLSTSQQHLTKSAGLGLKGWHSDILAPQTSTPSLTSSWYFATESSHFYSASAIYGGSASYSAYSCSQLPTCGDQVYSVRRRQKPSDRADSRRSWHEESPFEKQFKRRSCQMEFGESIMSENRSREELGKVGSQSSFSGSMEIIEVS

SEQ ID NO: 4746 - protein, 275 aa, Homo sapiens
MSAEVKVTGQNQEQFLLLAKSAKGAALATLIHQVLEAPGVYVFGELLDMPNVRELAESDFASTFRLLTVFAYGTYADYLAEARNLPPLTEAQKNKLRHLSVVTLAAKVKCIPYAVLLEALALRNVRQLEDLVIEAVYADVLRGSLDQRNQRLEVDYSIGRDIQRQDLSAIARTLQEWCVGCEVVLSGIEEQVSRANQHKEQQLGLKQQIESEVANLKKTIKVTTAAAAAATSQDPEQHLTELREPAPGTNQRQPSKKASKGKGLRGSAKIWSKSN

SEQ ID NO: 4747 - protein, 253 aa, Homo sapiens
MSCTIEKALADAKALVERLRDHDDAAESLIEQTTALNKRVEAMKQYQEEIQELNEVARHRPRSTLVMGIQQENRQIRELQQENKELRTSLEEHQSALELIMSKYREQMFRLLMASKKDDPGIIMKLKEQHSKIDMVHRNKSEGFFLDASRHILEAPQHGLERRHLEANQNELQAHVDQITEMAAVMRKAIEIDEQQGCKEQERIFQLEQENKGLREILQITRESFLNLRKDDASESTSLSALVTNSDLSLRKS

SEQ ID NO: 4748 - protein, 140 aa, Homo sapiens
MTSMTQSLREVIKAMTKARNFERVLGKITLVSAAPGKVICEMKVEEEHTNAIGTLHGGLTATLVDNISTMALLCTERGAPGVSVDMNITYMSPAKLGEDIVITAHVLKQGKTLAFTSVDLTNKATGKLIAQGRHTKHLGN

SEQ ID NO: 4749 - protein, 209 aa, Homo sapiens
MNPSMKQKQEEIKENIKNSSVPRRTLKMIQPSASGSLVGRENELSAGLSKRKHRNDHLTSTTSSPGVIVPESSENKNLGGVTQESFDLMIKENPSSQYWKEVAEKRRKALYEALKENEKLHKEIEQKDNEIARLKKENKELAEVAEHVQYMAELIERLNGEPLDNFESLDNQEFDSEEETVEDSLVEDSEIGTCAEGTVSSSTDAKPCI

SEQ ID NO: 4750 - protein, 174 aa, Homo sapiens
MAAAMVPGRSESWERGEPGRPALYFCGSIRGGREDRTLYERIVSRLRRFGTVLTEHVAAAELGARGEEAAGGDRLIHEQDLEWLQQADVVVAEVTQPSLGVGYELGRAVAFNKRILCLFRPQSGRVLSAMIRGAADGSRFQVWDYEEGEVEALLDRYFEADPPGQVAASPDPTT

SEQ ID NO: 4751 - protein, 462 aa, Homo sapiens
MSSVKRSLKQEIVTQFHCSAAEGDIAKLTGILSHSPSLLNETSENGWTALMYAARNGHPEIVQFLLEKGCDRSIVNKSRQTALDIAVFWGYKHIANLLATAKGGKKPWFLTNEVEECENYFSKTLLDRKSEKRNNSDWLLAKESHPATVFILFSDLNPLVTLGGNKESFQQPEVRLCQLNYTDIKDYLAQPEKITLIFLGVELEIKDKLLNYAGEVPREEEDGLVAWFALGIDPIAAEEFKQRHENCYFLHPPMPALLQLKEKEAGVVAQARSVLAWHSRYKFCPTCGNATKIEEGGYKRLCLKEDCPSLNGVHNTSYPRVDPVVIMQVIHPDGTKCLLGRQKRFPPGMFTCLAGFIEPGETIEDAVRREVEEESGVKVGHVQYVACQPWPMPSSLMIGCLALAVSTEIKVDKNEIEDARWFTREQVLDVLTKGKQQAFFVPPSRAIAHQLIKHWIRINPNL

SEQ ID NO: 4752 - protein, 215 aa, Homo sapiens
MNLVGSYAHHHHHHHPHPAHPMLHEPFLFGPASRCHQERPYFQSWLLSPADAAPDFPAGGPPPAAAAAATAYGPDARPGQSPGRLEALGGRLGRRKGSGPKKERRRTESINSAFAELRECIPNVPADTKLSKIKTLRLATSYIAYLMDVLAKDAQSGDPEAFKAELKKADGGRESKRKRELQQHEGFPPALGPVEKRIKGRTGWPQQVWALELNQ

SEQ ID NO: 4753 - protein, 298 aa, Homo sapiens
MWGACKVKVHDSLATISITLRRYLRLGATMAKSKFEYVRDFEADDTCLAHCWVVVRLDGRNFHRFAEKHNFAKPNDSRALQLMTKCAQTVMEELEDIVIAYGQSDEYSFVFKRKTNWFKRRASKFMTHVASQFASSYVFYWRDYFEDQPLLYPPGFDGRVVVYPSNQTLKDYLSWRQADCHINNLYNTVFWALIQQSGLTPVQAQGRLQGTLAADKNEILFSEFNINYNNELPMYRKGTVLIWQKVDEVMTKEIKLPTEMEGKKMAVTRTRTKPVPLHCDIIGDAFWKEHPEILDEDS

SEQ ID NO: 4754 - protein, 574 aa, Homo sapiens
MATLVVNKLGAGVDSGRQGSRGTAVVKVLECGVCEDVFSLQGDKVPRLLLCGHTVCHDCLTRLPLHGRAIRCPFDRQVTDLGDSGVWGLKKNFALLELLERLQNGPIGQYGAAEESIGISGESIIRCDEDEAHLASVYCTVCATHLCSECSQVTHSTKTLAKHRRVPLADKPHEKTMCSQHQVHAIEFVCLEEGCQTSPLMCCVCKEYGKHQGHKHSVLEPEANQIRASILDMAHCIRTFTEEISDYSRKLVGIVQHIEGGEQIVEDGIGMAHTEHVPGTAENARSCIRAYFYDLHETLCRQEEMALSVVDAHVREKLIWLRQQQEDMTILLSEVSAACLHCEKTLQQDDCRVVLAKQEITRLLETLQKQQQQFTEVADHIQLDASIPVTFTKDNRVHIGPKMEIRVVTLGLDGAGKTTILFKLKQDEFMQPIPTIGFNVETVEYKNLKFTIWDVGGKHKLRPLWKHYYLNTQAVVFVVDSSHRDRISEAHSELAKLLTEKELRDALLLIFANKQDVAGALSVEEITELLSLHKLCCGRSWYIQGCDARSGMGLYEGLDWLSRQLVAAGVLDVA

SEQ ID NO: 4755 - protein, 440 aa, Homo sapiens
MGDLELLLPGEAEVLVRGLRSFPLREMGSEGWNQQHENLEKLNMQAILDATVSQGEPIQELLVTHGKVPTLVEELIAVEMWKQKVFPVFCRVEDFKPQNTFPIYMVVHHEASIINLLETVFFHKEVCESAEDTVLDLVDYCHRKLTLLVAQSGCGGPPEGEGSQDSNPMQELQKQAELMEFEIALKALSVLRYITDCVDSLSLSTLSRMLSTHNLPCLLVELLEHSPWSRREGGKLQQFEGSRWHTVAPSEQQKLSKLDGQVWIALYNLLLSPEAQARYCLTSFAKGRLLKLRAFLTDTLLDQLPNLAHLQSFLAHLTLTETQPPKKDLVLEQIPEIWERLERENRGKWQAIAKHQLQHVFSPSEQDLRLQARRWAETYRLDVLEAVAPERPRCAYCSAEASKRCSRCQNEWYCCRECQVKHWEKHGKTCVLAAQGDRAK

SEQ ID NO: 4756 - protein, 338 aa, Homo sapiens
MELWGRMLWALLSGPGRRGSTRGWAFSSWQPQPPLAGLSSAIELVSHWTGVFEKRGIPEARESSEYIVAHVLGAKTFQSLRPALWTQPLTSQQLQCIRELSSRRLQRMPVQYILGEWDFQGLSLRMVPPVFIPRPETEELVEWVLEEVAQRSHAVGSPGSPLILEVGCGSGAISLSLLSQLPQSRVIAVDKREAAISLTHENAQRLRLQDRIWIIHLDMTSERSWTHLPWGPMDLIVSNPPYVFHQDMEQLAPEIRSYEDPAALDGGEEGMDIITHILALAPRLLKDSGSIFLEVDPRHPELVSSWLQSRPDLYLNLVAVRRDFCGRPRFLHIRRSGP

SEQ ID NO: 4757 - protein, 410 aa, Homo sapiens
MAAEIHSRPQSSRPVLLSKIEGHQDAVTAALLIPKEDGVITASEDRTIRVWLKRDSGQYWPSIYHTMASPCSAMAYHHDSRRIFVGQDNGAVMEFHVSEDFNKMNFIKTYPAHQNRVSAIIFSLATEWVISTGHDKCVSWMCTRSGNMLGRHFFTSWASCLQYDFDTQYAFVGDYSGQITLLKLEQNTCSVITTLKGHEGSVACLWWDPIQRLLFSGASDNSIIMWDIGGRKGRTLLLQGHHDKVQSLCYLQLTRQLVSCSSDGGIAVWNMDVSREEAPQWLESDSCQKCEQPFFWNIKQMWDTKTLGLRQHHCRKCGQAVCGKCSSKRSSYPVMGFEFQVRVCDSCYDSIKDEDRTSLATFHEGKHNISHMSMDIARGLMVTCGTDRIVKIWDMTPVVGCSLATGFSPH

SEQ ID NO: 4758 - protein, 407 aa, Homo sapiens
MNNSGADEIGKLFVGGLDWSTTQETLRSYFSQYGEVVDCVIMKDKTTNQSRGFGFVKFKDPNCVGTVLASRPHTLDGRNIDPKPCTPRGMQPERTRPKEGWQKGPRSDNSKSNKIFVGGIPHNCGETELREYFKKFGVVTEVVMIYDAEKQRPRGFGFITFEDEQSVDQAVNMHFHDIMGKKVEVKRAEPRDSKSQAPGQPGASQWGSRVVPNAANGWAGQPPPTWQQGYGPQGMWVPAGQAIGGYGPPPAGRGAPPPPPPFTSYIVSTPPGGFPPPQGFPQGYGAPPQFSFGYGPPPPPPDQFAPPGVPPPPATPGAAPLAFPPPPSQAAPDMSKPPTAQPDFPYGQYAGYGQDLSGFGQGFSDPSQQPPSYGGPSVPGSGGPPAGGSGFGRGQNHNVQGFHPYRR

SEQ ID NO: 4759 - protein, 44 aa, Homo sapiens
MADKPDMGEIASFDKAKLKKTETQEKNTLPTKETIEQEKRSEIS

SEQ ID NO: 4760 - protein, 535 aa, Homo sapiens
MSEGESQTVLSSGSDPKVESSSSAPGLTSVSPPVTSTTSAASPEEEEESEDESEILEESPCGRWQKRREEVNQRNVPGIDSAYLAMDTEEGVEVVWNEVQFSERKNYKLQEEKVRAVFDNLIQLEHLNIVKFHKYWADIKENKARVIFITEYMSSGSLKQFLKKTKKNHKTMNEKAWKRWCTQILSALSYLHSCDPPIIHGNLTCDTIFIQHNGLIKIGSVAPDTINNHVKTCREEQKNLHFFAPEYGEVTNVTTAVDIYSFGMCALEMAVLEIQGNGESSYVPQEAISSAIQLLEDPLQREFIQKCLQSEPARRPTARELLFHPALFEVPSLKLLAAHCIVGHQHMIPENALEEITKNMDTSAVLAEIPAGPGREPVQTLYSQSPALELDKFLEDVRNGIYPLTAFGLPRPQQPQQEEVTSPVVPPSVKTPTPEPAEVETRKVVLMQCNIESVEEGVKHHLTLLLKLEDKLNRHLSCDLMPNENIPELAAELVQLGFISEADQSRLTSLLEETLNKFNFARNSTLNSAAVTVSS

SEQ ID NO: 4761 - protein, 193 aa, Homo sapiens
MDSTLAVQQYIQQNIRADCSNIDKILEPPEGQDEGVWKYEHLRQFCLELNGLAVKLQSECHPDTCTQMTATEQWIFLCAAHKTPKECPAIDYTRHTLDGAACLLNSNKYFPSRVSIKESSVAKLGSVCRRIYRIFSHAYFHHRQIFDEYENETFLCHRFTKFVMKYNLMSKDNLIVPILEEEVQNSVSGESEA

SEQ ID NO: 4762 - protein, 890 aa, Homo sapiens
MSANNSPPSAQKSVLPTAIPAVLPAASPCSSPKTGLSARLSNGSFSAPSLTNSRGSVHTVSFLLQIGLTRESVTIEAQELSLSAVKDLVCSIVYQKFPECGFFGMYDKILLFRHDMNSENILQLITSADEIHEGDLVEVVLSALATVEDFQIRPHTLYVHSYKAPTFCDYCGEMLWGLVRQGLKCEGCGLNYHKRCAFKIPNNCSGVRKRRLSNVSLPGPGLSVPRPLQPEYVALPSEESHVHQEPSKRIPSWSGRPIWMEKMVMCRVKVPHTFAVHSYTRPTICQYCKRLLKGLFRQGMQCKDCKFNCHKRCASKVPRDCLGEVTFNGEPSSLGTDTDIPMDIDNNDINSDSSRGLDDTEEPSPPEDKMFFLDPSDLDVERDEEAVKTISPSTSNNIPLMRVVQSIKHTKRKSSTMVKEGWMVHYTSRDNLRKRHYWRLDSKCLTLFQNESGSKYYKEIPLSEILRISSPRDFTNISQGSNPHCFEIITDTMVYFVGENNGDSSHNPVLAATGVGLDVAQSWEKAIRQALMPVTPQASVCTSPGQGKDHKDLSTSISVSNCQIQENVDISTVYQIFADEVLGSGQFGIVYGGKHRKTGRDVAIKVIDKMRFPTKQESQLRNEVAILQNLHHPGIVNLECMFETPERVFVVMEKLHGDMLEMILSSEKSRLPERITKFMVTQILVALRNLHFKNIVHCDLKPENVLLASAEPFPQVKLCDFGFARIIGEKSFRRSVVGTPAYLAPEVLRSKGYNRSLDMWSVGVIIYVSLSGTFPFNEDEDINDQIQNAAFMYPPNPWREISGEAIDLINNLLQVKMRKRYSVDKSLSHPWLQDYQTWLDLREFETRIGERYITHESDDARWEIHAYTHNLVYPKHFIMAPNPDDMEEDP

SEQ ID NO: 4763 - protein, 368 aa, Homo sapiens
MEPGQPREPQEPREPGPGAETAAAPVWEEAKIFYDNLAPKKKPKSPKPQNAVTIAVSSRALFRMDEEQQIYTEQGVEEYVRYQLEHENEPFSPGPAFPFVKALEAVNRRLRELYPDSEDVFDIVLMTNNHAQVGVRLINSINHYDLFIERFCMTGGNSPICYLKAYHTNLYLSADAEKVREAIDEGIAAATIFSPSRDVVVSQSQLRVAFDGDAVLFSDESERIVKAHGLDRFFEHEKAHENKPLAQGPLKGFLEALGRLQKKFYSKGLRLECPIRTYLVTARSAASSGARALKTLRSWGLETDEALFLAGAPKGPLLEKIRPHIFFDDQMFHVAGAQEMGTVAAHVPYGVAQTPRRTAPAKQAPSAQ

SEQ ID NO: 4764 - protein, 359 aa, Homo sapiens
MLSAASRVVSRAAVHCALRSPPPEARALAMSRPPPPRVASVLGTMEMGRRMDAPASAAAVRAFLERGHTELDTAFMYSDGQSETILGGLGLGLGGGDCRVKIATKANPWDGKSLKPDSVRSQLETSLKRLQCPQVDLFYLHAPDHGTPVEETLHACQRLHQEGKFVELGLSNYASWEVAEICTLCKSNGWILPTVYQGMYNATTRQVETELFPCLRHFGLRFYAYNPLAGGLLTGKYKYEDKDGKQPVGRFFGNSWAETYRNRFWKEHHFEAIALVEKALQAAYGASAPSVTSAALRWMYHHSQLQGAHGDAVILGMSSLEQLEQNLAATEEGPLEPAVVDAFNQAWHLVAHECPNYFR

SEQ ID NO: 4765 - protein, 186 aa, Homo sapiens
MDADSDVALDILITNVVCVFRTRCHLNLRKIALEGANVIYKRDVGKVLMKLRKPRITATIWSSGKIICTGATSEEEAKFGARRLARSLQKLGFQVIFTDFKVVNVLAVCNMPFEIRLPEFTKNNRPHASYEPELHPAVCYRIKSLRATLQIFSTGSITVTGPNVKAVATAVEQIYPFVFESRKEIL

SEQ ID NO: 4766 - protein, 178 aa, Homo sapiens
MAAPLGGMFSGQPPGPPQAPPGLPGQASLLQAAPGAPRPSSSTLVDELESSFEACFASLVSQDYVNGTDQEEIRTGVDQCIQKFLDIARQTECFFLQKRLQLSVQKPEQVIKEDVSELRNELQRKDALVQKHLTKLRHWQQVLEDINVQHKKPADIPQGSLAYLEQASANIPAPLKPT

SEQ ID NO: 4767 - protein, 245 aa, Homo sapiens
MEKTELIQKAKLAEQAERYDDMATCMKAVTEQGAELSNEERNLLSVAYKNVVGGRRSAWRVISSIEQKTDTSDKKLQLIKDYREKVESELRSICTTVLELLDKYLIANATNPESKVFYLKMKGDYFRYLAEVACGDDRKQTIDNSQGAYQEAFDISKKEMQPTHPIRLGLALNFSVFYYEILNNPELACTLAKTAFDEAIAELDTLNEDSYKDSTLIMQLLRDNLTLWTSDSAGEECDAAEGAEN

SEQ ID NO: 4768 - protein, 177 aa, Homo sapiens
MPGLTAYFGLLEICGVKGGETVMVNAAAGAVGSVVGQIAKLKGCKVVGAVGSDEKVAYLQKLGFDVVFNYKTVESLEETLKKASPDGYDCYFDNVGGEFSNTVIGQMKKFGRIAICGAISTYNRTGPLPPGPPPEIVIYQELRMEAFVVYRWQGDARQKALKDLLKWVLELPYFVID

SEQ ID NO: 4769 - protein, 1219 aa, Homo sapiens
MFGAGDEDDTDFLSPSGGARLASLFGLDQAAAGHGNEFFQYTAPKQPKKGQGTAATGNQATPKTAPATMSTPTILVATAVHAYRYTNGQYVKQGKFGAAVLGNHTAREYRILLYISQQQPVTVARIHVNFELMVRPNNYSTFYDDQRQNWSIMFESEKAAVEFNKQVCIAKCNSTSSLDAVLSQDLIVADGPAVEVGDSLEVAYTGWLFQNHVLGQVFDSTANKDKLLRLKLGSGKVIKGWEDGMLGMKKGGKRLLIVPPACAVGSEGVIGWTQATDSILVFEVEVRRVKFARDSGSDGHSVSSRDSAAPSPIPGADNLSADPVVSPPTSIPFKSGEPALRTKSNSLSEQLAINTSPDAVKAKLISRMAKMGQPMLPILPPQLDSNDSEIEDVNTLQGGGQPVVTPSVQPSLHPAHPALPQMTSQAPQPSVTGLQAPSAALMQVSSLDSHSAVSGNAQSFQPYAGMQAYAYPQASAVTSQLQPVRPLYPAPLSQPPHFQGSGDMASFLMTEARQHNTEIRMAVSKVADKMDHLMTKVEELQKHSAGNSMLIPSMSVTMETSMIMSNIQRIIQENERLKQEILEKSNRIEEQNDKISELIERNQRYVEQSNLMMEKRNNSLQTATENTQARVLHAEQEKAKVTEELAAATAQVSHLQLKMTAHQKKETELQMQLTESLKETDLLRGQLTKVQAKLSELQETSEQAQSKFKSEKQNRKQLELKVTSLEEELTDLRVEKESLEKNLSERKKKSAQERSQAEEEIDEIRKSYQEELDKLRQLLKKTRVSTDQAAAEQLSLVQAELQTQWEAKCEHLLASAKDEHLQQYQEVCAQRDAYQQKLVQLQEKCLALQAQITALTKQNEQHIKELEKNKSQMSGVEAAASDPSEKVKKIMNQVFQSLRREFELEESYNGRTILGTIMNTIKMVTLQLLNQQEQEKEESSSEEEEEKAEERPRRPSQEQSASASSGQPQAPLNRERPESPMVPSEQVVEEAVPLPPQALTTSQDGHRRKGDSEAEALSEIKDGSLPPELSCIPSHRVLGPPTSIPPEPLGPVSMDSECEESLAASPMAAKPDNPSGKVCVREVAPDGPLQESSTRLSLTSDPEEGDPLALGPESPGEPQPPQLKKDDVTSSTGPHKELSSTEAGSTVAGAALRPSHHSQRSSLSGDEEDELFKGATLKALRPKAQPEEEDEDEVSMKGRPPPTPLFGDDDDDDDIDWLG

SEQ ID NO: 4770 - protein, 2325 aa, Homo sapiens
MKKGSQQKIFSKAKIPSSSHSPIPSSMSNMRSRSLSPLIGSETLPFHSGGQWCEQVEIADENNMLLDYQDHKGADSHAGVRYITEALIKKLTKQDNLALIKSLNLSLSKDGGKKFKYIENLEKCVKLEVLNLSYNLIGKIEKLDKLLKLRELNLSYNKISKIEGIENMCNLQKLNLAGNEIEHIPVWLGKKLKSLRVLNLKGNKISSLQDISKLKPLQDLISLILVENPVVTLPHYLQFTIFHLRSLESLEGQPVTTQDRQEAFERFSLEEVERLERDLEKKMIETEELKSKQTRFLEEIKNQDKLNKSLKEEAMLQKQSCEELKSDLNTKNELLKQKTIELTRACQKQYELEQELAFYKIDAKFEPLNYYPSEYAEIDKAPDESPYIGKSRYKRNMFATESYIIDSAQAVQIKKMEPDEQLRNDHMNLRGHTPLDTQLEDKEKKISAAQTRLSELHDEIEKAEQQILRATEEFKQLEEAIQLKKISEAGKDLLYKQLSGRLQLVNKLRQEALDLELQMEKQKQEIAGKQKEIKDLQIAIDSLDSKDPKHSHMKAQKSGKEQQLDIMNKQYQQLESRLDEILSRIAKETEEIKDLEEQLTEGQIAANEALKKDLEGVISGLQEYLGTIKGQATQAQNECRKLRDEKETLLQRLTEVEQERDQLEIVAMDAENMRKELAELESALQEQHEVNASLQQTQGDLSAYEAELEARLNLRDAEANQLKEELEKVTRLTQLEQSALQAELEKERQALKNALGKAQFSEEKEQENSELHAKLKHLQDDNNLLKQQLKDFQNHLNHVVDGLVRPEEVAARVDELRRKLKLGTGEMNIHSPSDVLGKSLADLQKQFSEILARSKWERDEAQVRERKLQEEMALQQEKLATGQEEFRQACERALEARMNFDKRQHEARIQQMENEIHYLQENLKSMEEIQGLTDLQLQEADEEKERILAQLRELEKKKKLEDAKSQEQVFGLDKELKKLKKAVATSDKLATAELTIAKDQLKSLHGTVMKINQERAEELQEAERFSRKAAQAARDLTRAEAEIELLQNLLRQKGEQFRLEMEKTGVGTGANSQVLEIEKLNETMERQRTEIARLQNVLDLTGSDNKGGFENVLEEIAELRREVSYQNDYISSMADPFKRRGYWYFMPPPPSSKVSSHSSQATKDSGVGLKYSASTPVRKPRPGQQDGKEGSQPPPASGYWVYSPIRSGLHKLFPSRDADSGGDSQEESELDDQEEPPFVPPPGYMMYTVLPDGSPVPQGMALYAPPPPLPNNSRPLTPGTVVYGPPPAGAPMVYGPPPPNFSIPFIPMGVLHCNVPEHHNLENEVSRLEDIMQHLKSKKREERWMRASKRQSEKEMEELHHNIDDLLQEKKSLECEVEELHRTVQKRQQQKDFIDGNVESLMTELEIEKSLKHHEDIVDEIECIEKTLLKRRSELREADRLLAEAESELSCTKEKTKNAVEKFTDAKRSLLQTESDAEELERRAQETAVNLVKADQQLRSLQADAKDLEQHKIKQEEILKEINKIVAAKDSDFQCLSKKKEKLTEELQKLQKDIEMAERNEDHHLQVLKESEVLLQAKRAELEKLKSQVTSQQQEMAVLDRQLGHKKEELHLLQGSMVQAKADLQEALRLGETEVTEKCNHIREVKSLLEELSFQKGELNVQISERKTQLTLIKQEIEKEEENLQVVLRQMSKHKTELKNILDMLQLENHELQGLKLQHDQRVSELEKTQVAVLEEKLELENLQQISQQQKGEIEWQKQLLERDKREIERMTAESRALQSCVECLSKEKEDLQEKCDIWEKKLAQTKRVLAAAEENSKMEQSNLEKLELNVRKLQQELDQLNRDKLSLHNDISAMQQQLQEKREAVNSLQEELANVQDHLNLAKQDLLHTTKHQDVLLSEQTRLQKDISEWANRFEDCQKEEETKQQQLQVLQNEIEENKLKLVQQEMMFQRLQKERESEESKLETSKVTLKEQQHQLEKELTDQKSKLDQVLSKVLAAEERVRTLQEEERWCESLEKTLSQTKRQLSEREQQLVEKSGELLALQKEADSMRADFSLLRNQFLTERKKAEKQVASLKEALKIQRSQLEKNLLEQKQENSCIQKEMATIELVAQDNHERARRLMKELNQMQYEYTELKKQMANQKDLERRQMEISDAMRTLKSEVKDEIRTSLKNLNQFLPELPADLEAILERNENLEGELESLKENLPFTMNEGPFEEKLNFSQVHIMDEHWRGEALREKLRHREDRLKAQLRHCMSKQAEVLIKGKRQTEGTLHSLRRQVDALGELVTSTSADSASSPSLSQLESSLTEDSQLGQNQEKNASAR
